United States Patent Application Publication US 2011/0183924 A1 - sequence listing, part 100

SEQ ID NO: 311216 - DNA, 5095 bp, Homo sapiens
attcggaagaaggcggagcctacctctcatcaggaccagtctgactgcacctgcatccttagctcagagcatccccggagcatcttaagagctgagcgcagctgacaactaggggccggaccgtcgcaggaggcgtccgctggataccttcccccttccctgacctagagctctacagctgctgcctcggtactgaccgagggttcccagagctgtctcaccattgcaaaaacgttatagcaacagcctctgattacgacatggctgagatcaccaatatccgacctagctttgatgtgtcaccggtggtggccggcctcatcggggcctctgtgctggtggtgtgtgtctcggtgaccgtctttgtctggtcatgctgccaccagcaggcagagaagaagcacaagaacccaccatacaagtttattcacatgctcaaaggcatcagcatatacccagagaccctcagcaacaagaagaaaatcatcaaagtgcggagagacaaagatggtcctgggagggaaggtggacgtaggaacctgttggtggacgcagcagaggctggcctgctaagccgagacaaagatcccagggggcctagctctggatcttgtatagaccaattacccatcaaaatggactatggggaagaactaaggagccctattacaagcctgacccctggggagagcaaaaccacctctccatcatctccagaggaggatgtcatgctaggatccctcaccttctcagtggactataacttcccgaaaaaagccctggtggtgacaatccaggaggcccacgggctgccagtgatggatgaccagacccagggatctgacccctacatcaaaatgaccatccttcctgacaaacggcatcgggtgaagaccagagtgctgcggaagaccctggaccctgtgtttgacgagaccttcaccttctatggcatcccctacagccagctgcaggacctggtgctgcacttccttgtcctcagctttgaccgcttctctcgggatgatgtcattggcgaggtcatggtgccactggcaggggtggaccccagcacaggcaaggtacaactgaccagggacatcatcaaaaggaatatccagaagtgcatcagcagaggggagctccaggtgtctctgtcatatcagcctgtggcacagagaatgacagtggtggtcctcaaagccagacacttgccgaagatggatatcaccggtctctcaggtaatccttatgtcaaggtgaacgtctactacggcagaaagcgcattgccaagaagaaaacccatgtgaagaagtgcactttgaaccccatcttcaatgaatctttcatctacgacatccccactgacctcctgcctgatatcagcatcgagttcctcgttatcgacttcgatcgcaccaccaagaatgaggtggtggggaggctgatcctgggggcacacagtgtcacagccagtggtgctgaacactggagagaggtctgcgagagcccccgcaagcctgtggccaagtggcacagtctgagcgagtactaatcctgttcttctctcctctaatccccgggggccaagctggggagggatgtggaggggaaaaagatgacagagaagtggactccaaacctcattttagttgtagaagaaaatttcttacaaaacaaattccacaaagaacaccctatatgaccacagctgcagatcagttcttagcaatgatgtttttttttctgctttgcaaggcgctagaatcttttattttactttattttttttgaggtggagtttcgctcttgttgcccgggctggagtgcaatggtgagatctcaactcactgcaacctctgccctccaggttcaagtgattctcctccctcagcctcccaagtagctgggattacaggcacccacgagcatgcccggctaattttttgtattttcagtagagatgggtttcaccatgttggccaggctggtctcgaattccagacctcaggtgatccacccgcctcggcctcccaaagtgctgggattacaggtgcgagccaccgtgcccggcctctggttttgttttgttttttttttttaatgggggacaaaagagagggaaagacccctataaatctatatataacaatgtaaccatatacttgcatgtctaatacaaactgaagaaattagcctaactgccaatatcaagttgcagattttaatccatggaaattgtgttttgtgctgaattgtatttgctgattacctgaaattggcttctttttattgggcttctctggagaatttctcccactccccacctctgcagaagaaaattttgctcttataaaacctcatgttttcatcattcccatcttttctttttattgcctcttatatctctgctctttgacctcaaggtctagaggtctgcagtaagccaagaaacaaaggtggggtggatgaggcaaggtttgcaggagaaagaggaattgagaaatggggtatttttgctatcagctcttctgctatgaagtagtaaaaggcagtctataattaactgacagacctaactgaagcacagagaatacatcagacttatgcatccaagacatcagaacttggattttatcaaacttgatgacttctctaaaaggagctttggaaacttcaaattcagctataggatagtaccaatgaacacatccagctgatcccaaaagctgttttcaggtataaggacaaggagaggagacaagtgacgacagccattcccctttgcagctatctactgtagtgacagccatttcttggttgatgggttggaagtcatcagaggtttgaagaattacactggcctttgtttttctggaaatgccgaccatggagatgctttagagtcttctcaaatagcttagatgttgtaatgaggttagctttgcttcataaaacaggggccctcagaagttctccttaaatttttcaataaaaatttagctcttaaaaaaataacagtgtgactgagtgaatgaagataagttggattctttcagagcattcttttcctcaaaacgagctgcataattcttggaatttatgtcttaccacatggtggagggatggaggaactacaggatgcaattcttcttctaccaatgggcaatagaggttgagagagattcagcatctttctgggattagaattcaagtctctttactcctacagcagctgtgtctccaacgttgagactttgcagatggcacagactccatggataataggtaaacttggggccgggcgcagtggctcacgcctgtaatcccagtattttgggaggccgaggtggaaagatcgcttgagcccaggagttcaagaccagcctgggctacatgacgaaactccatctctatcaaaaatacaaaaaattaactaggtgtggtgctgcacgcctgtggtcccagctattcaggaggctgaggtgggaggatcatttgagcccagaggtagaggctgcagtgagccatgatcatgccactgcactctgggctgggtaacagagtgagatcctgtctcaaaaattaattaattaattaattaaaataaactaggtaaacttggataggcagtagatatttttgcccacctgaggaggaactcagtcaagctgttgcttaacagcttgatccagggcgtgaaaggttagttgagactgaagtgttcacttccatagaagaacatcacttttaaccttgctttggcgaagggagtcggaaagctgagtctctatggacgggggggtgatcttgctttcagtgttccctcagcttttgtggatttaaaaccattctgctccccctaaaccttttgtttgatttcagcccatgttcttgacaatgcagagcaattctgagcagtcacaaagcctactctctgttcttgtccctgccaacccccaccccccataatctgactcacaacttcaccatcagttggggtcataccactagtctctgtcctataccccatgaaatgtaaatactgtatcataagtagaagaaaataatttttgttttctaaaaatgcattttgagatagtttaatgtaaatctgacaggagcattctgaagccccattaggaaaaaatttaaatggttcctcttcatcgccttaatgtctaaagatcagaaatcgctgagcaaacccgcttttgtttccttcccagaaacaatgcaaaacaacaggtggagatagtctggtctttgccctgctgtgtgtgcctctgtagctcctcctgacaaacgtctgggaaaacagcctcaccccactctcctctctcttccccatttccttgtagctttattccttgcatctttgggtctactgagcagtgggtgctgaggtgacaggggaggaaccagttgttctgtagcctaggaactgcctcagtgtctttgccagaaaaaggcaaagaggcggacagtgcagggctcctccctcctacctcaggcctgatccatcgtgcccttgactttgccgtctcaaagtttcttagctgactttggctttcacatttgttctttccagagctaactgataagagtggaggaggaatgccttctcctaagagtcagttgaaagaaagacaagagagtcacatcttagcttttgcacaaggcattcgtggtcaggaataggttagggaatggtcacttctgattttccaacagttgctccttctctgaagagatcttgattcctttgggaagacaagaatttttcttaataacaaaggtccctttatgagttattccttctttcagttcatctcactggagcacagccaagatggacatgtttatggacagtgctctagatgtgaaaacagatagaactggtttgtgggacaggggcagcttgctcaggagagggaataacgcaggtcccttttcttggaaggcttgtactatggccatgacagtgacattgccctcaccatgatccctctccaaagtggttgtctttctttaccttgtgtcttctcttgtaaaaatgaaactcaaaaataaaataaatgtgtcaaattttga

SEQ ID NO: 311217 - DNA, 5099 bp, Homo sapiens
attcggaagaaggcggagcctacctctcatcaggaccagtctgactgcacctgcatccttagctcagagcatccccggagcatcttaagagctgagcgcagctgacaactaggggccggaccgtcgcaggaggcgtccgctggataccttcccccttccctgacctagagctctacagctgctgcctcggtactgaccgagggttcccagagctgtctcaccattgcaaaaacgttatagcaacagcctctgattacgacatggctgagatcaccaatatccgacctagctttgatgtgtcaccggtggtggccggcctcatcggggcctctgtgctggtggtgtgtgtctcggtgaccgtctttgtctggtcatgctgccaccagcaggcagagaagaagcacaagaacccaccatacaagtttattcacatgctcaaaggcatcagcatatacccagagaccctcagcaacaagaagaaaatcatcaaagtgcggagagacaaagatggtcctgggagggaaggtggacgtaggaacctgttggtggacgcagcagaggctggcctgctaagccgagacaaagatcccagggggcctagctctggatcttgtatagaccaattacccatcaaaatggactatggggaagaactaaggagccctattacaagcctgacccctggggagagcaaaaccacctctccatcatctccagaggaggatgtcatgctaggatccctcaccttctcagtggactataacttcccgaaaaaagccctggtggtgacaatccaggaggcccacgggctgccagtgatggatgaccagacccagggatctgacccctacatcaaaatgaccatccttcctgacaaacggcatcgggtgaagaccagagtgctgcggaagaccctggaccctgtgtttgacgagaccttcaccttctatggcatcccctacagccagctgcaggacctggtgctgcacttccttgtcctcagctttgaccgcttctctcgggatgatgtcattggcgaggtcatggtgccactggcaggggtggaccccagcacaggcaaggtacaactgaccagggacatcatcaaaaggaatatccagaagtgcatcagcagaggggagctccaggtgtctctgtcatatcagcctgtggcacagagaatgacagtggtggtcctcaaagccagacacttgccgaagatggatatcaccggtctctcaggtaatccttatgtcaaggtgaacgtctactacggcagaaagcgcattgccaagaagaaaacccatgtgaagaagtgcactttgaaccccatcttcaatgaatctttcatctacgacatccccactgacctcctgcctgatatcagcatcgagttcctcgttatcgacttcgatcgcaccaccaagaatgaggtggtggggaggctgatcctgggggcacacagtgtcacagccagtggtgctgaacactggagagaggtctgcgagagcccccgcaagcctgtggccaagtggcacagtctgagcgagtactaatcctgttcttctctcctctaatccccgggggccaagctggggagggatgtggaggggaaaaagatgacagagaagtggactccaaacctcattttagttgtagaagaaaatttcttacaaaacaaattccacaaagaacaccctatatgaccacagctgcagatcagttcttagcaatgatgtttttttttctgctttgcaaggcgctagaatcttttattttactttattttttttgaggtggagtttcgctcttgttgcccgggctggagtgcaatggtgagatctcaactcactgcaacctctgccctccaggttcaagtgattctcctccctcagcctcccaagtagctgggattacaggcacccacgagcatgcccggctaattttttgtattttcagtagagatgggtttcaccatgttggccaggctggtctcgaattccagacctcaggtgatccacccgcctcggcctcccaaagtgctgggattacaggtgcgagccaccgtgcccggcctctggttttgttttgttttttttttttaatgggggacaaaagagagggaaagacccctataaatctatatataacaatgtaaccatatacttgcatgtctaatacaaactgaagaaattagcctaactgccaatatcaagttgcagattttaatccatggaaattgtgttttgtgctgaattgtatttgctgattacctgaaattggcttctttttattgggcttctctggagaatttctcccactccccacctctgcagaagaaaattttgctcttataaaacctcatgttttcatcattcccatcttttctttttattgcctcttatatctctgctctttgacctcaaggtctagaggtctgcagtaagccaagaaacaaaggtggggtggatgaggcaaggtttgcaggagaaagaggaattgagaaatggggtatttttgctatcagctcttctgctatgaagtagtaaaaggcagtctataattaactgacagacctaactgaagcacagagaatacatcagacttatgcatccaagacatcagaacttggattttatcaaacttgatgacttctctaaaaggagctttggaaacttcaaattcagctataggatagtaccaatgaacacatccagctgatcccaaaagctgttttcaggtataaggacaaggagaggagacaagtgacgacagccattcccctttgcagctatctactgtagtgacagccatttcttggttgatgggttggaagtcatcagaggtttgaagaattacactggcctttgtttttctggaaatgccgaccatggagatgctttagagtcttctcaaatagcttagatgttgtaatgaggttagctttgcttcataaaacaggggccctcagaagttctccttaaatttttcaataaaaatttagctcttaaaaaaataacagtgtgactgagtgaatgaagataagttggattctttcagagcattcttttcctcaaaacgagctgcataattcttggaatttatgtcttaccacatggtggagggatggaggaactacaggatgcaattcttcttctaccaatgggcaatagaggttgagagagattcagcatctttctgggattagaattcaagtctctttactcctacagcagctgtgtctccaacgttgagactttgcagatggcacagactccatggataataggtaaacttggggccgggcgcagtggctcacgcctgtaatcccagtattttgggaggccgaggtggaaagatcgcttgagcccaggagttcaagaccagcctgggctacatgacgaaactccatctctatcaaaaatacaaaaaattaactaggtgtggtgctgcacgcctgtggtcccagctattcaggaggctgaggtgggaggatcatttgagcccagaggtagaggctgcagtgagccatgatcatgccactgcactctgggctgggtaacagagtgagatcctgtctcaaaaattaattaattaattaattaaaataaactaggtaaacttggataggcagtagatatttttgcccacctgaggaggaactcagtcaagctgttgcttaacagcttgatccagggcgtgaaaggttagttgagactgaagtgttcacttccatagaagaacatcacttttaaccttgctttggcgaagggagtcggaaagctgagtctctatggacgggggggtgatcttgctttcagtgttccctcagcttttgtggatttaaaaccattctgctccccctaaaccttttgtttgatttcagcccatgttcttgacaatgcagagcaattctgagcagtcacaaagcctactctctgttcttgtccctgccaacccccaccccccataatctgactcacaacttcaccatcagttggggtcataccactagtctctgtcctataccccatgaaatgtaaatactgtatcataagtagaagaaaataatttttgttttctaaaaatgcattttgagatagtttaatgtaaatctgacaggagcattctgaagccccattaggaaaaaatttaaatggttcctcttcatcgccttaatgtctaaagatcagaaatcgctgagcaaacccgcttttgtttccttcccagaaacaatgcaaaacaacaggtggagatagtctggtctttgccctgctgtgtgtgcctctgtagctcctcctgacaaacgtctgggaaaacagcctcaccccactctcctctctcttccccatttccttgtagctttattccttgcatctttgggtctactgagcagtgggtgctgaggtgacaggggaggaaccagttgttctgtagcctaggaactgcctcagtgtctttgccagaaaaaggcaaagaggcggacagtgcagggctcctccctcctacctcaggcctgatccatcgtgcccttgactttgccgtctcaaagtttcttagctgactttggctttcacatttgttctttccagagctaactgataagagtggaggaggaatgccttctcctaagagtcagttgaaagaaagacaagagagtcacatcttagcttttgcacaaggcattcgtggtcaggaataggttagggaatggtcacttctgattttccaacagttgctccttctctgaagagatcttgattcctttgggaagacaagaatttttcttaataacgcaggtcccttttcttggaaggcttgtactatggccatgacagtgacattgccctcaccatgatccctctccaaagtggttgtctttctttaccttgtgtcttctcttgtaaaaatgaaactcaaaaataaaataaatgtgtcaaattttgaaaaaaaaagaaaactgaaaaagctaacatgaattgtgtgaaattgcataatgctgtaatgctaatctacaatatgtaatgctatcttgtatgttgaatttgttaatgcaccacacaagtgcaaaataaagactgattcacattacataggca

SEQ ID NO: 311218 - DNA, 3688 bp, Homo sapiens
attcggaagaaggcggagcctacctctcatcaggaccagtctgactgcacctgcatccttagctcagagcatccccggagcatcttaagagctgagcgcagctgacaactaggggccggaccgtcgcaggaggcgtccgctggataccttcccccttccctgacctagagctctacagctgctgcctcggtactgaccgagggttcccagagctgtctcaccattgcaaaaacgttatagcaacagcctctgattacgacatggctgagatcaccaatatccgacctagctttgatgtgtcaccggtggtggccggcctcatcggggcctctgtgctggtggtgtgtgtctcggtgaccgtctttgtctggtcatgctgccaccagcaggcagagaagaagcacaagaacccaccatacaagtttattcacatgctcaaaggcatcagcatatacccagagaccctcagcaacaagaagaaaatcatcaaagtgcggagagacaaagatggtcctgggagggaaggtggacgtaggaacctgttggtggacgcagcagaggctggcctgctaagccgagacaaagatcccagggggcctagctctggatcttgtatagaccaattacccatcaaaatggactatggggaagaactaaggagccctattacaagcctgacccctggggagagcaaaaccacctctccatcatctccagaggaggatgtcatgctaggatccctcaccttctcagtggactataacttcccgaaaaaagccctggtggtgacaatccaggaggcccacgggctgccagtgatggatgaccagacccagggatctgacccctacatcaaaatgaccatccttcctgacaaacggcatcgggtgaagaccagagtgctgcggaagaccctggaccctgtgtttgacgagaccttcaccttctatggcatcccctacagccagctgcaggacctggtgctgcacttccttgtcctcagctttgaccgcttctctcgggatgatgtcattggcgaggtcatggtgccactggcaggggtggaccccagcacaggcaaggtacaactgaccagggacatcatcaaaaggaatatccagaagtgcatcagcagaggggagctccaggtgtctctgtcatatcagcctgtggcacagagaatgacagtggtggtcctcaaagccagacacttgccgaagatggatatcaccggtctctcaggtaatccttatgtcaaggtgaacgtctactacggcagaaagcgcattgccaagaagaaaacccatgtgaagaagtgcactttgaaccccatcttcaatgaatctttcatctacgacatccccactgacctcctgcctgatatcagcatcgagttcctcgttatcgacttcgatcgcaccaccaagaatgaggtggtggggaggctgatcctgggggcacacagtgtcacagccagtggtgctgaacactggagagaggtctgcgagagcccccgcaagcctgtggccaagtggcacagtctgagcgagtactaatcctgttcttctctcctctaatccccgggggccaagctggggagggatgtggaggggaaaaagatgacagagaagtggactccaaacctcattttagttgtagaagaaaatttcttacaaaacaaattccacaaagaacaccctatatgaccacagctgcagatcagttcttagcaatgatgtttttttttctgctttgcaaggcgctagaatcttttattttactttattttttttgaggtggagtttcgctcttgttgcccgggctggagtgcaatggtgagatctcaactcactgcaacctctgccctccaggttcaagtgattctcctccctcagcctcccaagtagcagctattcaggaggctgaggtgggaggatcatttgagcccagaggtagaggctgcagtgagccatgatcatgccactgcactctgggctgggtaacagagtgagatcctgtctcaaaaattaattaattaattaattaaaataaactaggtaaacttggataggcagtagatatttttgcccacctgaggaggaactcagtcaagctgttgcttaacagcttgatccagggcgtgaaaggttagttgagactgaagtgttcacttccatagaagaacatcacttttaaccttgctttggcgaagggagtcggaaagctgagtctctatggacgggggggtgatcttgctttcagtgttccctcagcttttgtggatttaaaaccattctgctccccctaaaccttttgtttgatttcagcccatgttcttgacaatgcagagcaattctgagcagtcacaaagcctactctctgttcttgtccctgccaacccccaccccccataatctgactcacaacttcaccatcagttggggtcataccactagtctctgtcctataccccatgaaatgtaaatactgtatcataagtagaagaaaataatttttgttttctaaaaatgcattttgagatagtttaatgtaaatctgacaggagcattctgaagccccattaggaaaaaatttaaatggttcctcttcatcgccttaatgtctaaagatcagaaatcgctgagcaaacccgcttttgtttccttcccagaaacaatgcaaaacaacaggtggagatagtctggtctttgccctgctgtgtgtgcctctgtagctcctcctgacaaacgtctgggaaaacagcctcaccccactctcctctctcttccccatttccttgtagctttattccttgcatctttgggtctactgagcagtgggtgctgaggtgacaggggaggaaccagttgttctgtagcctaggaactgcctcagtgtctttgccagaaaaaggcaaagaggcggacagtgcagggctcctccctcctacctcaggcctgatccatcgtgcccttgactttgccgtctcaaagtttcttagctgactttggctttcacatttgttctttccagagctaactgataagagtggaggaggaatgccttctcctaagagtcagttgaaagaaagacaagagagtcacatcttagcttttgcacaaggcattcgtggtcaggaataggttagggaatggtcacttctgattttccaacagttgctccttctctgaagagatcttgattcctttgggaagacaagaatttttcttaataacaaaggtccctttatgagttattccttctttcagttcatctcactggagcacagccaagatggacatgtttatggacagtgctctagatgtgaaaacagatagaactggtttgtgggacaggggcagcttgctcaggagagggaataacgcaggtcccttttcttggaaggcttgtactatggccatgacagtgacattgccctcaccatgatccctctccaaagtggttgtctttctttaccttgtgtcttctcttgtaaaaatgaaactcaaaaataaaataaatgtgtcaaattttgaaaaaaaaagaaaactgaaaaagctaacatgaattgtgtgaaattgcataatgctgtaatgctaatctacaatatgtaatgctatcttgtatgttgaatttgttaatgcaccacacaagtgcaaaataaagactgattcacattacataggca

SEQ ID NO: 311219 - DNA, 2106 bp, Homo sapiens
attcggaagaaggcggagcctacctctcatcaggaccagtctgactgcacctgcatccttagctcagagcatccccggagcatcttaagagctgagcgcagctgacaactaggggccggaccgtcgcaggaggcgtccgctggataccttcccccttccctgacctagagctctacagctgctgcctcggtactgaccgagggttcccagagctgtctcaccattgcaaaaacgttatagcaacagcctgggctacatgacgaaactccatctctatcaaaaatacaaaaaattaactaggtgtggtgctgcacgcctgtggtcccagctattcaggaggctgaggtgggaggatcatttgagcccagaggtagaggctgcagtgagccatgatcatgccactgcactctgggctgggtaacagagtgagatcctgtctcaaaaattaattaattaattaattaaaataaactaggtaaacttggataggcagtagatatttttgcccacctgaggaggaactcagtcaagctgttgcttaacagcttgatccagggcgtgaaaggttagttgagactgaagtgttcacttccatagaagaacatcacttttaaccttgctttggcgaagggagtcggaaagctgagtctctatggacgggggggtgatcttgctttcagtgttccctcagcttttgtggatttaaaaccattctgctccccctaaaccttttgtttgatttcagcccatgttcttgacaatgcagagcaattctgagcagtcacaaagcctactctctgttcttgtccctgccaacccccaccccccataatctgactcacaacttcaccatcagttggggtcataccactagtctctgtcctataccccatgaaatgtaaatactgtatcataagtagaagaaaataatttttgttttctaaaaatgcattttgagatagtttaatgtaaatctgacaggagcattctgaagccccattaggaaaaaatttaaatggttcctcttcatcgccttaatgtctaaagatcagaaatcgctgagcaaacccgcttttgtttccttcccagaaacaatgcaaaacaacaggtggagatagtctggtctttgccctgctgtgtgtgcctctgtagctcctcctgacaaacgtctgggaaaacagcctcaccccactctcctctctcttccccatttccttgtagctttattccttgcatctttgggtctactgagcagtgggtgctgaggtgacaggggaggaaccagttgttctgtagcctaggaactgcctcagtgtctttgccagaaaaaggcaaagaggcggacagtgcagggctcctccctcctacctcaggcctgatccatcgtgcccttgactttgccgtctcaaagtttcttagctgactttggctttcacatttgttctttccagagctaactgataagagtggaggaggaatgccttctcctaagagtcagttgaaagaaagacaagagagtcacatcttagcttttgcacaaggcattcgtggtcaggaataggttagggaatggtcacttctgattttccaacagttgctccttctctgaagagatcttgattcctttgggaagacaagaatttttcttaataacaaaggtccctttatgagttattccttctttcagttcatctcactggagcacagccaagatggacatgtttatggacagtgctctagatgtgaaaacagatagaactggtttgtgggacaggggcagcttgctcaggagagggaataacgcaggtcccttttcttggaaggcttgtactatggccatgacagtgacattgccctcaccatgatccctctccaaagtggttgtctttctttaccttgtgtcttctcttgtaaaaatgaaactcaaaaataaaataaatgtgtcaaattttgaaaaaaaaagaaaactgaaaaagctaacatgaattgtgtgaaattgcataatgctgtaatgctaatctacaatatgtaatgctatcttgtatgttgaatttgttaatgcaccacacaagtgcaaaataaagactgattcacattacataggca

SEQ ID NO: 311220 - DNA, 2548 bp, Homo sapiens
attcggaagaaggcggagcctacctctcatcaggaccagtctgactgcacctgcatccttagctcagagcatccccggagcatcttaagagctgagcgcagctgacaactaggggccggaccgtcgcaggaggcgtccgctggataccttcccccttccctgacctagagctctacagctgctgcctcggtactgaccgagggttcccagagctgtctcaccattgcaaaaacgttatagcaacagcctctgattacgacatggctgagatcaccaatatccgacctagctttgatgtgtcaccggtggtggccggcctcatcggggcctctgtgctggtggtgtgtgtctcggtgaccgtctttgtctggtcatgctgccaccagcaggcagagaagaagcacaagaacccaccatacaagtttattcacatgctcaaaggcatcagcatatacccagagaccctcagcaacaagaagaaaatcatcaaagtgcggagagacaaagatggtcctgggagggaaggtggacgtaggaacctgttggtggacgcagcagaggctggcctgctaagccgagacaaagatcccagggggcctagctctggatcttgtatagaccaattacccatcaaaatggactatggggaagaactaaggagccctattacaagcctgacccctggggagagcaaaaccacctctccatcatctccagaggaggatgtcatgctaggatccctcaccttctcagtggactataacttcccgaaaaaagccctggtggtgacaatccaggaggcccacgggctgccagtgatggatgaccagacccagggatctgacccctacatcaaaatgaccatccttcctgacaaacggcatcgggtgaagaccagagtgctgcggaagaccctggaccctgtgtttgacgagaccttcaccttctatggcatcccctacagccagctgcaggacctggtgctgcacttccttgtcctcagctttgaccgcttctctcgggatgatgtcattggcgaggtcatggtgccactggcaggggtggaccccagcacaggcaaggtacaactgaccagggacatcatcaaaaggaatatccagaagtgcatcagcagaggggagctccaggtgtctctgtcatatcagcctgtggcacagagaatgacagtggtggtcctcaaagccagacacttgccgaagatggatatcaccggtctctcaggtaatccttatgtcaaggtgaacgtctactacggcagaaagcgcattgccaagaagaaaacccatgtgaagaagtgcactttgaaccccatcttcaatgaatctttcatctacgacatccccactgacctcctgcctgatatcagcatcgagttcctcgttatcgacttcgatcgcaccaccaagaatgaggtggtggggaggctgatcctgggggcacacagtgtcacagccagtggtgctgaacactggagagaggtctgcgagagcccccgcaagcctgtggccaagtggcacagtctgagcgagtactaatcctgttcttctctcctctaatccccgggggccaagctggggagggatgtggaggggaaaaagatgacagagaagtggactccaaacctcattttagttgtagaagaaaatttcttacaaaacaaattccacaaagaacaccctatatgaccacagctgcagatcagttcttagcaatgatgtttttttttctgctttgcaaggcgctagaatcttttattttactttattttttttgaggtggagtttcgctcttgttgcccgggctggagtgcaatggtgagatctcaactcactgcaacctctgccctccaggttcaagtgattctcctccctcagcctcccaagtagctgggattacaggcacccacgagcatgcccggctaattttttgtattttcagtagagatgggtttcaccatgttggccaggctggtctcgaattccagacctcaggtgatccacccgcctcggcctcccaaagtgctgggattacaggtgcgagccaccgtgcccggcctctggttttgttttgttttttttttttaatgggggacaaaagagagggaaagacccctataaatctatatataacaatgtaaccatatacttgcatgtctaatacaaactgaagaaattagcctaactgccaatatcaagttgcagattttaatccatggaaattgtgttttgtgctgaattgtatttgctgattacctgaaattggcttctttttattgggcttctctggagaatttctcccactccccacctctgcagaagaaaattttgctcttatcagttcttagcatgatgtttttttttctgctttgcaaggcgctagaatcttttattttactttattttttttgaggtggagtttcgctcttgttgcccgggctggagtgcaatggtgagatctcaactcactgcaacctctgccctccaggttcaagtgattctcctccctcagcctcccaagtagctgggat

SEQ ID NO: 311221 - DNA, 4210 bp, Homo sapiens
agcgggtgccgtgtccggacgcagcggcagctccccggggagaagggcgacgtgaccaggcacatcatcaaaaggaatatccagaagtgcatcagcagaggggagctccaggtgtctctgtcatatcagcctgtggcacagagaatgacagtggtggtcctcaaagccagacacttgccgaagatggatatcaccggtctctcaggtaatccttatgtcaaggtgaacgtctactacggcagaaagcgcattgccaagaagaaaacccatgtgaagaagtgcactttgaaccccatcttcaatgaatctttcatctacgacatccccactgacctcctgcctgatatcagcatcgagttcctcgttatcgacttcgatcgcaccaccaagaatgaggtggtggggaggctgatcctgggggcacacagtgtcacagccagtggtgctgaacactggagagaggtctgcgagagcccccgcaagcctgtggccaagtggcacagtctgagcgagtactaatcctgttcttctctcctctaatccccgggggccaagctggggagggatgtggaggggaaaaagatgacagagaagtggactccaaacctcattttagttgtagaagaaaatttcttacaaaacaaattccacaaagaacaccctatatgaccacagctgcagatcagttcttagcaatgatgtttttttttctgctttgcaaggcgctagaatcttttattttactttattttttttgaggtggagtttcgctcttgttgcccgggctggagtgcaatggtgagatctcaactcactgcaacctctgccctccaggttcaagtgattctcctccctcagcctcccaagtagctgggattacaggcacccacgagcatgcccggctaattttttgtattttcagtagagatgggtttcaccatgttggccaggctggtctcgaattccagacctcaggtgatccacccgcctcggcctcccaaagtgctgggattacaggtgcgagccaccgtgcccggcctctggttttgttttgttttttttttttaatgggggacaaaagagagggaaagacccctataaatctatatataacaatgtaaccatatacttgcatgtctaatacaaactgaagaaattagcctaactgccaatatcaagttgcagattttaatccatggaaattgtgttttgtgctgaattgtatttgctgattacctgaaattggcttctttttattgggcttctctggagaatttctcccactccccacctctgcagaagaaaattttgctcttataaaacctcatgttttcatcattcccatcttttctttttattgcctcttatatctctgctctttgacctcaaggtctagaggtctgcagtaagccaagaaacaaaggtggggtggatgaggcaaggtttgcaggagaaagaggaattgagaaatggggtatttttgctatcagctcttctgctatgaagtagtaaaaggcagtctataattaactgacagacctaactgaagcacagagaatacatcagacttatgcatccaagacatcagaacttggattttatcaaacttgatgacttctctaaaaggagctttggaaacttcaaattcagctataggatagtaccaatgaacacatccagctgatcccaaaagctgttttcaggtataaggacaaggagaggagacaagtgacgacagccattcccctttgcagctatctactgtagtgacagccatttcttggttgatgggttggaagtcatcagaggtttgaagaattacactggcctttgtttttctggaaatgccgaccatggagatgctttagagtcttctcaaatagcttagatgttgtaatgaggttagctttgcttcataaaacaggggccctcagaagttctccttaaatttttcaataaaaatttagctcttaaaaaaataacagtgtgactgagtgaatgaagataagttggattctttcagagcattcttttcctcaaaacgagctgcataattcttggaatttatgtcttaccacatggtggagggatggaggaactacaggatgcaattcttcttctaccaatgggcaatagaggttgagagagattcagcatctttctgggattagaattcaagtctctttactcctacagcagctgtgtctccaacgttgagactttgcagatggcacagactccatggataataggtaaacttggggccgggcgcagtggctcacgcctgtaatcccagtattttgggaggccgaggtggaaagatcgcttgagcccaggagttcaagaccagcctgggctacatgacgaaactccatctctatcaaaaatacaaaaaattaactaggtgtggtgctgcacgcctgtggtcccagctattcaggaggctgaggtgggaggatcatttgagcccagaggtagaggctgcagtgagccatgatcatgccactgcactctgggctgggtaacagagtgagatcctgtctcaaaaattaattaattaattaattaaaataaactaggtaaacttggataggcagtagatatttttgcccacctgaggaggaactcagtcaagctgttgcttaacagcttgatccagggcgtgaaaggttagttgagactgaagtgttcacttccatagaagaacatcacttttaaccttgctttggcgaagggagtcggaaagctgagtctctatggacgggggggtgatcttgctttcagtgttccctcagcttttgtggatttaaaaccattctgctccccctaaaccttttgtttgatttcagcccatgttcttgacaatgcagagcaattctgagcagtcacaaagcctactctctgttcttgtccctgccaacccccaccccccataatctgactcacaacttcaccatcagttggggtcataccactagtctctgtcctataccccatgaaatgtaaatactgtatcataagtagaagaaaataatttttgttttctaaaaatgcattttgagatagtttaatgtaaatctgacaggagcattctgaagccccattaggaaaaaatttaaatggttcctcttcatcgccttaatgtctaaagatcagaaatcgctgagcaaacccgcttttgtttccttcccagaaacaatgcaaaacaacaggtggagatagtctggtctttgccctgctgtgtgtgcctctgtagctcctcctgacaaacgtctgggaaaacagcctcaccccactctcctctctcttccccatttccttgtagctttattccttgcatctttgggtctactgagcagtgggtgctgaggtgacaggggaggaaccagttgttctgtagcctaggaactgcctcagtgtctttgccagaaaaaggcaaagaggcggacagtgcagggctcctccctcctacctcaggcctgatccatcgtgcccttgactttgccgtctcaaagtttcttagctgactttggctttcacatttgttctttccagagctaactgataagagtggaggaggaatgccttctcctaagagtcagttgaaagaaagacaagagagtcacatcttagcttttgcacaaggcattcgtggtcaggaataggttagggaatggtcacttctgattttccaacagttgctccttctctgaagagatcttgattcctttgggaagacaagaatttttcttaataacaaaggtccctttatgagttattccttctttcagttcatctcactggagcacagccaagatggacatgtttatggacagtgctctagatgtgaaaacagatagaactggtttgtgggacaggggcagcttgctcaggagagggaataacgcaggtcccttttcttggaaggcttgtactatggccatgacagtgacattgccctcaccatgatccctctccaaagtggttgtctttctttaccttgtgtcttctcttgtaaaaatgaaactcaaaaataaaataaatgtgtcaaattttgaaaaaaaaagaaaactgaaaaagctaacatgaattgtgtgaaattgcataatgctgtaatgctaatctacaatatgtaatgctatcttgtatgttgaatttgttaatgcaccacacaagtgcaaaataaagactgattcacattacataggca

SEQ ID NO: 311222 - DNA, 5111 bp, Homo sapiens
attcggaagaaggcggagcctacctctcatcaggaccagtctgactgcacctgcatccttagctcagagcatccccggagcatcttaagagctgagcgcagctgacaactaggggccggaccgtcgcaggaggcgtccgctggataccttcccccttccctgacctagagctctacagctgctgcctcggtactgaccgagggttcccagagctgtctcaccattgcaaaaacgttatagcaacagcctctgattacgacatggctgagatcaccaatatccgacctagctttgatgtgtcaccggtggtggccggcctcatcggggcctctgtgctggtggtgtgtgtctcggtgaccgtctttgtctggtcatgctgccaccagcaggcagagaagaagcacaagaacccaccatacaagtttattcacatgctcaaaggcatcagcatatacccagagaccctcagcaacaagaagaaaatcatcaaagtgcggagagacaaagatggtcctgggagggaaggtggacgtaggaacctgttggtggacgcagcagaggctggcctgctaagccgagacaaagatcccagggggcctagctctggatcttgtatagaccaattacccatcaaaatggactatggggaagaactaaggagccctattacaagcctgacccctggggagagcaaaaccacctctccatcatctccagaggaggatgtcatgctaggatccctcaccttctcagtggactataacttcccgaaaaaagccctggtggtgacaatccaggaggcccacgggctgccagtgatggatgaccagacccagggatctgacccctacatcaaaatgaccatccttcctgacaaacggcatcgggtgaagaccagagtgctgcggaagaccctggaccctgtgtttgacgagaccttcaccttctatggcatcccctacagccagctgcaggacctggtgctgcacttccttgtcctcagctttgaccgcttctctcgggatgatgtcattggcgaggtcatggtgccactggcaggggtggaccccagcacaggcaaggtacaactgaccagggacatcatcaaaaggaatatccagaagtgcatcagcagaggggagctccaggtgtctctgtcatatcagcctgtggcacagagaatgacagtggtggtcctcaaagccagacacttgccgaagatggatatcaccggtctctcaggtaatccttatgtcaaggtgaacgtctactacggcagaaagcgcattgccaagaagaaaacccatgtgaagaagtgcactttgaaccccatcttcaatgaatctttcatctacgacatccccactgacctcctgcctgatatcagcatcgagttcctcgttatcgacttcgatcgcaccaccaagaatgaggtggtggggaggctgatcctgggggcacacagtgtcacagccagtggtgctgaacactggagagaggtctgcgagagcccccgcaagcctgtggccaagtggcacagtctgagcgagtactaatcctgttcttctctcctctaatccccgggggccaagctggggagggatgtggaggggaaaaagatgacagagaagtggactccaaacctcattttagttgtagaagaaaatttcttacaaaacaaattccacaaagaacaccctatatgaccacagctgcagatcagttcttagcaatgatgtttttttttctgctttgcaaggcgctagaatcttttattttactttattttttttgaggtggagtttcgctcttgttgcccgggctggagtgcaatggtgagatctcaactcactgcaacctctgccctccaggttcaagtgattctcctccctcagcctcccaagtagctgggattacaggcacccacgagcatgcccggctctggttttgttttgttttttttttttaatgggggacaaaagagagggaaagacccctataaatctatatataacaatgtaaccatatacttgcatgtctaatacaaactgaagaaattagcctaactgccaatatcaagttgcagattttaatccatggaaattgtgttttgtgctgaattgtatttgctgattacctgaaattggcttctttttattgggcttctctggagaatttctcccactccccacctctgcagaagaaaattttgctcttataaaacctcatgttttcatcattcccatcttttctttttattgcctcttatatctctgctctttgacctcaaggtctagaggtctgcagtaagccaagaaacaaaggtggggtggatgaggcaaggtttgcaggagaaagaggaattgagaaatggggtatttttgctatcagctcttctgctatgaagtagtaaaaggcagtctataattaactgacagacctaactgaagcacagagaatacatcagacttatgcatccaagacatcagaacttggattttatcaaacttgatgacttctctaaaaggagctttggaaacttcaaattcagctataggatagtaccaatgaacacatccagctgatcccaaaagctgttttcaggtataaggacaaggagaggagacaagtgacgacagccattcccctttgcagctatctactgtagtgacagccatttcttggttgatgggttggaagtcatcagaggtttgaagaattacactggcctttgtttttctggaaatgccgaccatggagatgctttagagtcttctcaaatagcttagatgttgtaatgaggttagctttgcttcataaaacaggggccctcagaagttctccttaaatttttcaataaaaatttagctcttaaaaaaataacagtgtgactgagtgaatgaagataagttggattctttcagagcattcttttcctcaaaacgagctgcataattcttggaatttatgtcttaccacatggtggagggatggaggaactacaggatgcaattcttcttctaccaatgggcaatagaggttgagagagattcagcatctttctgggattagaattcaagtctctttactcctacagcagctgtgtctccaacgttgagactttgcagatggcacagactccatggataataggtaaacttggggccgggcgcagtggctcacgcctgtaatcccagtattttgggaggccgaggtggaaagatcgcttgagcccaggagttcaagaccagcctgggctacatgacgaaactccatctctatcaaaaatacaaaaaattaactaggtgtggtgctgcacgcctgtggtcccagctattcaggaggctgaggtgggaggatcatttgagcccagaggtagaggctgcagtgagccatgatcatgccactgcactctgggctgggtaacagagtgagatcctgtctcaaaaattaattaattaattaattaaaataaactaggtaaacttggataggcagtagatatttttgcccacctgaggaggaactcagtcaagctgttgcttaacagcttgatccagggcgtgaaaggttagttgagactgaagtgttcacttccatagaagaacatcacttttaaccttgctttggcgaagggagtcggaaagctgagtctctatggacgggggggtgatcttgctttcagtgttccctcagcttttgtggatttaaaaccattctgctccccctaaaccttttgtttgatttcagcccatgttcttgacaatgcagagcaattctgagcagtcacaaagcctactctctgttcttgtccctgccaacccccaccccccataatctgactcacaacttcaccatcagttggggtcataccactagtctctgtcctataccccatgaaatgtaaatactgtatcataagtagaagaaaataatttttgttttctaaaaatgcattttgagatagtttaatgtaaatctgacaggagcattctgaagccccattaggaaaaaatttaaatggttcctcttcatcgccttaatgtctaaagatcagaaatcgctgagcaaacccgcttttgtttccttcccagaaacaatgcaaaacaacaggtggagatagtctggtctttgccctgctgtgtgtgcctctgtagctcctcctgacaaacgtctgggaaaacagcctcaccccactctcctctctcttccccatttccttgtagctttattccttgcatctttgggtctactgagcagtgggtgctgaggtgacaggggaggaaccagttgttctgtagcctaggaactgcctcagtgtctttgccagaaaaaggcaaagaggcggacagtgcagggctcctccctcctacctcaggcctgatccatcgtgcccttgactttgccgtctcaaagtttcttagctgactttggctttcacatttgttctttccagagctaactgataagagtggaggaggaatgccttctcctaagagtcagttgaaagaaagacaagagagtcacatcttagcttttgcacaaggcattcgtggtcaggaataggttagggaatggtcacttctgattttccaacagttgctccttctctgaagagatcttgattcctttgggaagacaagaatttttcttaataacaaaggtccctttatgagttattccttctttcagttcatctcactggagcacagccaagatggacatgtttatggacagtgctctagatgtgaaaacagatagaactggtttgtgggacaggggcagcttgctcaggagagggaataacgcaggtcccttttcttggaaggcttgtactatggccatgacagtgacattgccctcaccatgatccctctccaaagtggttgtctttctttaccttgtgtcttctcttgtaaaaatgaaactcaaaaataaaataaatgtgtcaaattttgaaaaaaaaagaaaactgaaaaagctaacatgaattgtgtgaaattgcataatgctgtaatgctaatctacaatatgtaatgctatcttgtatgttgaatttgttaatgcaccacacaagtgcaaaataaagactgattcacattacataggca

SEQ ID NO: 311223 - DNA, 3908 bp, Homo sapiens
attcggaagaaggcggagcctacctctcatcaggaccagtctgactgcacctgcatccttagctcagagcatccccggagcatcttaagagctgagcgcagctgacaactaggggccggaccgtcgcaggaggcgtccgctggataccttcccccttccctgacctagagctctacagctgctgcctcggtactgaccgagggttcccagagctgtctcaccattgcaaaaacgttatagcaacagcctctgattacgacatggctgagatcaccaatatccgacctagctttgatgtgtcaccggtggtggccggcctcatcggggcctctgtgctggtggtgtgtgtctcggtgaccgtctttgtctggtcatgctgccaccagcaggcagagaagaagcacaagaacccaccatacaagtttattcacatgctcaaaggcatcagcatatacccagagaccctcagcaacaagaagaaaatcatcaaagtgcggagagacaaagatggtcctgggagggaaggtggacgtaggaacctgttggtggacgcagcagaggctggcctgctaagccgagacaaagatcccagggggcctagctctggatcttgtatagaccaattacccatcaaaatggactatggggaagaactaaggagccctattacaagcctgacccctggggagagcaaaaccacctctccatcatctccagaggaggatgtcatgctaggatccctcaccttctcagtggactataacttcccgaaaaaagccctggtggtgacaatccaggaggcccacgggctgccagtgatggatgaccagacccagggatctgacccctacatcaaaatgaccatccttcctgacaaacggcatcgggtgaagaccagagtgctgcggaagaccctggaccctgtgtttgacgagaccttcaccttctatggcatcccctacagccagctgcaggacctggtgctgcacttccttgtcctcagctttgaccgcttctctcgggatgatgtcattggcgaggtcatggtgccactggcaggggtggaccccagcacaggcaaggtacaactgaccagggacatcatcaaaaggaatatccagaagtgcatcagcagaggggagctccaggtgtctctgtcatatcagcctgtggcacagagaatgacagtggtggtcctcaaagccagacacttgccgaagatggatatcaccggtctctcaggtaatccttatgtcaaggtgaacgtctactacggcagaaagcgcattgccaagaagaaaacccatgtgaagaagtgcactttgaaccccatcttcaatgaatctttcatctacgacatccccactgacctcctgcctgatatcagcatcgagttcctcgttatcgacttcgatcgcaccaccaagaatgaggtggtggggaggctgatcctgggggcacacagtgtcacagccagtggtgctgaacactggagagaggtctgcgagagcccccgcaagcctgtggccaagtggcacagtctgagcgagtactaatcctgttcttctctcctctaatccccgggggccaagctggggagggatgtggaggggaaaaagatgacagagaagtggactccaaacctcattttagttgtagaagaaaatttcttacaaaacaaattccacaaagaacaccctatatgaccacagctgcagatcagttcttagcaatgatgtttttttttctgctttgcaaggcgctagaatcttttattttactttattttttttgaggtggagtttcgctcttgttgcccgggctggagtgcaatggtgagatctcaactcactgcaacctctgccctccaggttcaagtgattctcctccctcagcctcccaagtagctgggattacaggcacccacgagcatgcccggctaattttttgtattttcagtagagatgggtttcaccatgttggccaggctggtctcgaattccaggccgaggtggaaagatcgcttgagcccaggagttcaagaccagcctgggctacatgacgaaactccatctctatcaaaaatacaaaaaattaactaggtgtggtgctgcacgcctgtggtcccagctattcaggaggctgaggtgggaggatcatttgagcccagaggtagaggctgcagtgagccatgatcatgccactgcactctgggctgggtaacagagtgagatcctgtctcaaaaattaattaattaattaattaaaataaactaggtaaacttggataggcagtagatatttttgcccacctgaggaggaactcagtcaagctgttgcttaacagcttgatccagggcgtgaaaggttagttgagactgaagtgttcacttccatagaagaacatcacttttaaccttgctttggcgaagggagtcggaaagctgagtctctatggacgggggggtgatcttgctttcagtgttccctcagcttttgtggatttaaaaccattctgctccccctaaaccttttgtttgatttcagcccatgttcttgacaatgcagagcaattctgagcagtcacaaagcctactctctgttcttgtccctgccaacccccaccccccataatctgactcacaacttcaccatcagttggggtcataccactagtctctgtcctataccccatgaaatgtaaatactgtatcataagtagaagaaaataatttttgttttctaaaaatgcattttgagatagtttaatgtaaatctgacaggagcattctgaagccccattaggaaaaaatttaaatggttcctcttcatcgccttaatgtctaaagatcagaaatcgctgagcaaacccgcttttgtttccttcccagaaacaatgcaaaacaacaggtggagatagtctggtctttgccctgctgtgtgtgcctctgtagctcctcctgacaaacgtctgggaaaacagcctcaccccactctcctctctcttccccatttccttgtagctttattccttgcatctttgggtctactgagcagtgggtgctgaggtgacaggggaggaaccagttgttctgtagcctaggaactgcctcagtgtctttgccagaaaaaggcaaagaggcggacagtgcagggctcctccctcctacctcaggcctgatccatcgtgcccttgactttgccgtctcaaagtttcttagctgactttggctttcacatttgttctttccagagctaactgataagagtggaggaggaatgccttctcctaagagtcagttgaaagaaagacaagagagtcacatcttagcttttgcacaaggcattcgtggtcaggaataggttagggaatggtcacttctgattttccaacagttgctccttctctgaagagatcttgattcctttgggaagacaagaatttttcttaataacaaaggtccctttatgagttattccttctttcagttcatctcactggagcacagccaagatggacatgtttatggacagtgctctagatgtgaaaacagatagaactggtttgtgggacaggggcagcttgctcaggagagggaataacgcaggtcccttttcttggaaggcttgtactatggccatgacagtgacattgccctcaccatgatccctctccaaagtggttgtctttctttaccttgtgtcttctcttgtaaaaatgaaactcaaaaataaaataaatgtgtcaaattttgaaaaaaaaagaaaactgaaaaagctaacatgaattgtgtgaaattgcataatgctgtaatgctaatctacaatatgtaatgctatcttgtatgttgaatttgttaatgcaccacacaagtgcaaaataaagactgattcacattacataggca

SEQ ID NO: 311224 - DNA, 1147 bp, Homo sapiens
gcagagacagcagccagaggaaccgagaggctgagactaacccagaaacatccaattctcaaactgaagctcgcactctcgcctccagcatgaaagtctctgccgcccttctgtgcctgctgctcatagcagccaccttcattccccaagggctcgctcagccagatgcaatcaatgccccagtcacctgctgttataacttcaccaataggaagatctcagtgcagaggctcgcgagctatagaagaatcaccagcagcaagtgtcccaaagaagctgtgatgtgagttcagcacaccaaccttccctggcctgaagttcttccttgtggagcaagggacaagcctcataaacctagagtcagagagtgcactatttaacttaatgtacaaaggttcccaatgggaaaactgaggcaccaagggaaaaagtgaaccccaacatcactctccacctgggtgcctattcagaacaccccaatttctttagcttgaagtcaggatggctccacctggacacctataggagcagtttgccctgggttccctccttccacctgcgttcctcctctagctcccatggcagccctttggtgcagaatgggctgcacttctagaccaaaactgcaaaggaacttcatctaactctgtcctccctccccacagcttcaagaccattgtggccaaggagatctgtgctgaccccaagcagaagtgggttcaggattccatggaccacctggacaagcaaacccaaactccgaagacttgaacactcactccacaacccaagaatctgcagctaacttattttcccctagctttccccagacaccctgttttattttattataatgaattttgtttgttgatgtgaaacattatgccttaagtaatgttaattcttatttaagttattgatgttttaagtttatctttcatggtactagtgttttttagatacagagacttggggaaattgcttttcctcttgaaccacagttctacccctgggatgttttgagggtctttgcaagaatcattaatacaaagaattttttttaacattccaatgcattgctaaaatattattgtggaaatgaatattttgtaactattacaccaaataaatatatttttgtacaaaa

SEQ ID NO: 311225 - DNA, 746 bp, Homo sapiens
  misc_feature (628)..(628): n is a, c, g, or t
gcagagacagcagccagaggaaccgagaggctgagactaacccagaaacatccaattctcaaactgaagctcgcactctcgcctccagcatgaaagtctctgccgcccttctgtgcctgctgctcatagcagccaccttcattccccaagggctcgctcagccaggtaaggccccctcttcttctccttgaaccacattgtcttctctctgagttatcatggaccatccaagcagacgtggtacccacagtcttgctttaacgctacttttccaagataaggtgactcagaaaaggacaaggggtgagcccaaccacacagctgctgctcggcagagcctgaactagaattccagctgtgaaccccaaatccagctccttccaggattccagctctgggaacacactcagcgcagttactcccccagctgcttccagcagagtttggggatcagggtaatcaaagagagggtgggtgtgtaggctgtttccagacacgctggagacccagaatctggtctgtgcttcattcaccttagcttccagagacggtgactctgcagaggtaatgagtatcagggaaactcatgaccaggcatagcctattcagagtctatggttcgcctaangacccttgagcatatctagcttaactctgtcattatcatggtattacccattttacgcataggctgagtcatgggtccgacaccatctagttttgaggtaggcagagcaccgggattt

SEQ ID NO: 311226 - DNA, 829 bp, Homo sapiens
gcagagacagcagccagaggaaccgagaggctgagactaacccagaaacatccaattctcaaactgaagctcgcactctcgcctccagcatgaaagtctctgccgcccttctgtgcctgctgctcatagcagccaccttcattccccaagggctcgctcagccagatgcaatcaatgccccagtcacctgctgttataacttcaccaataggaagatctcagtgcagaggctcgcgagctatagaagaatcaccagcagcaagtgtcccaaagaagctgtgatcttcaagaccattgtggccaaggagatctgtgctgaccccaagcagaagtgggttcaggattccatggaccacctggacaagcaaacccaaactccgaagacttgaacactcactccacaacccaagaatctgcagctaacttattttcccctagctttccccagacaccctgttttattttattataatgaattttgtttgttgatgtgaaacattatgccttaagtaatgttaattcttatttaagttattgatgttttaagtttatctttcatggtactagtgttttttagatacagagacttggggaaattgcttttcctcttgaaccacagttctacccctgggatgttttgagggtctttgcaagaatcattaatacaaagaattttttttaacattccaatgcattgctaaaatattattgtggaaatgaatattttgtaactattacaccaaataaatatatttttgtacaaaaaaaaaatattaaattatgcggcccgcaattcgagctcaacttgcccttggccctataggggtcg

SEQ ID NO: 311227 - DNA, 692 bp, Homo sapiens
  misc_feature (574)..(574): n is a, c, g, or t
gcagagacagcagccagaggaaccgagaggctgagactaacccagaaacatccaattctcaaactgaagctcgcactctcgcctccagcatgaaagtctctgccgcccttctgtgcctgctgctcatagcagccaccttcattccccaagggctcgctcagccaggtaaggccccctcttcttctccttgaaccacattgtcttctctctgagttatcatggaccatccaagcagacgtggtacccacagtcttgctttaacgctacttttccaagataaggtgactcagtagaattccagctgtgaaccccaaatccagctccttccaggattccagctctgggaacacactcagcgcagttactcccccagctgcttccagcagagtttggggatcagggtaatcaaagagagggtgggtgtgtaggctgtttccagacacgctggagacccagaatctggtctgtgcttcattcaccttagcttccagagacggtgactctgcagaggtaatgagtatcagggaaactcatgaccaggcatagcctattcagagtctatggttcgcctaangacccttgagcatatctagcttaactctgtcattatcatggtattacccattttacgcataggctgagtcatgggtccgacaccatctagttttgaggtaggcagagcaccgggattt

SEQ ID NO: 311228 - DNA, 686 bp, Homo sapiens
  misc_feature (40)..(40): n is a, c, g, or t
  misc_feature (51)..(51): n is a, c, g, or t
  misc_feature (57)..(57): n is a, c, g, or t
  misc_feature (60)..(60): n is a, c, g, or t
  misc_feature (75)..(76): n is a, c, g, or t
  misc_feature (89)..(89): n is a, c, g, or t
  misc_feature (107)..(107): n is a, c, g, or t
  misc_feature (120)..(120): n is a, c, g, or t
tcaatccttcccctggcggtaataattctattgcgcaagntttcaatttcnatcgcntancttaatctgggtaannggtttggctaagntgtctggtagtaaggtgnagtggctcgtgcngattcggcacgagaagatctcagtgcagaggctcgcgagctatagaagaatcaccagcagcaagtgtcccaaagaagctgtgatcttcaagaccattgtggccaaggagatctgtgctgaccccaagcagaagtgggttcaggattccatggaccacctggacaagcaaacccaaactccgaagacttgaacactcactccacaacccaagaatctgcagctaacttattttcccctagctttccccagacaccctgttttattttattataatgaattttgtttgttgatgtgaaacattatgccttaagtaatgttaattcttatttaagttattgatgttttaagtttatctttcatggtactagtgttttttagatacagagacttggggaaattgcttttcctcttgaaccacagttctacccctgggatgttttgagggtctttgcaagaatcattaatacaaagaattttttttaacattccaatgcattgctaaaatattattgtggaaatgaatattttgtaactattacaccaaataaatatatttttgtacaaaa

SEQ ID NO: 311229 - DNA, 758 bp, Homo sapiens
gcagagacagcagccagaggaaccgagaggctgagactaacccagaaacatccaattctcaaactgaagctcgcactctcgcctccagcatgaaagtctctgccgcccttctgtgcctgctgctcatagcagccaccttcattccccaagggctcgctcagccagatgcaatcaatgccccagtcacctgctgttataacttcaccaataggaagatctcagtgcagaggctcgcgagctatagaagaatcaccagcagcaagtgtcccaaagaagctgtgatcttcaagaccattgtggccaaggagatctgtgctgaccccaagcagaagtgggttcaggattccatggaccacctggacaagcaaacccaaactccgaagacttgaacactcactccacaacccaagaatctgcagctaacttattttcccctagctttccccagacaccctgttttattttattataatgaattttgtttgttgatgtgaaacattatgccttaagtaatgttaattcttatttaagttattgatgttttaagtttatctttcatggtactagtgttttttagatacagagacttggggaaattgcttttcctcttgaaccacagttctacccctgggatgttttgagggtctttgcaagaatcattaatacaaagaattttttttaacattccatggcttcgctactctcatcgcggaatcgaatatttgcacctttcccccaatattcattttttgtccacc

SEQ ID NO: 311230 - DNA, 1197 bp, Homo sapiens
  misc_feature (780)..(780): n is a, c, g, or t
gcagagacagcagccagaggaaccgagaggctgagactaacccagaaacatccaattctcaaactgaagctcgcactctcgcctccagcatgaaagtctctgccgcccttctgtgcctgctgctcatagcagccaccttcattccccaagggctcgctcagccagatgcaatcaatgccccagtcacctgctgttataacttcaccaataggaagatctcagtgcagaggctcgcgagctatagaagaatcaccagcagcaagtgtcccaaagaagctgtgatcttcaagaccattgtggccaaggagatctgtgctgaccccaagcagaagtgggttcaggattccatggaccacctggacaagcaaacccaaactccgaagacttgaacactcactccacaacccaagaatctgcagctaacttattttcccctagctttccccagacaccctgttttattttattataatgaattttgtttgttgatgtgaaacattatgccttaagtaatgttaattcttatttaagttattgatgttttaagtttatctttcatggtactagtgttttttagatacagagacttggggaaattgcttttcctcttgaaccacagttctacccctgggatgttttgagggtctttgcaagaatcattaatacaaagaattttttttaacattccaatgcattgctaaaatattattgtggaaatgaatattttgtaactattacaccaaataaatatatttttgtacaaaaaaaaaaaaaaaaagngggggggggaaaaaaaatacccccgggggggcccaagttaaacgggaccccggttttttggtaaaaggggggccccataagggaggaggaaaaaaaagaaaggaaggggcccgccggttaacaacgctcgggcaggggaaacgcgcaccggggccacccgcaggagaggagaccccaacttcgggcgcgggccatatggggacacccccccacagagaatagggcccgggcaaacacaacttcacggtggacggggtcacccacggatagctggggggaaagttgccacggaatgctatcagaataagcggccgagcatagacaaacgccacacaaaccagacaaacaccaaataaagcaaacaacacgaaaagaagaaaaccaagaaaaaaacaaagaaaacctcaaaaacaacaa

SEQ ID NO: 311231 - DNA, 972 bp, Homo sapiens
  misc_feature (780)..(780): n is a, c, g, or t
  misc_feature (927)..(927): n is a, c, g, or t
gcagagacagcagccagaggaaccgagaggctgagactaacccagaaacatccaattctcaaactgaagctcgcactctcgcctccagcatgaaagtctctgccgcccttctgtgcctgctgctcatagcagccaccttcattccccaagggctcgctcagccagatgcaatcaatgccccagtcacctgctgttataacttcaccaataggaagatctcagtgcagaggctcgcgagctatagaagaatcaccagcagcaagtgtcccaaagaagctgtgatcttcaagaccattgtggccaaggagatctgtgctgaccccaagcagaagtgggttcaggattccatggaccacctggacaagcaaacccaaactccgaagacttgaacactcactccacaacccaagaatctgcagctaacttattttcccctagctttccccagacaccctgttttattttattataatgaattttgtttgttgatgtgaaacattatgccttaagtaatgttaattcttatttaagttattgatgttttaagtttatctttcatggtactagtgttttttagatacagagacttggggaaattgcttttcctcttgaaccacagttctacccctgggatgttttgagggtctttgcaagaatcattaatacaaagaattttttttaacattccaatgcattgctaaaatattattgtggaaatgaatattttgtaactattacaccaaataaatatatttttgtacaaaaaaaaaaaaaaaaagnggggggccgccgcacccaattccttatatagtggagttgaatacaactgacctgccgttactaaacgacggactggacagaacactggccttggcgctaccttaattgaattggcatgcaataacactttttttttcggtcaggtgnagtaataaaggaagaggcccgggacccgttttgccttaactaaga

SEQ ID NO: 311232 - DNA, 590 bp, Homo sapiens
gcagagacagcagccagaggaaccgagaggctgagactaacccagaaacatccaattctcaaactgaagctcgcactctcgcctccagcatgaaagtctctgccgcccttctgtgcctgctgctcatagcagccaccttcattccccaagggctcgctcagccagatgcaatcaatgccccagtcacctgctgttataacttcaccaataggaagatctcagtgcagaggctcgcgagctatagaagaatcaccagcagcaagtgtcccaaagaagctgtgatcttcaagaccattgtggccaaggagatctgtgctgaccccaagcagaagtgggttcaggattccatggaccacctggacaagcaaacccaaactccgaagacttgaacactcactccacaacccaagaatctgcagctaacttattttcccctagctttccccagacaccctgttttattttattataatgaattttgtttgttgatgtgaaacattatgccttaagtaatgttaattcttatttaagttattgatgttttaagtttatctttcatggtactagagtgactagagtggcggtaccgg

SEQ ID NO: 311233 - DNA, 765 bp, Homo sapiens
gcagagacagcagccagaggaaccgagaggctgagactaacccagaaacatccaattctcaaactgaagctcgcactctcgcctccagcatgaaagtctctgccgcccttctgtgcctgctgctcatagcagccaccttcattccccaagggctcgctcagccagatgcaatcaatgccccagtcacctgctgttataacttcaccaataggaagatctcagtgcagaggctcgcgagctatagaagaatcaccagcagcaagtgtcccaaagaagctgtgatcttcaagaccattgtggccaaggagatctgtgctgaccccaagcagaagtgggttcaggattccatggaccacctggacaagcaaacccaaactccgaagacttgaacactcactccacaacccaagaatctgcagctaacttattttcccctagctttccccagacaccctgttttattttattataatgaattttgtttgttgatgtgaaacattatgccttaagtaatgttaattcttatttaagttattgatgttttaagtttatctttcatggtactagtgttttttagatacagagacttggggaaattgcttttcctcttgaaccacagttctacccctgggatgttttgagggtctttgcaagaatcattaatacaaagaattttttttaacattccaatgcattgctaaaatattattgtggaaatgaatattttgtaactattacaccaaataaatatatttttgtacaaaa

SEQ ID NO: 311234 - DNA, 1494 bp, Homo sapiens
gagcgcagcaactcgtgtctgagcgcccggcggaaaaccgaagttggaagtgtctcttagcagcgcgcggagaagaacggggagccagcatcatggcagaacaggatgtggaaaacgatcttttggattacgatgaagaggaagagccccaggctcctcaagagagcacaccagctccccctaagaaagacatcaagggatcctacgtttccatccacagctctggcttccgggactttctgctgaagccggagctcctgcgggccatcgtggactgtggctttgagcatccttctgaggtccagcatgagtgcattccccaggccatcctgggcatggacgtcctgtgccaggccaagtccgggatgggcaagacagcggtcttcgtgctggccaccctacagcagattgagcctgtcaacggacaggtgacggtcctggtcatgtgccacacgagggagctggccttccagatcagcaaggaatatgagcgcttttccaagtacatgcccagcgtcaaggtgtctgtgttcttcggtggtctctccatcaagaaggatgaagaagtgttgaagaagaactgtccccatgtcgtggtggggaccccgggccgcatcctggcgctcgtgcggaataggagcttcagcctaaagaatgtgaagcactttgtgctggacgagtgtgacaagatgctggagcagctggacatgcggcgggatgtgcaggagatcttccgcctgacaccacacgagaagcagtgcatgatgttcagcgccaccctgagcaaggacatccggcctgtgtgcaggaagttcatgcaggatcccatggaggtgtttgtggacgacgagaccaagctcacgctgcacggcctgcagcagtactacgtcaaactcaaagacagtgagaagaaccgcaagctctttgatctcttggatgtgctggagtttaaccaggtgataatcttcgtcaagtcagtgcagcgctgcatggccctggcccagctcctcgtggagcagaacttcccggccatcgccatccaccggggcatggcccaggaggagcgcctgtcacgctatcagcagttcaaggatttccagcggcggatcctggtggccaccaatctgtttggccgggggatggacatcgagcgagtcaacatcgtctttaactacgacatgcctgaggactcggacacctacctgcaccgggtggcccgggcgggtcgctttggcaccaaaggcctagccatcacttttgtgtctgacgagaatgatgccaaaatcctcaatgacgtccaggaccggtttgaagttaatgtggcagaacttccagaggaaatcgacatctccacatacatcgagcagagccggtaaccaccacgtgccagagccgcccacccggagccgcccgcatgcagcttcacctcccctttccaggcgccactgttgagaagctagagattgtatgagaataaacttgttattatggaaa

SEQ ID NO: 311235 - DNA, 1928 bp, Homo sapiens
tcttaccgccatcttggctcctgtggaggcctgctgggaacgggacttctaaaaggaactatgtctggaaggctgtggtccaaggccatttttgctggctataagcggggtctccggaaccaaagggagcacacagctcttcttaaaattgaaggtgtttacgcccgagatgaaacagaattctatttgggcaagagatgcgcttatgtatataaagcaaagaacaacacagtcactcctggcggcaaaccaaacaaaaccagagtcatctggggaaaagtaactcgggcccatggaaacagtggcatggttcgtgccaaattccgaagcaatcttcctgctaaggccattggacacagaatccgagtgatgctgtacccctcaaggatttaaactaacgaaaaatcaataaataaatgtggatttgtgctcttgtaaaaaaaaaaaaaaaaaaaaaaaaaaaaaaaaaaaaaaaggttggaagtgtctcttagcagcgcgcggagaagaacggggagccagcatcatggcagaacaggatgtggaaaacgatcttttggattacgatgaagaggaagagccccaggctcctcaagagagcacaccagctccccctaagaaagacatcaagggatcctacgtttccatccacagctctggcttccgggactttctgctgaagccggagctcctgcgggccatcgtggactgtggctttgagcatccttctgaggtccagcatgagtgcattccccaggccatcctgggcatggacgtcctgtgccaggccaagtccgggatgggcaagacagcggtcttcgtgctggccaccctacagcagattgagcctgtcaacggacaggtgacggtcctggtcatgtgccacacgagggagctggccttccagatcagcaaggaatatgagcgcttttccaagtacatgcccagcgtcaaggtgtctgtgttcttcggtggtctctccatcaagaaggatgaagaagtgttgaagaagaactgtccccatgtcgtggtggggaccccgggccgcatcctggcgctcgtgcggaataggagcttcagcctaaagaatgtgaagcactttgtgctggacgagtgtgacaagatgctggagcagctggacatgcggcgggatgtgcaggagatcttccgcctgacaccacacgagaagcagtgcatgatgttcagcgccaccctgagcaaggacatccggcctgtgtgcaggaagttcatgcaggatcccatggaggtgtttgtggacgacgagaccaagctcacgctgcacggcctgcagcagtactacgtcaaactcaaagacagtgagaagaaccgcaagctctttgatctcttggatgtgctggagtttaaccaggtgataatcttcgtcaagtcagtgcagcgctgcatggccctggcccagctcctcgtggagcagaacttcccggccatcgccatccaccggggcatggcccaggaggagcgcctgtcacgctatcagcagttcaaggatttccagcggcggatcctggtggccaccaatctgtttggccgggggatggacatcgagcgagtcaacatcgtctttaactacgacatgcctgaggactcggacacctacctgcaccgggtggcccgggcgggtcgctttggcaccaaaggcctagccatcacttttgtgtctgacgagaatgatgccaaaatcctcaatgacgtccaggaccggtttgaagttaatgtggcagaacttccagaggaaatcgacatctccacatacatcgagcagagccggtaaccaccacgtgccagagccgcccacccggagccgcccgcatgcagcttcacctcccctttccaggcgccactgttgagaagctagagattgtatgagaataaacttgttattatggaaa

SEQ ID NO: 311236 - DNA, 823 bp, Homo sapiens
gagcgcagcaactcgtgtctgagcgcccggcggaaaaccgaagttggaagtgtctcttagcagcgcgcggagaagaacggggagccagcatcatggcagaacaggatgtggaaaacgatcttttggattacgatgaagaggaagagccccaggctcctcaagagagcacaccagctccccctaagaaagacatcaagggatcctacgtttccatccacagctctggcttccgggactttctgctgaagccggagctcctgcgggccatcgtggactgtggctttgagcatccttctgaggtccagcatgagtgcattccccaggccatcctgggcatggacgtcctgtgccaggccaagtccgggatgggcaagacagcggtcttcgtgctggccaccctacagcagattgagcctgtcaacggacaggtgacggtcctggtcatgtgccacacgagggagctggccttccagatcagcaaggaatatgagcgcttttccaagtacatgcccagcgtcaaggtgtctgtgttcttcggtggtctctccatcaagaaggatgaagaagtgttgaagaagaactgtccccatgtcgtggtggggaccccgggccgcatcctggcgctcgtgcggaataggagcttcagcctaaagaatgtgcacgcagtgcatgatgttcaagcggccacctgagcaaggacattcgggctgtgtgcaaggaaagtcattgcggatccatggacgggttgtggcccgacgagaccagctcaagcctgacggcctgcagattctattcaaatcacaacgtgaaagaacggagcttg

SEQ ID NO: 311237 - DNA, 1855 bp, Homo sapiens
gagcgcagcaactcgtgtctgagcgcccggcggaaaaccgaagttggaagtgtctcttagcagcgcgcggagaagaacggggagccagcatcatggcagaacaggatgtggaaaacgatcttttggattacgatgaagaggaagagccccaggctcctcaagagagcacaccagctccccctaagaaagacatcaagggatcctacgtttccatccacagctctggcttccgggactttctgctgaagccggagctcctgcgggccatcgtggactgtggctttgagcatccttctgaggtccagcatgagtgcattccccaggccatcctgggcatggacgtcctgtgccaggccaagtccgggatgggcaagacagcggtcttcgtgctggccaccctacagcagattgagcctgtcaacggacaggtgacggtcctggtcatgtgccacacgagggagctggccttccagatcagcaaggaatatgagcgcttttccaagtacatgcccagcgtcaaggtgtctgtgttcttcggtggtctctccatcaagaaggatgaagaagtgttgaagaagaactgtccccatgtcgtggtggggaccccgggccgcatcctggcgctcgtgcggaataggagcttcagcctaaagaatgtgaagcactttgtgctggacgagtgtgacaagatgctggagcagctggacatgcggcgggatgtgcaggagatcttccgcctgacaccacacgagaagcagtgcatgatgttcagcgccaccctgagcaaggacatccggcctgtgtgcaggaagttcatgcaggatcccatggaggtgtttgtggacgacgagaccaagctcacgctgcacggcctgcagcagtactacgtcaaactcaaagacagtgagaagaaccgcaagctctttgatctcttggatgtgctggagtttaaccaggtgataatcttcgtcaagtcagtgcagcgctgcatggccctggcccagctcctcgtggagcagaacttcccggccatcgccatccaccggggcatggcccaggaggagcgcctgtcacgctatcagcagttcaaggatttccagcggcggatcctggtggccaccaatctgtttggccgggggatggacatcgagcgagtcaacatcgtctttaactacgacatgcctgaggactcggacacctacctgcaccgggtggcccgggcgggtcgctttggcaccaaaggcctagccatcacttttgtgtctgacgagaatgatgccaaaatcctcaatgacgtccaggaccggtttgaagttaatgtggcagaacttccagaggaaatcgacatctccacatacatcgagcagagccggtaaccaccacgtgccagagccgcccacccggagccgcccgcatgcagcttcacctcccctttccaggcgccactgttgagaagctagagattgtatgagaataaacttgttattatggaaaaaaaaaaaaacaaaacaaaaaaaaaaacctttttggggcgcgcctggggccccccgaaaagagcttttaaaaaccaattcggtgggggcgcgcgggggccccaagatagggtacaggctaccaccggggcacaaagacgcgtgttcccatagggagaacccgcgggacaagcacacaaaggtgacgggggaaattcccccccacgtctagaataaaagcgccccgggggggacaaacgcaaaacgcttctcgagcaaccaacccgcaaaacggggaaactcgagggaaccacacacgagggacatctcccacacagggggagaccccaagggaaggcgcgacgaatatgaaaatatagggc

SEQ ID NO: 311238 - DNA, 1522 bp, Homo sapiens
gcccacacacacgacaacactacggctaagaagaagacccgcggtttaactcgaccacgcagcggcacccgttggaagtgtctcttagcagcgcgcggagaagaacggggagccagcatcatggcagaacaggatgtggaaaacgatcttttggattacgatgaagaggaagagccccaggctcctcaagagagcacaccagctccccctaagaaagacatcaagggatcctacgtttccatccacagctctggcttccgggactttctgctgaagccggagctcctgcgggccatcgtggactgtggctttgagcatccttctgaggtccagcatgagtgcattccccaggccatcctgggcatggacgtcctgtgccaggccaagtccgggatgggcaagacagcggtcttcgtgctggccaccctacagcagattgagcctgtcaacggacaggtgacggtcctggtcatgtgccacacgagggagctggccttccagatcagcaaggaatatgagcgcttttccaagtacatgcccagcgtcaaggtgtctgtgttcttcggtggtctctccatcaagaaggatgaagaagtgttgaagaagaactgtccccatgtcgtggtggggaccccgggccgcatcctggcgctcgtgcggaataggagcttcagcctaaagaatgtgaagcactttgtgctggacgagtgtgacaagatgctggagcagctggacatgcggcgggatgtgcaggagatcttccgcctgacaccacacgagaagcagtgcatgatgttcagcgccaccctgagcaaggacatccggcctgtgtgcaggaagttcatgcaggatcccatggaggtgtttgtggacgacgagaccaagctcacgctgcacggcctgcagcagtactacgtcaaactcaaagacagtgagaagaaccgcaagctctttgatctcttggatgtgctggagtttaaccaggtgataatcttcgtcaagtcagtgcagcgctgcatggccctggcccagctcctcgtggagcagaacttcccggccatcgccatccaccggggcatggcccaggaggagcgcctgtcacgctatcagcagttcaaggatttccagcggcggatcctggtggccaccaatctgtttggccgggggatggacatcgagcgagtcaacatcgtctttaactacgacatgcctgaggactcggacacctacctgcaccgggtggcccgggcgggtcgctttggcaccaaaggcctagccatcacttttgtgtctgacgagaatgatgccaaaatcctcaatgacgtccaggaccggtttgaagttaatgtggcagaacttccagaggaaatcgacatctccacatacatcgagcagagccggtaaccaccacgtgccagagccgcccacccggagccgcccgcatgcagcttcacctcccctttccaggcgccactgttgagaagctagagattgtatgagaataaacttgttattatggaaa

SEQ ID NO: 311239 - DNA, 1943 bp, Homo sapiens
gagcgcagcaactcgtgtctgagcgcccggcggaaaaccgaagttggaagtgtctcttagcagcgcgcggagaagaacggggagccagcatcatggcagaacaggatgtggaaaacgatcttttggattacgatgaagaggaagagccccaggctcctcaagagagcacaccagctccccctaagaaagacatcaagggatcctacgtttccatccacagctctggcttccgggactttctgctgaagccggagctcctgcgggccatcgtggactgtggctttgagcatccttctgaggtccagcatgagtgcattccccaggccatcctgggcatggacgtcctgtgccaggccaagtccgggatgggcaagacagcggtcttcgtgctggccaccctacagcagattgagcctgtcaacggacaggtgacggtcctggtcatgtgccacacgagggagctggccttccagatcagcaaggaatatgagcgcttttccaagtacatgcccagcgtcaaggtgtctgtgttcttcggtggtctctccatcaagaaggatgaagaagtgttgaagaagaactgtccccatgtcgtggtggggaccccgggccgcatcctggcgctcgtgcggaataggagcttcagcctaaagaatgtgaagcactttgtgctggacgagtgtgacaagatgctggagcagctggacatgcggcgggatgtgcaggagatcttccgcctgacaccacacgagaagcagtgcatgatgttcagcgccaccctgagcaaggacatccggcctgtgtgcaggaagttcatgcaggatcccatggaggtgtttgtggacgacgagaccaagctcacgctgcacggcctgcagcagtactacgtcaaactcaaagacagtgagaagaaccgcaagctctttgatctcttggatgtgctggagtttaaccaggtgataatcttcgtcaagtcagtgcagcgctgcatggccctggcccagctcctcgtggagcagaacttcccggccatcgccatccaccggggcatggcccaggaggagcggtgagtgcgagccgcccgccaaggctgcagggagcaccaccaggagcccagtgtctgacggcctccacttgtttctcctgcaccccagcctgtcacgctatcagcagttcaaggatttccagcggcggatcctggtggccaccaatctgtttggccgggggatggacatcgagcgagtcaacatcgtctttaactacgacatgcctgaggactcggacacctacctgcaccgggtggcccgggcgggtcgctttggcaccaaaggcctagccatcacttttgtgtctgacgagaatgatgccaaaatcctcaatgacgtccaggaccggtttgaagttaatgtggcagaacttccagaggaaatcgacatctccacatacatcgagcagagccggtaaccaccacgtgccagagccgcccacccggagccgcccgcatgcagcttcacctcccctttccaggcgccactgttgagaagctagagattgtatgagaataaacttgttattatggaaaaaaaaaaaaacaaaacaaaaaaaaaaacctttttggggcgcgcctggggccccccgaaaagagcttttaaaaaccaattcggtgggggcgcgcgggggccccaagatagggtacaggctaccaccggggcacaaagacgcgtgttcccatagggagaacccgcgggacaagcacacaaaggtgacgggggaaattcccccccacgtctagaataaaagcgccccgggggggacaaacgcaaaacgcttctcgagcaaccaacccgcaaaacggggaaactcgagggaaccacacacgagggacatctcccacacagggggagaccccaagggaaggcgcgacgaatatgaaaatatagggc

SEQ ID NO: 311240 - DNA, 1837 bp, Homo sapiens
gagcgcagcaactcgtgtctgagcgcccggcggaaaaccgaagttggaagtgtctcttagcagcgcgcggagaagaacggggagccagcatcatggcagaacaggatgtggaaaacgatcttttggattacgatgaagaggaagagccccaggctcctcaagagagcacaccagctccccctaagaaagacatcaagggatcctacgtttccatccacagctctggcttccgggactttctgctgaagccggagctcctgcgggccatcgtggactgtggctttgagcatccttctgaggtccagcatgagtgcattccccaggccatcctgggcatggacgtcctgtgccaggccaagtccgggatgggcaagacagcggtcttcgtgctggccaccctacagcagattgagcctgtcaacggacaggtgacggtcctggtcatgtgccacacgagggagctggccttccagatcagcaaggaatatgagcgcttttccaagtacatgcccagcgtcaaggtgtctgtgttcttcggtggtctctccatcaagaaggatgaagaagtgttgaagaagaactgtccccatgtcgtggtggggaccccgggccgcatcctggcgctcgtgcggaataggagcttcagcctaaagaatgtgaagcactttgtgctggacgagtgtgacaagatgctggagcagctggacatgcggcgggatgtgcaggagatcttccgcctgacaccacacgagaagcagtgcatgatgttcagcgccaccctgagcaaggacatccggcctgtgtgcaggaagttcatgcaggattgtgagtagggcgagagtggcagctttggccttccccaggggcctggagcctggggccccaggacacccgcacggcccacatggcacggaggatgctgggatgctgggagccggcggagcctcctttcctcccctcggtcttgtcaaactgggagtcaagcttggtccacacctgagtcgggccagagcttacatccagcttttgagcgatgtttactgaggtctggtgcagcaggtcctctgggaagtgtcgcacaaaggagtcgcccactggaaggttctgggcaggcgagatgcccagaggtgatccctgcccgcccctcccacctcccttcccacacagcccatggaggtgtttgtggacgacgagaccaagctcacgctgcacggcctgcagcagtactacgtcaaactcaaagacagtgagaagaaccgcaagctctttgatctcttggatgtgctggagtttaaccaggtgataatcttcgtcaagtcagtgcagcgctgcatggccctggcccagctcctcgtggagcagaacttcccggccatcgccatccaccggggcatggcccaggaggagcgcctgtcacgctatcagcagttcaaggatttccagcggcggatcctggtggccaccaatctgtttggccgggggatggacatcgagcgagtcaacatcgtctttaactacgacatgcctgaggactcggacacctacctgcaccgggtggcccgggcgggtcgctttggcaccaaaggcctagccatcacttttgtgtctgacgagaatgatgccaaaatcctcaatgacgtccaggaccggtttgaagttaatgtggcagaacttccagaggaaatcgacatctccacatacatcgagcagagccggtaaccaccacgtgccagagccgcccacccggagccgcccgcatgcagcttcacctcccctttccaggcgccactgttgagaagctagagattgtatgagaataaacttgttattatggaaa

SEQ ID NO: 311241 - DNA, 1679 bp, Homo sapiens
gagcgcagcaactcgtgtctgagcgcccggcggaaaaccgaagttggaagtgtctcttagcagcgcgcggagaagaacggggagccagcatcatggcagaacaggatgtggaaaacgatcttttggattacgatgaagaggaagagccccaggctcctcaagagagcacaccagctccccctaagaaagacatcaagggatcctacgtttccatccacagctctggcttccgggactttctgctgaagccggagctcctgcgggccatcgtggactgtggctttgagcatccttctgaggtccagcatgagtgcattccccaggccatcctgggcatggacgtcctgtgccaggccaagtccgggatgggcaagacagcggtcttcgtgctggccaccctacagcagattgagcctgtcaacggacaggtgacggtcctggtcatgtgccacacgagggagctggccttccagatcagcaaggaatatgagcgcttttccaagtacatgcccagcgtcaaggtgtctgtgttcttcggtggtctctccatcaagaaggatgaagaagtgttgaagaagaactgtccccatgtcgtggtggggaccccgggccgcatcctggcgctcgtgcggaataggagcttcagcctaaagaatgtgaagcactttgtgctggacgagtgtgacaagatgctggagcagctgggctcccctccctgaagcgtggctcgaggcgcacgggcacggctgctccgcgccagcgtgtaagtggattgcagctcctcccgcgcctgcgctcgctggccaccccccagcccctcaggcaccaggactggccactcccgcggctcactctgccctcgtcacggtgccactggctccctggcacagacatgcggcgggatgtgcaggagatcttccgcctgacaccacacgagaagcagtgcatgatgttcagcgccaccctgagcaaggacatccggcctgtgtgcaggaagttcatgcaggatcccatggaggtgtttgtggacgacgagaccaagctcacgctgcacggcctgcagcagtactacgtcaaactcaaagacagtgagaagaaccgcaagctctttgatctcttggatgtgctggagtttaaccaggtgataatcttcgtcaagtcagtgcagcgctgcatggccctggcccagctcctcgtggagcagaacttcccggccatcgccatccaccggggcatggcccaggaggagcgcctgtcacgctatcagcagttcaaggatttccagcggcggatcctggtggccaccaatctgtttggccgggggatggacatcgagcgagtcaacatcgtctttaactacgacatgcctgaggactcggacacctacctgcaccgggtggcccgggcgggtcgctttggcaccaaaggcctagccatcacttttgtgtctgacgagaatgatgccaaaatcctcaatgacgtccaggaccggtttgaagttaatgtggcagaacttccagaggaaatcgacatctccacatacatcgagcagagccggtaaccaccacgtgccagagccgcccacccggagccgcccgcatgcagcttcacctcccctttccaggcgccactgttgagaagctagagattgtatgagaataaacttgttattatggaaa

SEQ ID NO: 311242 - DNA, 1520 bp, Homo sapiens
ccttgccatggctgcccgtggtgtcatcgctccagttggcgagagttgcgctacgctgagtacttgcagccctcggccaaacggccagacgccgacgtcgaccagcagagacagcatcatggcagaacaggatgtggaaaacgatcttttggattacgatgaagaggaagagccccaggctcctcaagagagcacaccagctccccctaagaaagacatcaagggatcctacgtttccatccacagctctggcttccgggactttctgctgaagccggagctcctgcgggccatcgtggactgtggctttgagcatccttctgaggtccagcatgagtgcattccccaggccatcctgggcatggacgtcctgtgccaggccaagtccgggatgggcaagacagcggtcttcgtgctggccaccctacagcagattgagcctgtcaacggacaggtgacggtcctggtcatgtgccacacgagggagctggccttccagatcagcaaggaatatgagcgcttttccaagtacatgcccagcgtcaaggtgtctgtgttcttcggtggtctctccatcaagaaggatgaagaagtgttgaagaagaactgtccccatgtcgtggtggggaccccgggccgcatcctggcgctcgtgcggaataggagcttcagcctaaagaatgtgaagcactttgtgctggacgagtgtgacaagatgctggagcagctggacatgcggcgggatgtgcaggagatcttccgcctgacaccacacgagaagcagtgcatgatgttcagcgccaccctgagcaaggacatccggcctgtgtgcaggaagttcatgcaggatcccatggaggtgtttgtggacgacgagaccaagctcacgctgcacggcctgcagcagtactacgtcaaactcaaagacagtgagaagaaccgcaagctctttgatctcttggatgtgctggagtttaaccaggtgataatcttcgtcaagtcagtgcagcgctgcatggccctggcccagctcctcgtggagcagaacttcccggccatcgccatccaccggggcatggcccaggaggagcgcctgtcacgctatcagcagttcaaggatttccagcggcggatcctggtggccaccaatctgtttggccgggggatggacatcgagcgagtcaacatcgtctttaactacgacatgcctgaggactcggacacctacctgcaccgggtggcccgggcgggtcgctttggcaccaaaggcctagccatcacttttgtgtctgacgagaatgatgccaaaatcctcaatgacgtccaggaccggtttgaagttaatgtggcagaacttccagaggaaatcgacatctccacatacatcgagcagagccggtaaccaccacgtgccagagccgcccacccggagccgcccgcatgcagcttcacctcccctttccaggcgccactgttgagaagctagagattgtatgagaataaacttgttattatggaaa

SEQ ID NO: 311243 - DNA, 1895 bp, Homo sapiens
gagcgcagcaactcgtgtctgagcgcccggcggaaaaccgaagttggaagtgtctcttagcagcgcgcggagaagaacggggagccagcatcatggcagaacaggatgtggaaaacgatcttttggattacgatgaagaggaagagccccaggctcctcaagagagcacaccagctccccctaagaaagacatcaagggatcctacgtttccatccacagctctggcttccgggactttctgctgaagccggagctcctgcgggccatcgtggactgtggctttgagcatccttctgaggtccagcatgagtgcattccccaggccatcctgggcatggacgtcctgtgccaggccaagtccgggatgggcaagacagcggtcttcgtgctggccaccctacagcagattgagcctgtcaacggacaggtgacggtcctggtcatgtgccacacgagggagctggccttccagatcagcaaggaatatgagcgcttttccaagtacatgcccagcgtcaaggtgtctgtgttcttcggtggtctctccatcaagaaggatgaagaagtgttgaagaagaactgtccccatgtcgtggtggggaccccgggccgcatcctggcgctcgtgcggaataggagcttcagcctaaagaatgtgaagcactttgtgctggacgagtgtgacaagatgctggagcagctgggctcccctccctgaagcgtggctcgaggcgcacgggcacggctgctccgcgccagcgtacatgcggcgggatgtgcaggagatcttccgcctgacaccacacgagaagcagtgcatgatgttcagcgccaccctgagcaaggacatccggcctgtgtgcaggaagttcatgcaggattgtgagtagggcgagagtggcagctttggccttccccaggggcctggagcctggggccccaggacacccgcacggcccacatggcacggaggatgctgggatgctgggagccggcggagcctcctttcctcccctcggtcttgtcaaactgggagtcaagcttggtccacacctgagtcgggccagagcttacatccagcttttgagcgatgtttactgaggtctggtgcagcaggtcctctgggaagtgtcgcacaaaggagtcgcccactggaaggttctgggcaggcgagatgcccagaggtgatccctgcccgcccctcccacctcccttcccacacagcccatggaggtgtttgtggacgacgagaccaagctcacgctgcacggcctgcagcagtactacgtcaaactcaaagacagtgagaagaaccgcaagctctttgatctcttggatgtgctggagtttaaccaggtgataatcttcgtcaagtcagtgcagcgctgcatggccctggcccagctcctcgtggagcagaacttcccggccatcgccatccaccggggcatggcccaggaggagcgcctgtcacgctatcagcagttcaaggatttccagcggcggatcctggtggccaccaatctgtttggccgggggatggacatcgagcgagtcaacatcgtctttaactacgacatgcctgaggactcggacacctacctgcaccgggtggcccgggcgggtcgctttggcaccaaaggcctagccatcacttttgtgtctgacgagaatgatgccaaaatcctcaatgacgtccaggaccggtttgaagttaatgtggcagaacttccagaggaaatcgacatctccacatacatcgagcagagccggtaaccaccacgtgccagagccgcccacccggagccgcccgcatgcagcttcacctcccctttccaggcgccactgttgagaagctagagattgtatgagaataaacttgttattatggaaa

SEQ ID NO: 311244 - DNA, 1828 bp, Homo sapiens
gagcgcagcaactcgtgtctgagcgcccggcggaaaaccgaagttggaagtgtctcttagcagcgcgcggagaagaacggggagccagcatcatggcagaacaggatgtggaaaacgatcttttggattacgatgaagaggaagagccccaggctcctcaagagagcacaccagctccccctaagaaagacatcaagggatcctacgtttccatccacagctctggcttccgggactttctgctgaagccggagctcctgcgggccatcgtggactgtggctttgagcatccttctgagggtacgccttctgggtgttatcctcttgcccaggtcctcaccaagacaagaccagccctgcccgcccagagcggtgccgcctccagtttgccgtgggtgagggaggggcccgtctgtcccgcggatcagttgtgcccagcggggcctgtggctgccctcggcagtggggcgttctgctttgaccaggcggataccccagccctgcaggtgtctgtggccttgtccggactcggcctcttctgattgccctcactgtgggcccccggtcaactggtgaggatcctgcacgggggtgcatccaggttctcgtccctcacgctctgcttctcctgcagtccagcatgagtgcattccccaggccatcctgggcatggacgtcctgtgccaggccaagtccgggatgggcaagacagcggtcttcgtgctggccaccctacagcagattgagcctgtcaacggacaggtgacggtcctggtcatgtgccacacgagggagctggccttccagatcagcaaggaatatgagcgcttttccaagtacatgcccagcgtcaaggtgtctgtgttcttcggtggtctctccatcaagaaggatgaagaagtgttgaagaagaactgtccccatgtcgtggtggggaccccgggccgcatcctggcgctcgtgcggaataggagcttcagcctaaagaatgtgaagcactttgtgctggacgagtgtgacaagatgctggagcagctggacatgcggcgggatgtgcaggagatcttccgcctgacaccacacgagaagcagtgcatgatgttcagcgccaccctgagcaaggacatccggcctgtgtgcaggaagttcatgcaggatcccatggaggtgtttgtggacgacgagaccaagctcacgctgcacggcctgcagcagtactacgtcaaactcaaagacagtgagaagaaccgcaagctctttgatctcttggatgtgctggagtttaaccaggtgataatcttcgtcaagtcagtgcagcgctgcatggccctggcccagctcctcgtggagcagaacttcccggccatcgccatccaccggggcatggcccaggaggagcgcctgtcacgctatcagcagttcaaggatttccagcggcggatcctggtggccaccaatctgtttggccgggggatggacatcgagcgagtcaacatcgtctttaactacgacatgcctgaggactcggacacctacctgcaccgggtggcccgggcgggtcgctttggcaccaaaggcctagccatcacttttgtgtctgacgagaatgatgccaaaatcctcaatgacgtccaggaccggtttgaagttaatgtggcagaacttccagaggaaatcgacatctccacatacatcgagcagagccggtaaccaccacgtgccagagccgcccacccggagccgcccgcatgcagcttcacctcccctttccaggcgccactgttgagaagctagagattgtatgagaataaacttgttattatggaaa

SEQ ID NO: 311245 - DNA, 1640 bp, Homo sapiens
gcggacgacggagcagatgaagaaactgatgtcttgtgactgtgacgtgacttgccccccagccatgtatctgagaccatgtctggcctgactgatctgggagcaagcaagctctgctatgggcgagtagacgaggtgtgataggcatggagagaatcctctacagggaatgtgacagaaccgaacacatagattgtagcactcgtatcgtgtgctgtacaccgcagattcatcagcatgtctcactgcctgagtgaggacatgtgcggcggggagtcacataacaggtgctgccactccctcctaggtgcgtagagacattgcacggagagctttgacgtgccatggaacgctgggaaggcgtctgtggcaggtggcgagtgcaggtgaagggtgtgtgcttgtggcaggcaagtgctcgtgtgctcgaggggcgcagcggtgagtccagcatgagtgcattccccaggccatcctgggcatggacgtcctgtgccaggccaagtccgggatgggcaagacagcggtcttcgtgctggccaccctacagcagattgagcctgtcaacggacaggtgacggtcctggtcatgtgccacacgagggagctggccttccagatcagcaaggaatatgagcgcttttccaagtacatgcccagcgtcaaggtgtctgtgttcttcggtggtctctccatcaagaaggatgaagaagtgttgaagaagaactgtccccatgtcgtggtggggaccccgggccgcatcctggcgctcgtgcggaataggagcttcagcctaaagaatgtgaagcactttgtgctggacgagtgtgacaagatgctggagcagctggacatgcggcgggatgtgcaggagatcttccgcctgacaccacacgagaagcagtgcatgatgttcagcgccaccctgagcaaggacatccggcctgtgtgcaggaagttcatgcaggatcccatggaggtgtttgtggacgacgagaccaagctcacgctgcacggcctgcagcagtactacgtcaaactcaaagacagtgagaagaaccgcaagctctttgatctcttggatgtgctggagtttaaccaggtgataatcttcgtcaagtcagtgcagcgctgcatggccctggcccagctcctcgtggagcagaacttcccggccatcgccatccaccggggcatggcccaggaggagcgcctgtcacgctatcagcagttcaaggatttccagcggcggatcctggtggccaccaatctgtttggccgggggatggacatcgagcgagtcaacatcgtctttaactacgacatgcctgaggactcggacacctacctgcaccgggtggcccgggcgggtcgctttggcaccaaaggcctagccatcacttttgtgtctgacgagaatgatgccaaaatcctcaatgacgtccaggaccggtttgaagttaatgtggcagaacttccagaggaaatcgacatctccacatacatcgagcagagccggtaaccaccacgtgccagagccgcccacccggagccgcccgcatgcagcttcacctcccctttccaggcgccactgttgagaagctagagattgtatgagaataaacttgttattatggaaa

SEQ ID NO: 311246 - DNA, 1458 bp, Homo sapiens
gagcgcagcaactcgtgtctgagcgcccggcggaaaaccgaagttggaagtgtctcttagcagcgcgcggagaagaacggggagccagcatcatggcagaacaggatgtggaaaacgatcttttggattacgatgaagaggaagagccccaggctcctcaagagagcacaccagctccccctaagaaagacatcaagggatcctacgtttccatccacagctctggcttccgggactttctgctgaagccggagctcctgcgggccatcgtggactgtggctttgagcatccttctgaggtccagcatgagtgcattccccaggccatcctgggcatggacgtcctgtgccaggccaagtccgggatgggcaagacagcggtcttcgtgctggccaccctacagcagattgagcctgtcaacggacaggtgacggtcctggtcatgtgccacacgagggagctggccttccagatcagcaaggaatatgagcgcttttccaagtacatgcccagcgtcaaggatgaagaagtgttgaagaagaactgtccccatgtcgtggtggggaccccgggccgcatcctggcgctcgtgcggaataggagcttcagcctaaagaatgtgaagcactttgtgctggacgagtgtgacaagatgctggagcagctggacatgcggcgggatgtgcaggagatcttccgcctgacaccacacgagaagcagtgcatgatgttcagcgccaccctgagcaaggacatccggcctgtgtgcaggaagttcatgcaggatcccatggaggtgtttgtggacgacgagaccaagctcacgctgcacggcctgcagcagtactacgtcaaactcaaagacagtgagaagaaccgcaagctctttgatctcttggatgtgctggagtttaaccaggtgataatcttcgtcaagtcagtgcagcgctgcatggccctggcccagctcctcgtggagcagaacttcccggccatcgccatccaccggggcatggcccaggaggagcgcctgtcacgctatcagcagttcaaggatttccagcggcggatcctggtggccaccaatctgtttggccgggggatggacatcgagcgagtcaacatcgtctttaactacgacatgcctgaggactcggacacctacctgcaccgggtggcccgggcgggtcgctttggcaccaaaggcctagccatcacttttgtgtctgacgagaatgatgccaaaatcctcaatgacgtccaggaccggtttgaagttaatgtggcagaacttccagaggaaatcgacatctccacatacatcgagcagagccggtaaccaccacgtgccagagccgcccacccggagccgcccgcatgcagcttcacctcccctttccaggcgccactgttgagaagctagagattgtatgagaataaacttgttattatggaaa

SEQ ID NO: 311247 - DNA, 1360 bp, Homo sapiens
gagcgcagcaactcgtgtctgagcgcccggcggaaaaccgaagttggaagtgtctcttagcagcgcgcggagaagaacggggagccagcatcatggcagaacaggatgtggaaaacgatcttttggattacgatgaagaggaagagccccaggctcctcaagagagcacaccagctccccctaagaaagacatcaagggatcctacgtttccatccacagctctggcttccgggactttctgctgaagccggagctcctgcgggccatcgtggactgtggctttgagcatccttctgaggtccagcatgagtgcattccccaggccatcgtgtctgtgttcttcggtggtctctccatcaagaaggatgaagaagtgttgaagaagaactgtccccatgtcgtggtggggaccccgggccgcatcctggcgctcgtgcggaataggagcttcagcctaaagaatgtgaagcactttgtgctggacgagtgtgacaagatgctggagcagctgggctcccctccctgaagcgtggctcgaggcgcacgggcacggctgctccgcgccagcgtacatgcggcgggatgtgcaggagatcttccgcctgacaccacacgagaagcagtgcatgatgttcagcgccaccctgagcaaggacatccggcctgtgtgcaggaagttcatgcaggatcccatggaggtgtttgtggacgacgagaccaagctcacgctgcacggcctgcagcagtactacgtcaaactcaaagacagtgagaagaaccgcaagctctttgatctcttggatgtgctggagtttaaccaggtgataatcttcgtcaagtcagtgcagcgctgcatggccctggcccagctcctcgtggagcagaacttcccggccatcgccatccaccggggcatggcccaggaggagcgcctgtcacgctatcagcagttcaaggatttccagcggcggatcctggtggccaccaatctgtttggccgggggatggacatcgagcgagtcaacatcgtctttaactacgacatgcctgaggactcggacacctacctgcaccgggtggcccgggcgggtcgctttggcaccaaaggcctagccatcacttttgtgtctgacgagaatgatgccaaaatcctcaatgacgtccaggaccggtttgaagttaatgtggcagaacttccagaggaaatcgacatctccacatacatcgagcagagccggtaaccaccacgtgccagagccgcccacccggagccgcccgcatgcagcttcacctcccctttccaggcgccactgttgagaagctagagattgtatgagaataaacttgttattatggaaa

SEQ ID NO: 311248 - DNA, 1870 bp, Homo sapiens
gagcgcagcaactcgtgtctgagcgcccggcggaaaaccgaagttggaagtgtctcttagcagcgcgcggagaagaacggggagccagcatcatggcagaacaggatgtggaaaacgatcttttggattacgatgaagaggaagagccccaggctcctcaagagagcacaccagctccccctaagaaagacatcaagggatcctacgtttccatccacagctctggcttccgggactttctgctgaagccggagctcctgcgggccatcgtggactgtggctttgagcatccttctgagggttctcgtccctcacgctctgcttctcctgcagtccagcatgagtgcattccccaggccatcctgggcatggacgtcctgtgccaggccaagtccgggatgggcaagacagcggtcttcgtgctggccaccctacagcagattgagcctgtcaacggacaggtgacggtcctggtcatgtgccacacgagggagctggccttccagatcagcaaggaatatgagcgcttttccaagtacatgcccagcgtcaaggtgtctgtgttcttcggtggtctctccatcaagaaggatgaagaagtgttgaagaagaactgtccccatgtcgtggtggggaccccgggccgcatcctggcgctcgtgcggaataggagcttcagcctaaagaatgtgaagcactttgtgctggacgagtgtgacaagatgctggagcagctggacatgcggcgggatgtgcaggagatcttccgcctgacaccacacgagaagcagtgcatgatgttcagcgccaccctgagcaaggacatccggcctgtgtgcaggaagttcatgcaggattgtgagtagggcgagagtggcagctttggccttccccaggggcctggagcctggggccccaggacacccgcacggcccacatggcacggaggatgctgggatgctgggagccggcggagcctcctttcctcccctcggtcttgtcaaactgggagtcaagcttggtccacacctgagtcgggccagagcttacatccagcttttgagcgatgtttactgaggtctggtgcagcaggtcctctgggaagtgtcgcacaaaggagtcgcccactggaaggttctgggcaggcgagatgcccagaggtgatccctgcccgcccctcccacctcccttcccacacagcccatggaggtgtttgtggacgacgagaccaagctcacgctgcacggcctgcagcagtactacgtcaaactcaaagacagtgagaagaaccgcaagctctttgatctcttggatgtgctggagtttaaccaggtgataatcttcgtcaagtcagtgcagcgctgcatggccctggcccagctcctcgtggagcagaacttcccggccatcgccatccaccggggcatggcccaggaggagcgcctgtcacgctatcagcagttcaaggatttccagcggcggatcctggtggccaccaatctgtttggccgggggatggacatcgagcgagtcaacatcgtctttaactacgacatgcctgaggactcggacacctacctgcaccgggtggcccgggcgggtcgctttggcaccaaaggcctagccatcacttttgtgtctgacgagaatgatgccaaaatcctcaatgacgtccaggaccggtttgaagttaatgtggcagaacttccagaggaaatcgacatctccacatacatcgagcagagccggtaaccaccacgtgccagagccgcccacccggagccgcccgcatgcagcttcacctcccctttccaggcgccactgttgagaagctagagattgtatgagaataaacttgttattatggaaa

SEQ ID NO: 311249 - DNA, 1641 bp, Homo sapiens
aggcggaaggctcttgagtgggttacatgggcggccggcaggcggggctcctgtggtgatcttggggaaagctctgctgctggcagagggatgtgctgtttctgagcccgagccgaatgggaccacggggcccaagcaagcccccgtccctcctggacgtaaaggcatgcacacatacctctgggagtatgaggcttctgccacctgttgggttggttccaggccccgcctgccctcagtgagccccgacagggccggtgggagatgggcttgtgtcctgggaggcagctgcagctctcaccccagcggctgtctctgcctcaggctcccctccctgaagcgtggctcgaggcgcacgggcacggctgctccgcgccagcgtgtaagtggattgcagctcctcccgcgcctgcgctcgctggccaccccccagcccctcaggcaccaggactggccactcccgcggctcactctgccctcgtcacggtgccactggctccctggcacagacatgcggcgggatgtgcaggagatcttccgcctgacaccacacgagaagcagtgcatgatgttcagcgccaccctgagcaaggacatccggcctgtgtgcaggaagttcatgcaggattgtgagtagggcgagagtggcagctttggccttccccaggggcctggagcctggggccccaggacacccgcacggcccacatggcacggaggatgctgggatgctgggagccggcggagcctcctttcctcccctcggtcttgtcaaactgggagtcaagcttggtccacacctgagtcgggccagagcttacatccagcttttgagcgatgtttactgaggtctggtgcagcaggtcctctgggaagtgtcgcacaaaggagtcgcccactggaaggttctgggcaggcgagatgcccagaggtgatccctgcccgcccctcccacctcccttcccacacagcccatggaggtgtttgtggacgacgagaccaagctcacgctgcacggcctgcagcagtactacgtcaaactcaaagacagtgagaagaaccgcaagctctttgatctcttggatgtgctggagtttaaccaggtgataatcttcgtcaagtcagtgcagcgctgcatggccctggcccagctcctcgtggagcagaacttcccggccatcgccatccaccggggcatggcccaggaggagcgcctgtcacgctatcagcagttcaaggatttccagcggcggatcctggtggccaccaatctgtttggccgggggatggacatcgagcgagtcaacatcgtctttaactacgacatgcctgaggactcggacacctacctgcaccgggtggcccgggcgggtcgctttggcaccaaaggcctagccatcacttttgtgtctgacgagaatgatgccaaaatcctcaatgacgtccaggaccggtttgaagttaatgtggcagaacttccagaggaaatcgacatctccacatacatcgagcagagccggtaaccaccacgtgccagagccgcccacccggagccgcccgcatgcagcttcacctcccctttccaggcgccactgttgagaagctagagattgtatgagaataaacttgttattatggaaa

SEQ ID NO: 311250 - DNA, 434 bp, Homo sapiens
gagcgcagcaactcgtgtctgagcgcccggcggaaaaccgaagttggaagtgtctcttagcagcgcgcggagaagaacggggagccagcatcatggcagaacaggatgtggaaaacgatcttttggattacgatgaagaggaagagccccaggctcctcaagagagcacaccagctccccctaagaaagacatcaagggatcctacgtttccatccacagctctggcttccgggactttctgctgaagccggagctcctgcgggccatcgtggactgtggctttgagcatccttctgaggtccagcatgagtgcattccccaggccatcctgggcatggacgtcctgtgccaggccaagtccgggatgggcaagacagcggtcctatacagttggcatgggcccaaccccctaaccaggcaaaggaattttgaa

SEQ ID NO: 311251 - DNA, 478 bp, Homo sapiens
cgtagacagagtcgacaaggaagtcgctcaggaagtcgacaagatggtagaagacgaagtgggaatagaaatcgatcaagaagtgggggccacaaacggagttttgactgagtatttgatagttaatctaccagtgtgagcttgcctatttctgcctaatcatgtacattatccaccaaaaattaggtcatcatagttgaggtacgtgtccggccagtggccggacacgtagccatcacttttgtgtctgacgagaatgatgccaaaatcctcaatgacgtccaggaccggtttgaagttaatgtggcagaacttccagaggaaatcgacatctccacatacatcgagcagagccggtaaccaccacgtgccagagccgcccacccggagccgcccgcatgcagcttcacctcccctttccaggcgccactgttgagaagctagagattgtatgagaataaacttgttattatggaaa

SEQ ID NO: 311252 - DNA, 1815 bp, Homo sapiens
aggcggaaggctcttgagtgggttacatgggcggccggcaggcggggctcctgtggtgatcttggggaaagctctgctgctggcagagggatgtgctgtttctgagcccgagccgaatgggaccacggggcccaagcaagcccccgtccctcctggacgtaaaggcatgcacacatacctctgggagtatgaggcttctgccacctgttgggttggttccaggccccgcctgccctcagtgagccccgacagggccggtgggagatgggcttgtgtcctgggaggcagctgcagctctcaccccagcggctgtctctgcctcaggctcccctccctgaagcgtggctcgaggcgcacgggcacggctgctccgcgccagcgtgtaagtggattgcagctcctcccgcgcctgcgctcgctggccaccccccagcccctcaggcaccaggactggccactcccgcggctcactctgccctcgtcacggtgccactggctccctggcacaggttgggaggggtctgggtctggtctggggtgggggtcctgcatggcagacgctcatgcccacccatgtcttgccctccccacctagacatgcggcgggatgtgcaggagatcttccgcctgacaccacacgagaagcagtgcatgatgttcagcgccaccctgagcaaggacatccggcctgtgtgcaggaagttcatgcaggattgtgagtagggcgagagtggcagctttggccttccccaggggcctggagcctggggccccaggacacccgcacggcccacatggcacggaggatgctgggatgctgggagccggcggagcctcctttcctcccctcggtcttgtcaaactgggagtcaagcttggtccacacctgagtcgggccagagcttacatccagcttttgagcgatgtttactgaggtctggtgcagcaggtcctctgggaagtgtcgcacaaaggagtcgcccactggaaggttctgggcaggcgagatgcccagaggtgatccctgcccgcccctcccacctcccttcccacacagcccatggaggtgtttgtggacgacgagaccaagctcacgctgcacggcctgcagcagtactacgtcaaactcaaagacagtgagaagaaccgcaagctctttgatctcttggatgtgctggagtttaaccaggtgataatcttcgtcaagtcagtgcagcgctgcatggccctggcccagctcctcgtggagcagaacttcccggccatcgccatccaccggggcatggcccaggaggagcggtgagtgcgagccgcccgccaaggctgcagggagcaccaccaggagcccagtgtctgacggcctccacttgtttctcctgcaccccagcctgtcacgctatcagcagttcaaggatttccagcggcggatcctggtggccaccaatctgtttggccgggggatggacatcgagcgagtcaacatcgtctttaactacgacatgcctgaggactcggacacctacctgcaccgggtggcccgggcgggtcgctttggcaccaaaggcctagccatcacttttgtgtctgacgagaatgatgccaaaatcctcaatgacgtccaggaccggtttgaagttaatgtggcagaacttccagaggaaatcgacatctccacatacatcgagcagagccggtaaccaccacgtgccagagccgcccacccggagccgcccgcatgcagcttcacctcccctttccaggcgccactgttgagaagctagagattgtatgagaataaacttgttattatggaaa

SEQ ID NO: 311253 - DNA, 1578 bp, Homo sapiens
gagcgcagcaactcgtgtctgagcgcccggcggaaaaccgaagttggaagtgtctcttagcagcgcgcggagaagaacggggagccagcatcatggcagaacaggatgtggaaaacgatcttttggattacgatgaagaggaagagccccaggctcctcaagagagcacaccagctccccctaagaaagacatcaagggatcctacgtttccatccacagctctggcttccgggactttctgctgaagccggagctcctgcgggccatcgtggactgtggctttgagcatccttctgaggtccagcatgagtgcattccccaggccatcctgggcatggacgtcctgtgccaggccaagtccgggatgggcaagacagcggtcttcgtgctggccaccctacagcagattgagcctgtcaacggacaggtgacggtcctggtcatgtgccacacgagggagctggccttccagatcagcaaggaatatgagcgcttttccaagtacatgcccagcgtcaaggtgtctgtgttcttcggtggtctctccatcaagaaggatgaagaagtgttgaagaagaactgtccccatgtcgtggtggggaccccgggccgcatcctggcgctcgtgcggaataggagcttcagcctaaagaatgtgaagcactttgtgctggacgagtgtgacaagatgctggagcagctggacatgcggcgggatgtgcaggagatcttccgcctgacaccacacgagaagcagtgcatgatgttcagcgccaccctgagcaaggacatccggcctgtgtgcaggaagttcatgcaggatcccatggaggtgtttgtggacgacgagaccaagctcacgctgcacggcctgcagcagtactacgtcaaactcaaagacagtgagaagaaccgcaagctctttgatctcttggatgtgctggagtttaaccaggtgataatcttcgtcaagtcagtgcagcgctgcatggccctggcccagctcctcgtggagcagaacttcccggccatcgccatccaccggggcatggcccaggaggagcgcctgtcacgctatcagcagttcaaggatttccagcggcggatcctggtggccaccaatctgtttggccgggggatggacatcgagcgagtcaacatcgtctttaactacgacatgcctgaggactcggacacctacctgcaccgggtggcccgggcgggtcgctttggcaccaaaggcctagccatcacttttgtgtctgacgagaatgatgccaaaatcctcaatgacgtccaggaccggtttgaagttaatgtggcagaacttccagaggaaatcgacatctccacatacagtaagtgccttgggcagggccaggggtctggggcagagggttcctcccccggcccttcagttcactgcatctcatgtcttacagtcgagcagagccggtaaccaccacgtgccagagccgcccacccggagccgcccgcatgcagcttcacctcccctttccaggcgccactgttgagaagctagagattgtatgagaataaacttgttattatggaaa

SEQ ID NO: 311254 - DNA, 1448 bp, Homo sapiens
cacgagggcccctagcagttacggagaagaacggggagccagcatcatggcagaacaggatgtggaaaacgatcttttggattacgatgaagaggaagagccccaggctcctcaagagagcacaccagctccccctaagaaagacatcaagggatcctacgtttccatccacagctctggcttccgggactttctgctgaagccggagctcctgcgggccatcgtggactgtggctttgagcatccttctgaggtccagcatgagtgcattccccaggccatcctgggcatggacgtcctgtgccaggccaagtccgggatgggcaagacagcggtcttcgtgctggccaccctacagcagattgagcctgtcaacggacaggtgacggtcctggtcatgtgccacacgagggagctggccttccagatcagcaaggaatatgagcgcttttccaagtacatgcccagcgtcaaggtgtctgtgttcttcggtggtctctccatcaagaaggatgaagaagtgttgaagaagaactgtccccatgtcgtggtggggaccccgggccgcatcctggcgctcgtgcggaataggagcttcagcctaaagaatgtgaagcactttgtgctggacgagtgtgacaagatgctggagcagctggacatgcggcgggatgtgcaggagatcttccgcctgacaccacacgagaagcagtgcatgatgttcagcgccaccctgagcaaggacatccggcctgtgtgcaggaagttcatgcaggatcccatggaggtgtttgtggacgacgagaccaagctcacgctgcacggcctgcagcagtactacgtcaaactcaaagacagtgagaagaaccgcaagctctttgatctcttggatgtgctggagtttaaccaggtgataatcttcgtcaagtcagtgcagcgctgcatggccctggcccagctcctcgtggagcagaacttcccggccatcgccatccaccggggcatggcccaggaggagcgcctgtcacgctatcagcagttcaaggatttccagcggcggatcctggtggccaccaatctgtttggccgggggatggacatcgagcgagtcaacatcgtctttaactacgacatgcctgaggactcggacacctacctgcaccgggtggcccgggcgggtcgctttggcaccaaaggcctagccatcacttttgtgtctgacgagaatgatgccaaaatcctcaatgacgtccaggaccggtttgaagttaatgtggcagaacttccagaggaaatcgacatctccacatacatcgagcagagccggtaaccaccacgtgccagagccgcccacccggagccgcccgcatgcagcttcacctcccctttccaggcgccactgttgagaagctagagattgtatgagaataaacttgttattatggaaa

SEQ ID NO: 311255 - DNA, 1925 bp, Homo sapiens
gagcgcagcaactcgtgtctgagcgcccggcggaaaaccgaagttggaagtgtctcttagcagcgcgcggagaagaacggggagccagcatcatggcagaacaggatgtggaaaacgatcttttggattacgatgaagaggaagagccccaggctcctcaagagagcacaccagctccccctaagaaagacatcaagggatcctacgtttccatccacagctctggcttccgggactttctgctgaagccggagctcctgcgggccatcgtggactgtggctttgagcatccttctgaggtccagcatgagtgcattccccaggccatcctgggcatggacgtcctgtgccaggccaagtccgggatgggcaagacagcggtcttcgtgctggccaccctacagcagattgagcctgtcaacggacaggtgacggtcctggtcatgtgccacacgagggagctggccttccagatcagcaaggaatatgagcgcttttccaagtacatgcccagcgtcaaggtgtctgtgttcttcggtggtctctccatcaagaaggatgaagaagtgttgaagaagaactgtccccatgtcgtggtggggaccccgggccgcatcctggcgctcgtgcggaataggagcttcagcctaaagaatgtgaagcactttgtgctggacgagtgtgacaagatgctggagcagctggacatgcggcgggatgtgcaggagatcttccgcctgacaccacacgagaagcagtgcatgatgttcagcgccaccctgagcaaggacatccggcctgtgtgcaggaagttcatgcaggattgtgagtagggcgagagtggcagctttggccttccccaggggcctggagcctggggccccaggacacccgcacggcccacatggcacggaggatgctgggatgctgggagccggcggagcctcctttcctcccctcggtcttgtcaaactgggagtcaagcttggtccacacctgagtcgggccagagcttacatccagcttttgagcgatgtttactgaggtctggtgcagcaggtcctctgggaagtgtcgcacaaaggagtcgcccactggaaggttctgggcaggcgagatgcccagaggtgatccctgcccgcccctcccacctcccttcccacacagcccatggaggtgtttgtggacgacgagaccaagctcacgctgcacggcctgcagcagtactacgtcaaactcaaagacagtgagaagaaccgcaagctctttgatctcttggatgtgctggagtttaaccaggtgataatcttcgtcaagtcagtgcagcgctgcatggccctggcccagctcctcgtggagcagaacttcccggccatcgccatccaccggggcatggcccaggaggagcggtgagtgcgagccgcccgccaaggctgcagggagcaccaccaggagcccagtgtctgacggcctccacttgtttctcctgcaccccagcctgtcacgctatcagcagttcaaggatttccagcggcggatcctggtggccaccaatctgtttggccgggggatggacatcgagcgagtcaacatcgtctttaactacgacatgcctgaggactcggacacctacctgcaccgggtggcccgggcgggtcgctttggcaccaaaggcctagccatcacttttgtgtctgacgagaatgatgccaaaatcctcaatgacgtccaggaccggtttgaagttaatgtggcagaacttccagaggaaatcgacatctccacatacatcgagcagagccggtaaccaccacgtgccagagccgcccacccggagccgcccgcatgcagcttcacctcccctttccaggcgccactgttgagaagctagagattgtatgagaataaacttgttattatggaaa

SEQ ID NO: 311256 - DNA, 1500 bp, Homo sapiens
gggaaattgaggaaaaatatggctaggtacgagctggtggtatgtcggtgcgggatctgagtagtgcgctggacatgcgcgtagctgtatcattgcgactatgcatgtcaaagtgagtcttatgtgtcgctccatccctatgatgagtcgcattaatttcgagtagagccagagttaactctccccctaagaaagacatcaagggatcctacgtttccatccacagctctggcttccgggactttctgctgaagccggagctcctgcgggccatcgtggactgtggctttgagcatccttctgaggtccagcatgagtgcattccccaggccatcctgggcatggacgtcctgtgccaggccaagtccgggatgggcaagacagcggtcttcgtgctggccaccctacagcagattgagcctgtcaacggacaggtgacggtcctggtcatgtgccacacgagggagctggccttccagatcagcaaggaatatgagcgcttttccaagtacatgcccagcgtcaaggtgtctgtgttcttcggtggtctctccatcaagaaggatgaagaagtgttgaagaagaactgtccccatgtcgtggtggggaccccgggccgcatcctggcgctcgtgcggaataggagcttcagcctaaagaatgtgaagcactttgtgctggacgagtgtgacaagatgctggagcagctggacatgcggcgggatgtgcaggagatcttccgcctgacaccacacgagaagcagtgcatgatgttcagcgccaccctgagcaaggacatccggcctgtgtgcaggaagttcatgcaggatcccatggaggtgtttgtggacgacgagaccaagctcacgctgcacggcctgcagcagtactacgtcaaactcaaagacagtgagaagaaccgcaagctctttgatctcttggatgtgctggagtttaaccaggtgataatcttcgtcaagtcagtgcagcgctgcatggccctggcccagctcctcgtggagcagaacttcccggccatcgccatccaccggggcatggcccaggaggagcgcctgtcacgctatcagcagttcaaggatttccagcggcggatcctggtggccaccaatctgtttggccgggggatggacatcgagcgagtcaacatcgtctttaactacgacatgcctgaggactcggacacctacctgcaccgggtggcccgggcgggtcgctttggcaccaaaggcctagccatcacttttgtgtctgacgagaatgatgccaaaatcctcaatgacgtccaggaccggtttgaagttaatgtggcagaacttccagaggaaatcgacatctccacatacatcgagcagagccggtaaccaccacgtgccagagccgcccacccggagccgcccgcatgcagcttcacctcccctttccaggcgccactgttgagaagctagagattgtatgagaataaacttgttattatggaaa

SEQ ID NO: 311257 - DNA, 1826 bp, Homo sapiens
gagcgcagcaactcgtgtctgagcgcccggcggaaaaccgaagttggaagtgtctcttagcagcgcgcggagaagaacggggagccagcatcatggcagaacaggatgtggaaaacgatcttttggattacgatgaagaggaagagccccaggctcctcaagagagcacaccagctccccctaagaaagacatcaagggatcctacgtttccatccacagctctggcttccgggactttctgctgaagccggagctcctgcgggccatcgtggactgtggctttgagcatccttctgaggtccagcatgagtgcattccccaggccatcctgggcatggacgtcctgtgccaggccaagtccgggatgggcaagacagcggtcttcgtgctggccaccctacagcagattgagcctgtcaacggacaggtgacggtcctggtcatgtgccacacgagggagctggccttccagatcagcaaggaatatgagcgcttttccaagtacatgcccagcgtcaaggtgagtccctcgggccagactggaccaggcgccacttggtttctgcagctttgttagcctcggctctggcccagccagcatttaccaagcttggcaggggcagctgcctttgaggtttgcggtggtttttgctccttaaaagcctgatgaattatgcatggctcccaggggcctgcgcaggtcccagcctggggctgcctttgagtggagccccgggaggctctcaggcctgccttggtcccctgaggcctcctgttcgcaggtgctgggccgtgcaggttggggccttgggccgtgtatcagcatggagcggtttcctcctcatccccatagtgtctgtgttcttcggtggtctctccatcaagaaggatgaagaagtgttgaagaagaactgtccccatgtcgtggtggggaccccgggccgcatcctggcgctcgtgcggaataggagcttcagcctaaagaatgtgaagcactttgtgctggacgagtgtgacaagatgctggagcagctggacatgcggcgggatgtgcaggagatcttccgcctgacaccacacgagaagcagtgcatgatgttcagcgccaccctgagcaaggacatccggcctgtgtgcaggaagttcatgcaggatcccatggaggtgtttgtggacgacgagaccaagctcacgctgcacggcctgcagcagtactacgtcaaactcaaagacagtgagaagaaccgcaagctctttgatctcttggatgtgctggagtttaaccaggtgataatcttcgtcaagtcagtgcagcgctgcatggccctggcccagctcctcgtggagcagaacttcccggccatcgccatccaccggggcatggcccaggaggagcgcctgtcacgctatcagcagttcaaggatttccagcggcggatcctggtggccaccaatctgtttggccgggggatggacatcgagcgagtcaacatcgtctttaactacgacatgcctgaggactcggacacctacctgcaccgggtggcccgggcgggtcgctttggcaccaaaggcctagccatcacttttgtgtctgacgagaatgatgccaaaatcctcaatgacgtccaggaccggtttgaagttaatgtggcagaacttccagaggaaatcgacatctccacatacatcgagcagagccggtaaccaccacgtgccagagccgcccacccggagccgcccgcatgcagcttcacctcccctttccaggcgccactgttgagaagctagagattgtatgagaataaacttgttattatggaaa

SEQ ID NO: 311258 - DNA, 2011 bp, Homo sapiens
gagcgcagcaactcgtgtctgagcgcccggcggaaaaccgaagttggaagtgtctcttagcagcgcgcggagaagaacggggagccagcatcatggcagaacaggatgtggaaaacgatcttttggattacgatgaagaggaagagccccaggctcctcaagagagcacaccagctccccctaagaaagacatcaagggatcctacgtttccatccacagctctggcttccgggactttctgctgaagccggagctcctgcgggccatcgtggactgtggctttgagcatccttctgaggtccagcatgagtgcattccccaggccatcctgggcatggacgtcctgtgccaggccaagtccgggatgggcaagacagcggtcttcgtgctggccaccctacagcagattgagcctgtcaacggacaggtgacggtcctggtcatgtgccacacgagggagctggccttccagatcagcaaggaatatgagcgcttttccaagtacatgcccagcgtcaaggtgagtccctcgggccagactggaccaggcgccacttggtttctgcagctttgttagcctcggctctggcccagccagcatttaccaagcttggcaggggcagctgcctttgaggtttgcggtggtttttgctccttaaaagcctgatgaattatgcatggctcccaggggcctgcgcaggtcccagcctggggctgcctttgagtggagccccgggaggctctcaggcctgccttggtcccctgaggcctcctgttcgcaggtgctgggccgtgcaggttggggccttgggccgtgtatcagcatggagcggtttcctcctcatccccatagtgtctgtgttcttcggtggtctctccatcaagaaggatgaagaagtgttgaagaagaactgtccccatgtcgtggtggggaccccgggccgcatcctggcgctcgtgcggaataggagcttcagcctaaagaatgtgaagcactttgtgctggacgagtgtgacaagatgctggagcagctgggctcccctccctgaagcgtggctcgaggcgcacgggcacggctgctccgcgccagcgtgtaagtggattgcagctcctcccgcgcctgcgctcgctggccaccccccagcccctcaggcaccaggactggccactcccgcggctcactctgccctcgtcacggtgccactggctccctggcacagacatgcggcgggatgtgcaggagatcttccgcctgacaccacacgagaagcagtgcatgatgttcagcgccaccctgagcaaggacatccggcctgtgtgcaggaagttcatgcaggatcccatggaggtgtttgtggacgacgagaccaagctcacgctgcacggcctgcagcagtactacgtcaaactcaaagacagtgagaagaaccgcaagctctttgatctcttggatgtgctggagtttaaccaggtgataatcttcgtcaagtcagtgcagcgctgcatggccctggcccagctcctcgtggagcagaacttcccggccatcgccatccaccggggcatggcccaggaggagcgcctgtcacgctatcagcagttcaaggatttccagcggcggatcctggtggccaccaatctgtttggccgggggatggacatcgagcgagtcaacatcgtctttaactacgacatgcctgaggactcggacacctacctgcaccgggtggcccgggcgggtcgctttggcaccaaaggcctagccatcacttttgtgtctgacgagaatgatgccaaaatcctcaatgacgtccaggaccggtttgaagttaatgtggcagaacttccagaggaaatcgacatctccacatacatcgagcagagccggtaaccaccacgtgccagagccgcccacccggagccgcccgcatgcagcttcacctcccctttccaggcgccactgttgagaagctagagattgtatgagaataaacttgttattatggaaa

SEQ ID NO: 311259 - DNA, 1487 bp, Homo sapiens
gagcgcagcaactcgtgtctgagcgcccggcggaaaaccgaagttggaagtgtctcttagcagcgcgcggagaagaacggggagccagcatcatggcagaacaggatgtggaaaacgatcttttggattacgatgaagaggaagagccccaggctcctcaagagagcacaccagctccccctaagaaagacatcaagggatcctacgtttccatccacagctctggcttccgggactttctgctgaagccggagctcctgcgggccatcgtggactgtggctttgagcatccttctgaggtccagcatgagtgcattccccaggccatcgtgtctgtgttcttcggtggtctctccatcaagaaggatgaagaagtgttgaagaagaactgtccccatgtcgtggtggggaccccgggccgcatcctggcgctcgtgcggaataggagcttcagcctaaagaatgtgaagcactttgtgctggacgagtgtgacaagatgctggagcagctgggctcccctccctgaagcgtggctcgaggcgcacgggcacggctgctccgcgccagcgtgtaagtggattgcagctcctcccgcgcctgcgctcgctggccaccccccagcccctcaggcaccaggactggccactcccgcggctcactctgccctcgtcacggtgccactggctccctggcacagacatgcggcgggatgtgcaggagatcttccgcctgacaccacacgagaagcagtgcatgatgttcagcgccaccctgagcaaggacatccggcctgtgtgcaggaagttcatgcaggatcccatggaggtgtttgtggacgacgagaccaagctcacgctgcacggcctgcagcagtactacgtcaaactcaaagacagtgagaagaaccgcaagctctttgatctcttggatgtgctggagtttaaccaggtgataatcttcgtcaagtcagtgcagcgctgcatggccctggcccagctcctcgtggagcagaacttcccggccatcgccatccaccggggcatggcccaggaggagcgcctgtcacgctatcagcagttcaaggatttccagcggcggatcctggtggccaccaatctgtttggccgggggatggacatcgagcgagtcaacatcgtctttaactacgacatgcctgaggactcggacacctacctgcaccgggtggcccgggcgggtcgctttggcaccaaaggcctagccatcacttttgtgtctgacgagaatgatgccaaaatcctcaatgacgtccaggaccggtttgaagttaatgtggcagaacttccagaggaaatcgacatctccacatacatcgagcagagccggtaaccaccacgtgccagagccgcccacccggagccgcccgcatgcagcttcacctcccctttccaggcgccactgttgagaagctagagattgtatgagaataaacttgttattatggaaa

SEQ ID NO: 311260 - DNA, 1298 bp, Homo sapiens
aggcggaaggctcttgagtgggttacatgggcggccggcaggcggggctcctgtggtgatcttggggaaagctctgctgctggcagagggatgtgctgtttctgagcccgagccgaatgggaccacggggcccaagcaagcccccgtccctcctggacgtaaaggcatgcacacatacctctgggagtatgaggcttctgccacctgttgggttggttccaggccccgcctgccctcagtgagccccgacagggccggtgggagatgggcttgtgtcctgggaggcagctgcagctctcaccccagcggctgtctctgcctcaggctcccctccctgaagcgtggctcgaggcgcacgggcacggctgctccgcgccagcgtgtaagtggattgcagctcctcccgcgcctgcgctcgctggccaccccccagcccctcaggcaccaggactggccactcccgcggctcactctgccctcgtcacggtgccactggctccctggcacagacatgcggcgggatgtgcaggagatcttccgcctgacaccacacgagaagcagtgcatgatgttcagcgccaccctgagcaaggacatccggcctgtgtgcaggaagttcatgcaggatcccatggaggtgtttgtggacgacgagaccaagctcacgctgcacggcctgcagcagtactacgtcaaactcaaagacagtgagaagaaccgcaagctctttgatctcttggatgtgctggagtttaaccaggtgataatcttcgtcaagtcagtgcagcgctgcatggccctggcccagctcctcgtggagcagaacttcccggccatcgccatccaccggggcatggcccaggaggagcgcctgtcacgctatcagcagttcaaggatttccagcggcggatcctggtggccaccaatctgtttggccgggggatggacatcgagcgagtcaacatcgtctttaactacgacatgcctgaggactcggacacctacctgcaccgggtggcccgggcgggtcgctttggcaccaaaggcctagccatcacttttgtgtctgacgagaatgatgccaaaatcctcaatgacgtccaggaccggtttgaagttaatgtggcagaacttccagaggaaatcgacatctccacatacatcgagcagagccggtaaccaccacgtgccagagccgcccacccggagccgcccgcatgcagcttcacctcccctttccaggcgccactgttgagaagctagagattgtatgagaataaacttgttattatggaaa

SEQ ID NO: 311261 - DNA, 1468 bp, Homo sapiens
gagcgcagcaactcgtgtctgagcgcccggcggaaaaccgaagttggaagtgtctcttagcagcgcgcggagaagaacggggagccagcatcatggcagaacaggatgtggaaaacgatcttttggattacgatgaagaggaagagccccaggctcctcaagagagcacaccagctccccctaagaaagacatcaagggatcctacgtttccatccacagctctggcttccgggactttctgctgaagccggagctcctgcgggccatcgtggactgtggctttgagcatccttctgaggtccagcatgagtgcattccccaggccatcgtgtctgtgttcttcggtggtctctccatcaagaaggatgaagaagtgttgaagaagaactgtccccatgtcgtggtggggaccccgggccgcatcctggcgctcgtgcggaataggagcttcagcctaaagaatgtgaagcactttgtgctggacgagtgtgacaagatgctggagcagctgggctcccctccctgaagcgtggctcgaggcgcacgggcacggctgctccgcgccagcgtacatgcggcgggatgtgcaggagatcttccgcctgacaccacacgagaagcagtgcatgatgttcagcgccaccctgagcaaggacatccggcctgtgtgcaggaagttcatgcaggatgtcctctgggaagtgtcgcacaaaggagtcgcccactggaaggttctgggcaggcgagatgcccagaggtgatccctgcccgcccctcccacctcccttcccacacagcccatggaggtgtttgtggacgacgagaccaagctcacgctgcacggcctgcagcagtactacgtcaaactcaaagacagtgagaagaaccgcaagctctttgatctcttggatgtgctggagtttaaccaggtgataatcttcgtcaagtcagtgcagcgctgcatggccctggcccagctcctcgtggagcagaacttcccggccatcgccatccaccggggcatggcccaggaggagcgcctgtcacgctatcagcagttcaaggatttccagcggcggatcctggtggccaccaatctgtttggccgggggatggacatcgagcgagtcaacatcgtctttaactacgacatgcctgaggactcggacacctacctgcaccgggtggcccgggcgggtcgctttggcaccaaaggcctagccatcacttttgtgtctgacgagaatgatgccaaaatcctcaatgacgtccaggaccggtttgaagttaatgtggcagaacttccagaggaaatcgacatctccacatacatcgagcagagccggtaaccaccacgtgccagagccgcccacccggagccgcccgcatgcagcttcacctcccctttccaggcgccactgttgagaagctagagattgtatgagaataaacttgttattatggaaa

SEQ ID NO: 311262 - DNA, 1166 bp, Homo sapiens
gagcgcagcaactcgtgtctgagcgcccggcggaaaaccgaagttggaagtgtctcttagcagcgcgcggagaagaacggggagccagcatcatggcagaacaggatgtggaaaacgatcttttggattacgatgaagaggaagagccccaggctcctcaagagagcacaccagctccccctaagaaagacatcaagggatcctacgtttccatccacagctctggcttccgggactttctgctgaagccggagctcctgcgggccatcgtggactgtggctttgagcatccttctgaggtccagcatgagtgcattccccaggccatcctgggcatggacgtcctgtgccaggccaagtccgggatgggcaagacagcggtcttcgtgctggccaccctacagcagattgagcctgtcaacggacaggtgacggtcctggtcatgtgccacacgagggagctggccttccagatcagcaaggaatatgagcgcttttccaagtacatgcccagcgtcaaggatgaagaagtgttgaagaagaactgtccccatgtcgtggtggggaccccgggccgcatcctggcgctcgtgcggaataggagcttcagcctaaagaatgtgaagcactttgtgctggacgagtgtgacaagatgctggagcagctggacatgcggcgggatgtgcaggagatcttccgcctgacaccacacgagaagcagtgcatgatgttcagcgcctgtcacgctatcagcagttcaaggatttccagcggcggatcctggtggccaccaatctgtttggccgggggatggacatcgagcgagtcaacatcgtctttaactacgacatgcctgaggactcggacacctacctgcaccgggtggcccgggcgggtcgctttggcaccaaaggcctagccatcacttttgtgtctgacgagaatgatgccaaaatcctcaatgacgtccaggaccggtttgaagttaatgtggcagaacttccagaggaaatcgacatctccacatacatcgagcagagccggtaaccaccacgtgccagagccgcccacccggagccgcccgcatgcagcttcacctcccctttccaggcgccactgttgagaagctagagattgtatgagaataaacttgttattatggaaa

SEQ ID NO: 311263 - DNA, 446 bp, Homo sapiens
gagcgcagcaactcgtgtctgagcgcccggcggaaaaccgaagttggaagtgtctcttagcagcgcgcggagaagaacggggagccagcatcatggcagaacaggatgtggaaaacgatcttttggattacgatgaagaggacctgatcctgtctgcctgcaggtggcccgggcgggtcgctttggcaccaaaggcctagccatcacttttgtgtctgacgagaatgatgccaaaatcctcaatgacgtccaggaccggtttgaagttaatgtggcagaacttccagaggaaatcgacatctccacatacatcgagcagagccggtaaccaccacgtgccagagccgcccacccggagccgcccgcatgcagcttcacctcccctttccaggcgccactgttgagaagctagagattgtatgagaataaacttgttattatggaaa

SEQ ID NO: 311264 - DNA, 178 bp, Homo sapiens
ggcagaggttgcagtgagccgagattgtgccattgcactccagcctgggtgacagagtgagactctgtctccaaaaaaaaagaatataaatctctaatatgactgtgtatgtgactgaagttagactttttttattggtcctggatctaattgtctccattctgacagataactaaat

SEQ ID NO: 311265 - DNA, 290 bp, Homo sapiens
gtgatccacccgccttggcctcccaaagtgctgggattacaggtgtgagccaccgtgcccagccataaattattataaaaatgatagtgaaacctctggacagcttggcaaaaacaaaaacgaaacttcacaggagaccccattaatcaggcctcacaaaattcctacacataaagccgtgtttatgatgagctcacaattcaaaaatataaaacagttgaaaaaagatttcactatgagcaagagacagcaggattagacactcaagaacttcagataatgaaacaatc

SEQ ID NO: 311266 - DNA, 2167 bp, Homo sapiens
ctggaaagacccgcccagcggtgctgtcgctcgcgctggaagaagcggaagaagatggcgctcaccagctttttacctgcacctactcagctatctcaggaccagcttgaggctgaagaaaaggcaagatcccagagatcacggcagacctcactggtctcctcccgaagagaacctcccccgtacggataccggaaaggctggatacctcggttattagaggattttggagatggaggtgcttttccagagatccatgtggcccagtatccactggatatgggacgaaagaaaaaaatgtcgaatgcgctggccattcaggtggattctgaaggaaaaattaaatatgatgcaattgctcgacaaggacagtcaaaagacaaggtcatttatagcaaatacactgacctggttccaaaggaggttatgaatgcagatgatccagacctgcaaaggcccgatgaagaagctattaaagagataacagaaaagacaagagtagccttagaaaaatctgtatcacagaaggtcgccgcagccatgccagttcgagcagctgacaaattggctcctgctcagtatatccgatacacaccatctcagcaaggagtggcattcaactctggagctaaacagagggttattcggatggtagaaatgcagaaagatccaatggagcctccaaggttcaagattaataagaaaattccccggggaccaccttctcctcctgcgcctgtcatgcattctcctagccgaaagatgactgtaaaggaacaacaagagtggaagattcctccttgtatttctaactggaaaaatgcaaagggttatacaattccattagacaaacgtctggctgctgatggaagaggactacagacagtacacataaatgaaaatttcgccaaattggcagaagccctctacattgctgatcggaaggctcgtgaagctgtggaaatgcgtgcccaagtagagagaaaaatggctcagaaagaaaaggaaaaacatgaagagaaacttagagaaatggcccagaaagccagggagagaagagctgggatcaaaactcatgtggaaaaagaggatggggaggcacgtgagagggatgaaatccggcatgacaggcgaaaagagagacagcatgaccggaatctttccagggcagctcctgataagaggtcgaaacttcagagaaatgaaaatcgggatatcagtgaagttattgctctcggtgttcctaatcctcggacttccaatgaagttcagtatgaccaaaggctcttcaaccaatccaagggtatggacagtggatttgcaggtggagaagatgaaatttataatgtttatgatcaagcctggagaggtggtaaagatatggcccagagtatttataggcccagtaaaaatctggacaaggacatgtatggtgatgacctagaagccagaataaagaccaacagatttgttcccgacaaggagttttctggttcagaccgtagacagagaggccgagaaggaccagttcagtttgaggaagatccttttggtttggacaagtttttggaagaagccaaacagcatggtggctctaaaagaccctcagatagcagccgccccaaggaacacgagcatgaaggcaagaagaggaggaaggaataggcacaggtctctccaaagtgaatgaactcttacccataaccctaatgatgcaagtcatatgggggaacactttgtaaatggtcaggataaaaaccaaatctgggtgccagatcccagcactactttttattactggagaaatgggggggatagaaaattctactttgaattatttagttttttttaaagagtgggttgtgtttgtgcttctcccacctttcagcatttatagaacatgctgccccacatacaaagtcaagaccacttacttttatgtgacactagtagtttggggttaatgttttgtgtaagaacagctgcatatgagtaaagttaccccaaccacagtgaggaggaagatgttcacatactggaactgtcctgccaaataaattttgcccctattgtgctctgttttaatttggagtgggcaaagtaacctcttgcttggtgcaactatttgtttcaaataaaaacatttagacaaaaaaaaacagttatg

SEQ ID NO: 311267 - DNA, 837 bp, Homo sapiens
  misc_feature (675)..(676): n is a, c, g, or t
ctggaaagacccgcccagcggtgctgtcgctcgcgctggaagaagcggaagaagatggcgctcaccagctatctcaggaccagcttgaggctgaagaaaaggcaagatcccagagatcacggcagacctcactggtctcctcccgaagagaacctcccccgtacggataccggaaaggctggatacctcggttattagaggattttggagatggaggtgcttttccagagatccatgtggcccagtatccactggatatgggacgaaagaaaaaaatgtcgaatgcgctggccattcaggtggattctgaaggaaaaattaaatatgatgcaattgctcgacaaggacagtcaaaagacaaggtcatttatagcaaatacactgacctggttccaaaggaggttatgaatgcagatgatccagacctgcaaaggcccgatgaagaagctattaaagagataacagaaaagacaagagtagccttagaaaaatctgtatcacagaaggtcgccgcagccatgccagttcgagcagctgacaaattggctcctgctcagtatatccgatacacaccatctcagcaaggagtggcattcaactctggagctaaacagagggttattcggatggtagaaatgcagaaagatccaatggagcctccaaggttcaagattnntaaggaaattccaccggggagcactttatcctccagcgtcgactcaagagtttcctttctggaagatgattataaaggtacgacaagagtgtaagattcctcttgttatatttatctgatgtgcgacattgtgagaataccggtcccattccgacgcatgt

SEQ ID NO: 311268 - DNA, 2151 bp, Homo sapiens
  misc_feature (21)..(21): n is a, c, g, or t
  misc_feature (36)..(36): n is a, c, g, or t
  misc_feature (53)..(53): n is a, c, g, or t
  misc_feature (121)..(121): n is a, c, g, or t
  misc_feature (132)..(132): n is a, c, g, or t
  misc_feature (143)..(144): n is a, c, g, or t
  misc_feature (146)..(147): n is a, c, g, or t
  misc_feature (156)..(156): n is a, c, g, or t
  misc_feature (172)..(172): n is a, c, g, or t
  misc_feature (183)..(184): n is a, c, g, or t
  misc_feature (191)..(191): n is a, c, g, or t
  misc_feature (193)..(193): n is a, c, g, or t
  misc_feature (198)..(198): n is a, c, g, or t
  misc_feature (204)..(204): n is a, c, g, or t
  misc_feature (211)..(212): n is a, c, g, or t
  misc_feature (234)..(234): n is a, c, g, or t
  misc_feature (315)..(315): n is a, c, g, or t
ctggaagaagcggaagaaganggcgctaaaaagctntattaaatgaacataancaactaaataaggaccaaaatgaagctgaaaaaaaagaaaaaaaacaaaaaaaaaggaaaaaatcaanggtaacatcangaaaaaaaaannanncgtaagganaaaggaaaagatgganaaatcggttannaaaagantntgganaaggangtgcttnnaaaaaaaaaaaagtggccaaanaaaaaatggaaaagggaaaaaaaaaaaaaaagtagaaagcgctggcaaataaagtggaatataaaaaaaaaaaaaaaaaanaaggaaaaattaaatatgatgcaattgctcgacaaggacagtcaaaagacaaggtcatttatagcaaatacactgacctggttccaaaggaggttatgaatgcagatgatccagacctgcaaaggcccgatgaagaagctattaaagagataacagaaaagacaagagtagccttagaaaaatctgtatcacagaaggtcgccgcagccatgccagttcgagcagctgacaaattggctcctgctcagtatatccgatacacaccatctcagcaaggagtggcattcaactctggagctaaacagagggttattcggatggtagaaatgcagaaagatccaatggagcctccaaggttcaagattaataagaaaattccccggggaccaccttctcctcctgcgcctgtcatgcattctcctagccgaaagatgactgtaaaggaacaacaagagtggaagattcctccttgtatttctaactggaaaaatgcaaagggttatacaattccattagacaaacgtctggctgctgatggaagaggactacagacagtacacataaatgaaaatttcgccaaattggcagaagccctctacattgctgatcggaaggctcgtgaagctgtggaaatgcgtgcccaagtagagagaaaaatggctcagaaagaaaaggaaaaacatgaagagaaacttagagaaatggcccagaaagccagggagagaagagctgggatcaaaactcatgtggaaaaagaggatggggaggcacgtgagagggatgaaatccggcatgacaggcgaaaagagagacagcatgaccggaatctttccagggcagctcctgataagaggtcgaaacttcagagaaatgaaaatcgggatatcagtgaagttattgctctcggtgttcctaatcctcggacttccaatgaagttcagtatgaccaaaggctcttcaaccaatccaagggtatggacagtggatttgcaggtggagaagatgaaatttataatgtttatgatcaagcctggagaggtggtaaagatatggcccagagtatttataggcccagtaaaaatctggacaaggacatgtatggtgatgacctagaagccagaataaagaccaacagatttgttcccgacaaggagttttctggttcagaccgtagacagagaggccgagaaggaccagttcagtttgaggaagatccttttggtttggacaagtttttggaagaagccaaacagcatggtggctctaaaagaccctcagatagcagccgccccaaggaacacgagcatgaaggcaagaagaggaggaaggaataggcacaggtctctccaaagtgaatgaactcttacccataaccctaatgatgcaagtcatatgggggaacactttgtaaatggtcaggataaaaaccaaatctgggtgccagatcccagcactactttttattactggagaaatgggggggatagaaaattctactttgaattatttagttttttttaaagagtgggttgtgtttgtgcttctcccacctttcagcatttatagaacatgctgccccacatacaaagtcaagaccacttacttttatgtgacactagtagtttggggttaatgttttgtgtaagaacagctgcatatgagtaaagttaccccaaccacagtgaggaggaagatgttcacatactggaactgtcctgccaaataaattttgcccctattgtgctctgttttaatttggagtgggcaaagtaacctcttgcttggtgcaactatttgtttcaaataaaaacatttagacaaaaaaaaacagttatg

SEQ ID NO: 311269 - DNA, 1892 bp, Homo sapiens
aacttagagaaatggcccagaaagccagggaaagaagagctgggatcaaaactcatgtggaaaaattaaatatgatgcaattgctcgacaaggacagtcaaaagacaaggtcatttatagcaaatacactgacctggttccaaaggaggttatgaatgcagatgatccagacctgcaaaggcccgatgaagaagctattaaagagataacagaaaagacaagagtagccttagaaaaatctgtatcacagaaggtcgccgcagccatgccagttcgagcagctgacaaattggctcctgctcagtatatccgatacacaccatctcagcaaggagtggcattcaactctggagctaaacagagggttattcggatggtagaaatgcagaaagatccaatggagcctccaaggttcaagattaataagaaaattccccggggaccaccttctcctcctgcgcctgtcatgcattctcctagccgaaagatgactgtaaaggaacaacaagagtggaagattcctccttgtatttctaactggaaaaatgcaaagggttatacaattccattagacaaacgtctggctgctgatggaagaggactacagacagtacacataaatgaaaatttcgccaaattggcagaagccctctacattgctgatcggaaggctcgtgaagctgtggaaatgcgtgcccaagtagagagaaaaatggctcagaaagaaaaggaaaaacatgaagagaaacttagagaaatggcccagaaagccagggagagaagagctgggatcaaaactcatgtggaaaaagaggatggggaggcacgtgagagggatgaaatccggcatgacaggcgaaaagagagacagcatgaccggaatctttccagggcagctcctgataagaggtcgaaacttcagagaaatgaaaatcgggatatcagtgaagttattgctctcggtgttcctaatcctcggacttccaatgaagttcagtatgaccaaaggctcttcaaccaatccaagggtatggacagtggatttgcaggtggagaagatgaaatttataatgtttatgatcaagcctggagaggtggtaaagatatggcccagagtatttataggcccagtaaaaatctggacaaggacatgtatggtgatgacctagaagccagaataaagaccaacagatttgttcccgacaaggagttttctggttcagaccgtagacagagaggccgagaaggaccagttcagtttgaggaagatccttttggtttggacaagtttttggaagaagccaaacagcatggtggctctaaaagaccctcagatagcagccgccccaaggaacacgagcatgaaggcaagaagaggaggaaggaataggcacaggtctctccaaagtgaatgaactcttacccataaccctaatgatgcaagtcatatgggggaacactttgtaaatggtcaggataaaaaccaaatctgggtgccagatcccagcactactttttattactggagaaatgggggggatagaaaattctactttgaattatttagttttttttaaagagtgggttgtgtttgtgcttctcccacctttcagcatttatagaacatgctgccccacatacaaagtcaagaccacttacttttatgtgacactagtagtttggggttaatgttttgtgtaagaacagctgcatatgagtaaagttaccccaaccacagtgaggaggaagatgttcacatactggaactgtcctgccaaataaattttgcccctattgtgctctgttttaatttggagtgggcaaagtaacctcttgcttggtgcaactatttgtttcaaataaaaacatttagacaaaaaaaaacagttatg

SEQ ID NO: 311270 - DNA, 2131 bp, Homo sapiens
  misc_feature (21)..(21): n is a, c, g, or t
  misc_feature (36)..(36): n is a, c, g, or t
  misc_feature (53)..(53): n is a, c, g, or t
  misc_feature (121)..(121): n is a, c, g, or t
  misc_feature (132)..(132): n is a, c, g, or t
  misc_feature (143)..(144): n is a, c, g, or t
  misc_feature (146)..(147): n is a, c, g, or t
  misc_feature (156)..(156): n is a, c, g, or t
  misc_feature (172)..(172): n is a, c, g, or t
  misc_feature (183)..(184): n is a, c, g, or t
  misc_feature (191)..(191): n is a, c, g, or t
  misc_feature (193)..(193): n is a, c, g, or t
  misc_feature (198)..(198): n is a, c, g, or t
  misc_feature (204)..(204): n is a, c, g, or t
  misc_feature (211)..(212): n is a, c, g, or t
  misc_feature (234)..(234): n is a, c, g, or t
  misc_feature (315)..(315): n is a, c, g, or t
  misc_feature (323)..(323): n is a, c, g, or t
  misc_feature (334)..(334): n is a, c, g, or t
  misc_feature (359)..(359): n is a, c, g, or t
  misc_feature (371)..(371): n is a, c, g, or t
  misc_feature (382)..(382): n is a, c, g, or t
  misc_feature (394)..(394): n is a, c, g, or t
  misc_feature (415)..(415): n is a, c, g, or t
  misc_feature (427)..(427): n is a, c, g, or t
  misc_feature (435)..(435): n is a, c, g, or t
ctggaagaagcggaagaaganggcgctaaaaagctntattaaatgaacataancaactaaataaggaccaaaatgaagctgaaaaaaaagaaaaaaaacaaaaaaaaaggaaaaaatcaanggtaacatcangaaaaaaaaannanncgtaagganaaaggaaaagatgganaaatcggttannaaaagantntgganaaggangtgcttnnaaaaaaaaaaaagtggccaaanaaaaaatggaaaagggaaaaaaaaaaaaaaagtagaaagcgctggcaaataaagtggaatataaaaaaaaaaaaaaaaaanaagaaaangctcgaaaaanaaaataaaaaaaaaaggtaaattanaaaaaaaaaaangaaatggttcnaaagaaagttanaaatgaagaagaaacaaaaangaaaaaaacgangaagaaanattaaagagataacagaaaagacaagagtagccttagaaaaatctgtatcacagaaggtcgccgcagccatgccagttcgagcagctgacaaattggctcctgctcagtatatccgatacacaccatctcagcaaggagtggcattcaactctggagctaaacagagggttattcggatggtagaaatgcagaaagatccaatggagcctccaaggttcaagattaataagaaaattccccggggaccaccttctcctcctgcgcctgtcatgcattctcctagccgaaagatgactgtaaaggaacaacaagagtggaagattcctccttgtatttctaactggaaaaatgcaaagggttatacaattccattagacaaacgtctggctgctgatggaagaggactacagacagtacacataaatgaaaatttcgccaaattggcagaagccctctacattgctgatcggaaggctcgtgaagctgtggaaatgcgtgcccaagtagagagaaaaatggctcagaaagaaaaggaaaaacatgaagagaaacttagagaaatggcccagaaagccagggagagaagagctgggatcaaaactcatgtggaaaaagaggatggggaggcacgtgagagggatgaaatccggcatgacaggcgaaaagagagacagcatgaccggaatctttccagggcagctcctgataagaggtcgaaacttcagagaaatgaaaatcgggatatcagtgaagttattgctctcggtgttcctaatcctcggacttccaatgaagttcagtatgaccaaaggctcttcaaccaatccaagggtatggacagtggatttgcaggtggagaagatgaaatttataatgtttatgatcaagcctggagaggtggtaaagatatggcccagagtatttataggcccagtaaaaatctggacaaggacatgtatggtgatgacctagaagccagaataaagaccaacagatttgttcccgacaaggagttttctggttcagaccgtagacagagaggccgagaaggaccagttcagtttgaggaagatccttttggtttggacaagtttttggaagaagccaaacagcatggtggctctaaaagaccctcagatagcagccgccccaaggaacacgagcatgaaggcaagaagaggaggaaggaataggcacaggtctctccaaagtgaatgaactcttacccataaccctaatgatgcaagtcatatgggggaacactttgtaaatggtcaggataaaaaccaaatctgggtgccagatcccagcactactttttattactggagaaatgggggggatagaaaattctactttgaattatttagttttttttaaagagtgggttgtgtttgtgcttctcccacctttcagcatttatagaacatgctgccccacatacaaagtcaagaccacttacttttatgtgacactagtagtttggggttaatgttttgtgtaagaacagctgcatatgagtaaagttaccccaaccacagtgaggaggaagatgttcacatactggaactgtcctgccaaataaattttgcccctattgtgctctgttttaatttggagtgggcaaagtaacctcttgcttggtgcaactatttgtttcaaataaaaacatttagacaaaaaaaaacagttatg

SEQ ID NO: 311271 - DNA, 1430 bp, Homo sapiens
ctggaaagacccgcccagcggtgctgtcgctcgcgctggaagaagcggaagaagatggcgctcaccagctttttacctgcacctactcagctatctcaggaccagcttgaggctgaagaaaaggcaagatcccagagatcacggcagacctcactggtctcctcccgaagagaacctcccccgtacggataccggaaaggctggatacctcggttattagaggattttggagatggaggtgcttttccagagatccatgtggcccagtatccactggatatgggacgaaagaaaaaaatgtcgaatgcgctggccattcaggtggattctgaaggaaaaattaaatatgatgcaattgctcgacaaggacagtcaaaagacaaggtcatttatagcaaatacactgacctggttccaaaggaggttatgaatgcagatgatccagacctgcaaaggcccgatgaagaagctattaaagagataacagaaaagacaagagtagccttagaaaaatctgtatcacagaaggtcgccgcagccatgccagttcgagcagctgacaaattggctcctgctcagtatatccgatacacaccatctcagcaaggagtggcattcaactctggagctaaacagagggttattcggatggtagaaatgcagaaagatccaatggagcctccaaggttcaagattaataagaaaattccccggggaccaccttctcctcctgcgcctgtcatgcattctcctagccgaaagatgactgtaaaggaacaacaagagtggaagattcctccttgtatttctaactggaaaaatgcaaagggttatacaattccattagacaaacgtctggctgctgatggaagaggactacagacagtacacataaatgaaaatttcgccaaattggcagaagccctctacattgctgatcggaaggctcgtgaagctgtggaaatgcgtgcccaagtagagagaaaaatggctcagaaagaaaaggaaaaacatgaagagaaacttagagaaatggcccagaaagccagggagagaagagctgggatcaaaactcatgtggaaaaagaggatggggaggcacgtgagagggatgaaatccggcatgacaggcgaaaagagagacagcatgaccggaatctttccagggcagctcctgataagaggtcgaaacttcagagaaatgaaaatcgggatatcagtgaagttattgctctcggtgttcctaatcctcggacttccaatgaagttcagtatgaccaaaggctcttcaaccaatccaagggtatgcccgtggatttgcggtggagaaagatgaaattttaggtttgatcagccggggaagggggagatatggccagttttttggccgaaactgggcaggcgttgtgggacaacaaaaacaatgtcca

SEQ ID NO: 311272 - DNA, 148 bp, Homo sapiens
aatgtaaactccacaagaggcagggaactctgctgtatctctagcatctagcatactaaggactcaacaattacttgttgaatgaatgaatatatcttgaatgtcaaatgatgattaactattttatttaactacttctaatgtgtag

SEQ ID NO: 311273 - DNA, 143 bp, Homo sapiens
ataacagaaaagacaagagtagccttagaaaaatctgtatcacagaaggtcgccgcagccatgccagttcgagcagctgacaaattggctcctgctcagtatatccggtatgaatcatgcctagaagacttagtttcattctg

SEQ ID NO: 311274 - DNA, 545 bp, Homo sapiens
ccagcctgggtgacagagtgagatgctgtctctttttaaaaaattatatatatacacacgtgtacacgtatgcacacatataatacatattacagtgaagtacttttcaactgttcacacagaggatggggaggcacgtgagagggatgaaatccggcatgacaggcgaaaagagagacagcatgaccggaatctttccagggcagctcctgataagaggtaggtgttatttaagatgtgtaccaatcatggtggccgggcgcagtggttcacccctgtaatcccagcactttgggaggccaatgcgggcggatcacgaggtcaggagatcgagaccatcctggctaacacgatgaaaccctgtgtctactaaaagtacaaaaaattagccgggcatggtcgtggcaggcgcctgtagtcccagctacttggcaggctgaggcaggagaatggcgtgaacccgggaggtggagcttgcagtgagccgagatcacgccactgcattccagcctgggcgacagagcgagactccatctcacaaaaaa

SEQ ID NO: 311275 - DNA, 2070 bp, Homo sapiens
ctggaaagacccgcccagcggtgctgtcgctcgcgctggaagaagcggaagaagatggcgctcaccagctttttacctgcacctactcagctatctcaggaccagcttgaggctgaagaaaaggcaagatcccagagatcacggcagacctcactggtctcctcccgaagagaacctcccccgtacggataccggaaaggctggatacctcggttattagaggattttggagatggaggtgcttttccagagatccatgtggcccagtatccactggatatgggacgaaagaaaaaaatgtcgaatgcgctggccattcaggtggattctgaaggaaaaattaaatatgatgcaattgctcgacaaggacagtcaaaagacaaggtcatttatagcaaatacactgacctggttccaaaggaggttatgaatgcagatgatccagacctgcaaaggcccgatgaagaagctattaaagagataacagaaaagacaagagtagccttagaaaaatctgtatcacagaaggtcgccgcagccatgccagttcgagcagctgacaaattggctcctgctcagtatatccgatacacaccatctcagcaaggagtggcattcaactctggagctaaacagagggttattcggatggtagaaatgcagaaagatccaatggagcctccaaggttcaagattaataagaaaattccccggggaccaccttctcctcctgcgcctgtcatgcattctcctagccgaaagatgactgtaaaggaacaacaagagtggaagattcctccttgtatttctaactggaaaaatgcaaagggttatacaattccattagacaaacgtctggctgctgatggaagaggactacagacagtacacataaatgaaaatttcgccaaattggcagaagccctctacattgctgatcggaaggctcgtgaagctgtggaaatgcgtgcccaagtagagagaaaaatggctcagaaagaaaaggaaaaacatgaagagaaacttagagaaatggcccagaaagccagggagagaagagctgggatcaaaactcatgtggaaaaaggtcgaaacttcagagaaatgaaaatcgggatatcagtgaagttattgctctcggtgttcctaatcctcggacttccaatgaagttcagtatgaccaaaggctcttcaaccaatccaagggtatggacagtggatttgcaggtggagaagatgaaatttataatgtttatgatcaagcctggagaggtggtaaagatatggcccagagtatttataggcccagtaaaaatctggacaaggacatgtatggtgatgacctagaagccagaataaagaccaacagatttgttcccgacaaggagttttctggttcagaccgtagacagagaggccgagaaggaccagttcagtttgaggaagatccttttggtttggacaagtttttggaagaagccaaacagcatggtggctctaaaagaccctcagatagcagccgccccaaggaacacgagcatgaaggcaagaagaggaggaaggaataggcacaggtctctccaaagtgaatgaactcttacccataaccctaatgatgcaagtcatatgggggaacactttgtaaatggtcaggataaaaaccaaatctgggtgccagatcccagcactactttttattactggagaaatgggggggatagaaaattctactttgaattatttagttttttttaaagagtgggttgtgtttgtgcttctcccacctttcagcatttatagaacatgctgccccacatacaaagtcaagaccacttacttttatgtgacactagtagtttggggttaatgttttgtgtaagaacagctgcatatgagtaaagttaccccaaccacagtgaggaggaagatgttcacatactggaactgtcctgccaaataaattttgcccctattgtgctctgttttaatttggagtgggcaaagtaacctcttgcttggtgcaactatttgtttcaaataaaaacatttagacaaaaaaaaacagttatg

SEQ ID NO: 311276 - DNA, 2128 bp, Homo sapiens
ctggaaagacccgcccagcggtgctgtcgctcgcgctggaagaagcggaagaagatggcgctcaccagctttttacctgcacctactcagctatctcaggaccagcttgaggctgaagaaaaggcaagatcccagagatcacggcagacctcactggtctcctcccgaagagaacctcccccgtacggataccggaaaggctggatacctcggttattagaggattttggagatggaggtgcttttccagagatccatgtggcccagtatccactggatatgggacgaaagaaaaaaatgtcgaatgcgctggccattcaggtggattctgaaggaaaaattaaatatgatgcaattgctcgacaaggacagtcaaaagacaaggttatgaatgcagatgatccagacctgcaaaggcccgatgaagaagctattaaagagataacagaaaagacaagagtagccttagaaaaatctgtatcacagaaggtcgccgcagccatgccagttcgagcagctgacaaattggctcctgctcagtatatccgatacacaccatctcagcaaggagtggcattcaactctggagctaaacagagggttattcggatggtagaaatgcagaaagatccaatggagcctccaaggttcaagattaataagaaaattccccggggaccaccttctcctcctgcgcctgtcatgcattctcctagccgaaagatgactgtaaaggaacaacaagagtggaagattcctccttgtatttctaactggaaaaatgcaaagggttatacaattccattagacaaacgtctggctgctgatggaagaggactacagacagtacacataaatgaaaatttcgccaaattggcagaagccctctacattgctgatcggaaggctcgtgaagctgtggaaatgcgtgcccaagtagagagaaaaatggctcagaaagaaaaggaaaaacatgaagagaaacttagagaaatggcccagaaagccagggagagaagagctgggatcaaaactcatgtggaaaaagaggatggggaggcacgtgagagggatgaaatccggcatgacaggcgaaaagagagacagcatgaccggaatctttccagggcagctcctgataagaggtcgaaacttcagagaaatgaaaatcgggatatcagtgaagttattgctctcggtgttcctaatcctcggacttccaatgaagttcagtatgaccaaaggctcttcaaccaatccaagggtatggacagtggatttgcaggtggagaagatgaaatttataatgtttatgatcaagcctggagaggtggtaaagatatggcccagagtatttataggcccagtaaaaatctggacaaggacatgtatggtgatgacctagaagccagaataaagaccaacagatttgttcccgacaaggagttttctggttcagaccgtagacagagaggccgagaaggaccagttcagtttgaggaagatccttttggtttggacaagtttttggaagaagccaaacagcatggtggctctaaaagaccctcagatagcagccgccccaaggaacacgagcatgaaggcaagaagaggaggaaggaataggcacaggtctctccaaagtgaatgaactcttacccataaccctaatgatgcaagtcatatgggggaacactttgtaaatggtcaggataaaaaccaaatctgggtgccagatcccagcactactttttattactggagaaatgggggggatagaaaattctactttgaattatttagttttttttaaagagtgggttgtgtttgtgcttctcccacctttcagcatttatagaacatgctgccccacatacaaagtcaagaccacttacttttatgtgacactagtagtttggggttaatgttttgtgtaagaacagctgcatatgagtaaagttaccccaaccacagtgaggaggaagatgttcacatactggaactgtcctgccaaataaattttgcccctattgtgctctgttttaatttggagtgggcaaagtaacctcttgcttggtgcaactatttgtttcaaataaaaacatttagacaaaaaaaaacagttatg

SEQ ID NO: 311277 - DNA, 2113 bp, Homo sapiens
ctggaaagacccgcccagcggtgctgtcgctcgcgctggaagaagcggaagaagatggcgctcaccagctttttacctgcacctactcagctatctcaggaccagcttgaggctgaagaaaaggcaagatcccagagatcacggcagacctcactggtctcctcccgaagagaacctcccccgtacggataccggaaaggctggatacctcggttattagaggattttggagatggaggtgcttttccagagatccatgtggcccagtatccactggatatgggacgaaagaaaaaaatgtcgaatgcgctggccattcaggtggattctgaaggaaaaattaaatatgatgcaattgctcgacaaggacagtcaaaagacaaggtcatttatagcaaatacactgacctggttccaaaggaggttatgaatgcagatgatccagacctgcaaaggcccgatgaagaagctattaaagagataacagaaaagacaagagtagccttagaaaaatctgtatcacagaaggtcgccgcagccatgccagttcgagcagctgacaaattggctcctgctcagtatatccgatacacaccatctcagcaaggagtggcattcaactctggagctaaacagagggttattcggatggtagaaatgcagaaagatccaatggagcctccaaggttcaagattaataagaaaattccccggggaccaccttctcctcctgcgcctgtcatgcattctcctagccgaaagatgactgtaaaggaacaacaagagtggaagattcctccttgtatttctaactggaaaaatgcaaagggttatacaattccattagacaaacgtctggctgctgatggaagaggactacagacagtacacataaatgaaaatttcgccaaattggcagaagccctctacattgctgatcggaaggctcgtgaagctgtggaaatgcgtgcccaagtagagagaaaaatggctcagaaagaaaaggaaaaacatgaagagaaacttagagaaatggcccagaaagccagggagagaagagctgggatcaaaactcatgtggaaaaagaggatggggaggcacgtgagagggatgaaatccggcatgacaggcgaaaagagagacagcatgaccggaatctttccagggcagctcctgataagaggtcgaaacttcagagaaatgaaaatcgggatatcagtgaagttattgctctcggtgttcctaatcctcggacttccaatgaagttcagtatgaccaaaggctcttcaaccaatccaagggtatggacagtggatttgcaggtggagaagatgaaatttataatgtttatgatcaagcctggagaggtggtaaagatatggcccagagtatttataggcccagtaaaaatctggacaaggacatgtatggtgatgacctagaagccagaataaagaccaacagatttgttcccgacaaggagttttctggttcagaccgtagacagagaggccgagaaggaccagttcagtttgaggaagatccttttggtttggacaagtttttggaagaagccaaacagcatggtggctctaaaagaccctcagatagcagccgccccaaggaacacgagcatgaaggcaagaagaggaggaaggaataggcacaggtctctccaaagtgaatgaactcttacccataaccctaatgatgcaagtcatatgggggaacactttgtaaatggtcaggataaaaaccaaatctgggtgccagatcccagcactactttttattactggagaaatgggggggatagttctcccacctttcagcatttatagaacatgctgccccacatacaaagtcaagaccacttacttttatgtgacactagtagtttggggttaatgttttgtgtaagaacagctgcatatgagtaaagttaccccaaccacagtgaggaggaagatgttcacatactggaactgtcctgccaaataaattttgcccctattgtgctctgttttaatttggagtgggcaaagtaacctcttgcttggtgcaactatttgtttcaaataaaaacatttagacaaaaaaaaacagttatg

SEQ ID NO: 311278 - DNA, 859 bp, Homo sapiens
  misc_feature (697)..(698): n is a, c, g, or t
ctggaaagacccgcccagcggtgctgtcgctcgcgctggaagaagcggaagaagatggcgctcaccagctttttacctgcacctactcagctatctcaggaccagcttgaggctgaagaaaaggcaagatcccagagatcacggcagacctcactggtctcctcccgaagagaacctcccccgtacggataccggaaaggctggatacctcggttattagaggattttggagatggaggtgcttttccagagatccatgtggcccagtatccactggatatgggacgaaagaaaaaaatgtcgaatgcgctggccattcaggtggattctgaaggaaaaattaaatatgatgcaattgctcgacaaggacagtcaaaagacaaggtcatttatagcaaatacactgacctggttccaaaggaggttatgaatgcagatgatccagacctgcaaaggcccgatgaagaagctattaaagagataacagaaaagacaagagtagccttagaaaaatctgtatcacagaaggtcgccgcagccatgccagttcgagcagctgacaaattggctcctgctcagtatatccgatacacaccatctcagcaaggagtggcattcaactctggagctaaacagagggttattcggatggtagaaatgcagaaagatccaatggagcctccaaggttcaagattnntaaggaaattccaccggggagcactttatcctccagcgtcgactcaagagtttcctttctggaagatgattataaaggtacgacaagagtgtaagattcctcttgttatatttatctgatgtgcgacattgtgagaataccggtcccattccgacgcatgt

SEQ ID NO: 311279 - DNA, 388 bp, Homo sapiens
caaacatttgttggccacctttcaagtgccagacaacccttctaggtatggaggggtacagtgatgagcaagccactgtttctggctgcagagggctcactgtttagtgggagaaacagacaaatcatacatcttaactacactgcccttgattgctctttacctgttatatcagtcgatcttgcctgcctagcatttgttccctgtttgggggcctgtatgatgttcgtttggatacctcagggtacattttcccatctttgtgatgatgtagctcacttggtctgaatgatatgtaatcctgcacatgtagagtgaccattatatttgcataaatagcattggaggaatatataagaaatgaataaaagttgttatatcatttgat

SEQ ID NO: 311280 - DNA, 2572 bp, Homo sapiens
ggcaggaccgaaccgctccttctttaaatatataaatttcagcccaggtcagcctcggcggcccccctcaccgcgctcccggcgccctcccgtcagttcgccagctgccagccccgggaccttttcatctcttcccttttggccggagagccgagttcagatccgccactccgcacccgagactgacacactgaactccacttcctcctcttaaatttatttctacttaatagccactcgtctctttttttccccatctcattgctccaagaatttttttcttcttactcgccaaagtcagggttccctctgcccgtcccgtattaatatttccacttttggaactactggccttttctttttaaaggaattcaagcaggatacgtttttctgttgggcattgactagattgtttgcaaaagtttcgcatcaaaaacaacaacaacaaaaaaccaaacaactctccttgatctatactttgagaattgttgatttcttttttttattctgacttttaaaaacaacttttttttccacttttttaaaaaatgcactactgtgtgctgagcgcttttctgatcctgcatctggtcacggtcgcgctcagcctgtctacctgcagcacactcgatatggaccagttcatgcgcaagaggatcgaggcgatccgcgggcagatcctgagcaagctgaagctcaccagtcccccagaagactatcctgagcccgaggaagtccccccggaggtgatttccatctacaacagcaccagggacttgctccaggagaaggcgagccggagggcggccgcctgcgagcgcgagaggagcgacgaagagtactacgccaaggaggtttacaaaatagacatgccgcccttcttcccctccgaaaatgccatcccgcccactttctacagaccctacttcagaattgttcgatttgacgtctcagcaatggagaagaatgcttccaatttggtgaaagcagagttcagagtctttcgtttgcagaacccaaaagccagagtgcctgaacaacggattgagctatatcagattctcaagtccaaagatttaacatctccaacccagcgctacatcgacagcaaagttgtgaaaacaagagcagaaggcgaatggctctccttcgatgtaactgatgctgttcatgaatggcttcaccataaagacaggaacctgggatttaaaataagcttacactgtccctgctgcacttttgtaccatctaataattacatcatcccaaataaaagtgaagaactagaagcaagatttgcaggtattgatggcacctccacatataccagtggtgatcagaaaactataaagtccactaggaaaaaaaacagtgggaagaccccacatctcctgctaatgttattgccctcctacagacttgagtcacaacagaccaaccggcggaagaagcgtgctttggatgcggcctattgctttagaaatgtgcaggataattgctgcctacgtccactttacattgatttcaagagggatctagggtggaaatggatacacgaacccaaagggtacaatgccaacttctgtgctggagcatgcccgtatttatggagttcagacactcagcacagcagggtcctgagcttatataataccataaatccagaagcatctgcttctccttgctgcgtgtcccaagatttagaacctctaaccattctctactacattggcaaaacacccaagattgaacagctttctaatatgattgtaaagtcttgcaaatgcagctaaaattcttggaaaagtggcaagaccaaaatgacaatgatgatgataatgatgatgacgacgacaacgatgatgcttgtaacaagaaaacataagagagccttggttcatcagtgttaaaaaatttttgaaaaggcggtactagttcagacactttggaagtttgtgttctgtttgttaaaactggcatctgacacaaaaaaagttgaaggccttattctacatttcacctactttgtaagtgagagagacaagaagcaaattttttttaaagaaaaaaataaacactggaagaatttattagtgttaattatgtgaacaacgacaacaacaacaacaacaacaaacaggaaaatcccattaagtggagttgctgtacgtaccgttcctatcccgcgcctcacttgatttttctgtattgctatgcaataggcacccttcccattcttactcttagagttaacagtgagttatttattgtgtgttactatataatgaacgtttcattgcccttggaaaataaaacaggtgtataaagtggagaccaaatactttgccagaaactcatggatggcttaaggaacttgaactcaaacgagccagaaaaaaagaggtcatattaatgggatgaaaacccaagtgagttattatatgaccgagaaagtctgcattaagataaagaccctgaaaacacatgttatgtatcagctgcctaaggaagcttcttgtaaggtccaaaaactaaaaagactgttaataaaagaaactttcagtcagaaaaa

SEQ ID NO: 311281 - DNA, 2259 bp, Homo sapiens
ggcaggaccgaaccgctccttctttaaatatataaatttcagcccaggtcagcctcggcggcccccctcaccgcgctcccggcgccctcccgtcagttcgccagctgccagccccgggaccttttcatctcttcccttttggccggagagccgagttcagatccgccactccgcacccgagactgacacactgaactccacttcctcctcttaaatttatttctacttaatagccactcgtctctttttttccccatctcattgctccaagaatttttttcttcttactcgccaaagtcagggttccctctgcccgtcccgtattaatatttccacttttggaactactggccttttctttttaaaggaattcaagcaggatacgtttttctgttgggcattgactagattgtttgcaaaagtttcgcatcaaaaacaacaacaacaaaaaaccaaacaactctccttgatctatactttgagaattgttgatttcttttttttattctgacttttaaaaacaacttttttttccacttttttaaaaaatgcactactgtgtgctgagcgcttttctgatcctgcatctggtcacggtcgcgctcagcctgtctacctgcagcacactcgatatggaccagttcatgcgcaagaggatcgaggcgatccgcgggcagatcctgagcaagctgaagctcaccagtcccccagaagactatcctgagcccgaggaagtccccccggaggtgatttccatctacaacagcaccagggacttgctccaggagaaggcgagccggagggcggccgcctgcgagcgcgagaggagcgacgaagagtactacgccaaggaggtttacaaaatagacatgccgcccttcttcccctccgaaaatgccatcccgcccactttctacagaccctacttcagaattgttcgatttgacgtctcagcaatggagaagaatgcttccaatttggtgaaagcagagttcagagtctttcgtttgcagaacccaaaagccagagtgcctgaacaacggattgagctatatcagattctcaagtccaaagatttaacatctccaacccagcgctacatcgacagcaaagttgtgaaaacaagagcagaaggcgaatggctctccttcgatgtaactgatgctgttcatgaatggcttcaccataaagacaggaacctgggatttaaaataagcttacactgtccctgctgcacttttgtaccatctaataattacatcatcccaaataaaagtgaagaactagaagcaagatttgcaggtattgatggcacctccacatataccagtggtgatcagaaaactataaagtccactaggaaaaaaaacagtgggaagaccccacatctcctgctaatgttattgccctcctacagacttgagtcacaacagaccaaccggcggaagaagcgtgctttggatgcggcctattgctttagaaatgtgcaggataattgctgcctacgtccactttacattgatttcaagagggatctagggtggaaatggatacacgaacccaaagggtacaatgccaacttctgtgctggagcatgcccgtatttatggagttcagacactcagcacagcagggtcctgagcttatataataccataaatccagaagcatctgcttctccttgctgcgtgtcccaagatttagaacctctaaccattctctactacattggcaaaacacccaagattgaacagctttctaatatgattgtaaagtcttgcaaatgcagctaaaattcttggaaaagtggcaagaccaaaatgacaatgatgatgataatgatgatgacgacgacaacgatgatgcttgtaacaagaaaacataagagagccttggttcatcagtgttaaaaaatttttgaaaaggcggtactagttcagacactttggaagtttgtgttctgtttgttaaaactggcatctgacacaaaaaaagttgaaggccttattctacatttcacctactttgtaagtgagagagacaagaagcaaattttttttaaagaaaaaaataaacactggaagaatttattagtgttaattatgtgaacaacgacaacaacaacaacaacaacaaacaggaaaatcccattaagtggagttgctgtacgtaccgttcctatcccgcgcctcacttgatttttctgtattgctatgcaatagccgcatccaagcgggatcctgctagagtcacctcgct

SEQ ID NO: 311282 - DNA, 1568 bp, Homo sapiens
  misc_feature (29)..(29): n is a, c, g, or t
gcttaataataagactaggctaaaacaanatttaaaacaaaaagcaaaagtttaattctcaagtccaaagatttaacatctccaacccagcgctacatcgacagcaaagttgtgaaaacaagagcagaaggcgaatggctctccttcgatgtaactgatgctgttcatgaatggcttcaccataaagacaggaacctgggatttaaaataagcttacactgtccctgctgcacttttgtaccatctaataattacatcatcccaaataaaagtgaagaactagaagcaagatttgcaggtattgatggcacctccacatataccagtggtgatcagaaaactataaagtccactaggaaaaaaaacagtgggaagaccccacatctcctgctaatgttattgccctcctacagacttgagtcacaacagaccaaccggcggaagaagcgtgctttggatgcggcctattgctttagaaatgtgcaggataattgctgcctacgtccactttacattgatttcaagagggatctagggtggaaatggatacacgaacccaaagggtacaatgccaacttctgtgctggagcatgcccgtatttatggagttcagacactcagcacagcagggtcctgagcttatataataccataaatccagaagcatctgcttctccttgctgcgtgtcccaagatttagaacctctaaccattctctactacattggcaaaacacccaagattgaacagctttctaatatgattgtaaagtcttgcaaatgcagctaaaattcttggaaaagtggcaagaccaaaatgacaatgatgatgataatgatgatgacgacgacaacgatgatgcttgtaacaagaaaacataagagagccttggttcatcagtgttaaaaaatttttgaaaaggcggtactagttcagacactttggaagtttgtgttctgtttgttaaaactggcatctgacacaaaaaaagttgaaggccttattctacatttcacctactttgtaagtgagagagacaagaagcaaattttttttaaagaaaaaaataaacactggaagaatttattagtgttaattatgtgaacaacgacaacaacaacaacaacaacaaacaggaaaatcccattaagtggagttgctgtacgtaccgttcctatcccgcgcctcacttgatttttctgtattgctatgcaataggcacccttcccattcttactcttagagttaacagtgagttatttattgtgtgttactatataatgaacgtttcattgcccttggaaaataaaacaggtgtataaagtggagaccaaatactttgccagaaactcatggatggcttaaggaacttgaactcaaacgagccagaaaaaaagaggtcatattaatgggatgaaaacccaagtgagttattatatgaccgagaaagtctgcattaagataaagaccctgaaaacacatgttatgtatcagctgcctaaggaagcttcttgtaaggtccaaaaactaaaaagactgttaataaaagaaactttcagtcagaaaaa

SEQ ID NO: 311283 - DNA, 1576 bp, Homo sapiens
  misc_feature (61)..(61): n is a, c, g, or t
actcatacacttagttatttttagataatagcgacttaactcgaagacacccggcttttantattctcaagtccaaagatttaacatctccaacccagcgctacatcgacagcaaagttgtgaaaacaagagcagaaggcgaatggctctccttcgatgtaactgatgctgttcatgaatggcttcaccataaagacaggaacctgggatttaaaataagcttacactgtccctgctgcacttttgtaccatctaataattacatcatcccaaataaaagtgaagaactagaagcaagatttgcaggtattgatggcacctccacatataccagtggtgatcagaaaactataaagtccactaggaaaaaaaacagtgggaagaccccacatctcctgctaatgttattgccctcctacagacttgagtcacaacagaccaaccggcggaagaagcgtgctttggatgcggcctattgctttagaaatgtgcaggataattgctgcctacgtccactttacattgatttcaagagggatctagggtggaaatggatacacgaacccaaagggtacaatgccaacttctgtgctggagcatgcccgtatttatggagttcagacactcagcacagcagggtcctgagcttatataataccataaatccagaagcatctgcttctccttgctgcgtgtcccaagatttagaacctctaaccattctctactacattggcaaaacacccaagattgaacagctttctaatatgattgtaaagtcttgcaaatgcagctaaaattcttggaaaagtggcaagaccaaaatgacaatgatgatgataatgatgatgacgacgacaacgatgatgcttgtaacaagaaaacataagagagccttggttcatcagtgttaaaaaatttttgaaaaggcggtactagttcagacactttggaagtttgtgttctgtttgttaaaactggcatctgacacaaaaaaagttgaaggccttattctacatttcacctactttgtaagtgagagagacaagaagcaaattttttttaaagaaaaaaataaacactggaagaatttattagtgttaattatgtgaacaacgacaacaacaacaacaacaacaaacaggaaaatcccattaagtggagttgctgtacgtaccgttcctatcccgcgcctcacttgatttttctgtattgctatgcaataggcacccttcccattcttactcttagagttaacagtgagttatttattgtgtgttactatataatgaacgtttcattgcccttggaaaataaaacaggtgtataaagtggagaccaaatactttgccagaaactcatggatggcttaaggaacttgaactcaaacgagccagaaaaaaagaggtcatattaatgggatgaaaacccaagtgagttattatatgaccgagaaagtctgcattaagataaagaccctgaaaacacatgttatgtatcagctgcctaaggaagcttcttgtaaggtccaaaaactaaaaagactgttaataaaagaaactttcagtcagaaaaa

SEQ ID NO: 311284 - DNA, 1572 bp, Homo sapiens
tctgatacatatcattaattaattttacgcattgagcttataataagtatattacttaattctcaagtccaaagatttaacatctccaacccagcgctacatcgacagcaaagttgtgaaaacaagagcagaaggcgaatggctctccttcgatgtaactgatgctgttcatgaatggcttcaccataaagacaggaacctgggatttaaaataagcttacactgtccctgctgcacttttgtaccatctaataattacatcatcccaaataaaagtgaagaactagaagcaagatttgcaggtattgatggcacctccacatataccagtggtgatcagaaaactataaagtccactaggaaaaaaaacagtgggaagaccccacatctcctgctaatgttattgccctcctacagacttgagtcacaacagaccaaccggcggaagaagcgtgctttggatgcggcctattgctttagaaatgtgcaggataattgctgcctacgtccactttacattgatttcaagagggatctagggtggaaatggatacacgaacccaaagggtacaatgccaacttctgtgctggagcatgcccgtatttatggagttcagacactcagcacagcagggtcctgagcttatataataccataaatccagaagcatctgcttctccttgctgcgtgtcccaagatttagaacctctaaccattctctactacattggcaaaacacccaagattgaacagctttctaatatgattgtaaagtcttgcaaatgcagctaaaattcttggaaaagtggcaagaccaaaatgacaatgatgatgataatgatgatgacgacgacaacgatgatgcttgtaacaagaaaacataagagagccttggttcatcagtgttaaaaaatttttgaaaaggcggtactagttcagacactttggaagtttgtgttctgtttgttaaaactggcatctgacacaaaaaaagttgaaggccttattctacatttcacctactttgtaagtgagagagacaagaagcaaattttttttaaagaaaaaaataaacactggaagaatttattagtgttaattatgtgaacaacgacaacaacaacaacaacaacaaacaggaaaatcccattaagtggagttgctgtacgtaccgttcctatcccgcgcctcacttgatttttctgtattgctatgcaataggcacccttcccattcttactcttagagttaacagtgagttatttattgtgtgttactatataatgaacgtttcattgcccttggaaaataaaacaggtgtataaagtggagaccaaatactttgccagaaactcatggatggcttaaggaacttgaactcaaacgagccagaaaaaaagaggtcatattaatgggatgaaaacccaagtgagttattatatgaccgagaaagtctgcattaagataaagaccctgaaaacacatgttatgtatcagctgcctaaggaagcttcttgtaaggtccaaaaactaaaaagactgttaataaaagaaactttcagtcagaaaaa

SEQ ID NO: 311285 - DNA, 462 bp, Homo sapiens
gtaagtacttattttgacttccatcccctgaggtttagctctgcccggagctctcaaaaccgcagcagctcccgggatcgcccttccctctcgcggttcccgttcgctcttttcccgttctcctgtccttcaccccaccacctccttttcagttgtatgcttgaggccatcaggctttaaaatgtttactttctactttattttctccatctttcccttccccctaacaattcggtgctttaaaaggcgttattctctttttctcttccctgaagttctttagtcggccaccagctaggagtcagccccactctgtcaaactagaggtgctcccaggggcagagttaaactgaggaatcttggtaggtttgttttctttgctccgattggcgtggagcgcgccgaactggtgcacgaagggttaaaaaaagtgtctcaaaactagcctctccggaaggcgcc

SEQ ID NO: 311286 - DNA, 2656 bp, Homo sapiens
ggcaggaccgaaccgctccttctttaaatatataaatttcagcccaggtcagcctcggcggcccccctcaccgcgctcccggcgccctcccgtcagttcgccagctgccagccccgggaccttttcatctcttcccttttggccggagagccgagttcagatccgccactccgcacccgagactgacacactgaactccacttcctcctcttaaatttatttctacttaatagccactcgtctctttttttccccatctcattgctccaagaatttttttcttcttactcgccaaagtcagggttccctctgcccgtcccgtattaatatttccacttttggaactactggccttttctttttaaaggaattcaagcaggatacgtttttctgttgggcattgactagattgtttgcaaaagtttcgcatcaaaaacaacaacaacaaaaaaccaaacaactctccttgatctatactttgagaattgttgatttcttttttttattctgacttttaaaaacaacttttttttccacttttttaaaaaatgcactactgtgtgctgagcgcttttctgatcctgcatctggtcacggtcgcgctcagcctgtctacctgcagcacactcgatatggaccagttcatgcgcaagaggatcgaggcgatccgcgggcagatcctgagcaagctgaagctcaccagtcccccagaagactatcctgagcccgaggaagtccccccggaggtgatttccatctacaacagcaccagggacttgctccaggagaaggcgagccggagggcggccgcctgcgagcgcgagaggagcgacgaagagtactacgccaaggaggtttacaaaatagacatgccgcccttcttcccctccgaaactgtctgcccagttgttacaacaccctctggctcagtgggcagcttgtgctccagacagtcccaggtgctctgtgggtaccttgatgccatcccgcccactttctacagaccctacttcagaattgttcgatttgacgtctcagcaatggagaagaatgcttccaatttggtgaaagcagagttcagagtctttcgtttgcagaacccaaaagccagagtgcctgaacaacggattgagctatatcagattctcaagtccaaagatttaacatctccaacccagcgctacatcgacagcaaagttgtgaaaacaagagcagaaggcgaatggctctccttcgatgtaactgatgctgttcatgaatggcttcaccataaagacaggaacctgggatttaaaataagcttacactgtccctgctgcacttttgtaccatctaataattacatcatcccaaataaaagtgaagaactagaagcaagatttgcaggtattgatggcacctccacatataccagtggtgatcagaaaactataaagtccactaggaaaaaaaacagtgggaagaccccacatctcctgctaatgttattgccctcctacagacttgagtcacaacagaccaaccggcggaagaagcgtgctttggatgcggcctattgctttagaaatgtgcaggataattgctgcctacgtccactttacattgatttcaagagggatctagggtggaaatggatacacgaacccaaagggtacaatgccaacttctgtgctggagcatgcccgtatttatggagttcagacactcagcacagcagggtcctgagcttatataataccataaatccagaagcatctgcttctccttgctgcgtgtcccaagatttagaacctctaaccattctctactacattggcaaaacacccaagattgaacagctttctaatatgattgtaaagtcttgcaaatgcagctaaaattcttggaaaagtggcaagaccaaaatgacaatgatgatgataatgatgatgacgacgacaacgatgatgcttgtaacaagaaaacataagagagccttggttcatcagtgttaaaaaatttttgaaaaggcggtactagttcagacactttggaagtttgtgttctgtttgttaaaactggcatctgacacaaaaaaagttgaaggccttattctacatttcacctactttgtaagtgagagagacaagaagcaaattttttttaaagaaaaaaataaacactggaagaatttattagtgttaattatgtgaacaacgacaacaacaacaacaacaacaaacaggaaaatcccattaagtggagttgctgtacgtaccgttcctatcccgcgcctcacttgatttttctgtattgctatgcaataggcacccttcccattcttactcttagagttaacagtgagttatttattgtgtgttactatataatgaacgtttcattgcccttggaaaataaaacaggtgtataaagtggagaccaaatactttgccagaaactcatggatggcttaaggaacttgaactcaaacgagccagaaaaaaagaggtcatattaatgggatgaaaacccaagtgagttattatatgaccgagaaagtctgcattaagataaagaccctgaaaacacatgttatgtatcagctgcctaaggaagcttcttgtaaggtccaaaaactaaaaagactgttaataaaagaaactttcagtcagaaaaa

SEQ ID NO: 311287 - DNA, 2410 bp, Homo sapiens
gttccctgtgtgagaagcactgaccgaccgtgactcgatatccccctggtgaatctttgtgtacttaatagccactcgtctctttttttccccatctcattgctccaagaatttttttcttcttactcgccaaagtcagggttccctctgcccgtcccgtattaatatttccacttttggaactactggccttttctttttaaaggaattcaagcaggatacgtttttctgttgggcattgactagattgtttgcaaaagtttcgcatcaaaaacaacaacaacaaaaaaccaaacaactctccttgatctatactttgagaattgttgatttcttttttttattctgacttttaaaaacaacttttttttccacttttttaaaaaatgcactactgtgtgctgagcgcttttctgatcctgcatctggtcacggtcgcgctcagcctgtctacctgcagcacactcgatatggaccagttcatgcgcaagaggatcgaggcgatccgcgggcagatcctgagcaagctgaagctcaccagtcccccagaagactatcctgagcccgaggaagtccccccggaggtgatttccatctacaacagcaccagggacttgctccaggagaaggcgagccggagggcggccgcctgcgagcgcgagaggagcgacgaagagtactacgccaaggaggtttacaaaatagacatgccgcccttcttcccctccgaaaatgccatcccgcccactttctacagaccctacttcagaattgttcgatttgacgtctcagcaatggagaagaatgcttccaatttggtgaaagcagagttcagagtctttcgtttgcagaacccaaaagccagagtgcctgaacaacggattgagctatatcagattctcaagtccaaagatttaacatctccaacccagcgctacatcgacagcaaagttgtgaaaacaagagcagaaggcgaatggctctccttcgatgtaactgatgctgttcatgaatggcttcaccataaagacaggaacctgggatttaaaataagcttacactgtccctgctgcacttttgtaccatctaataattacatcatcccaaataaaagtgaagaactagaagcaagatttgcaggtattgatggcacctccacatataccagtggtgatcagaaaactataaagtccactaggaaaaaaaacagtgggaagaccccacatctcctgctaatgttattgccctcctacagacttgagtcacaacagaccaaccggcggaagaagcgtgctttggatgcggcctattgctttagaaatgtgcaggataattgctgcctacgtccactttacattgatttcaagagggatctagggtggaaatggatacacgaacccaaagggtacaatgccaacttctgtgctggagcatgcccgtatttatggagttcagacactcagcacagcagggtcctgagcttatataataccataaatccagaagcatctgcttctccttgctgcgtgtcccaagatttagaacctctaaccattctctactacattggcaaaacacccaagattgaacagctttctaatatgattgtaaagtcttgcaaatgcagctaaaattcttggaaaagtggcaagaccaaaatgacaatgatgatgataatgatgatgacgacgacaacgatgatgcttgtaacaagaaaacataagagagccttggttcatcagtgttaaaaaatttttgaaaaggcggtactagttcagacactttggaagtttgtgttctgtttgttaaaactggcatctgacacaaaaaaagttgaaggccttattctacatttcacctactttgtaagtgagagagacaagaagcaaattttttttaaagaaaaaaataaacactggaagaatttattagtgttaattatgtgaacaacgacaacaacaacaacaacaacaaacaggaaaatcccattaagtggagttgctgtacgtaccgttcctatcccgcgcctcacttgatttttctgtattgctatgcaataggcacccttcccattcttactcttagagttaacagtgagttatttattgtgtgttactatataatgaacgtttcattgcccttggaaaataaaacaggtgtataaagtggagaccaaatactttgccagaaactcatggatggcttaaggaacttgaactcaaacgagccagaaaaaaagaggtcatattaatgggatgaaaacccaagtgagttattatatgaccgagaaagtctgcattaagataaagaccctgaaaacacatgttatgtatcagctgcctaaggaagcttcttgtaaggtccaaaaactaaaaagactgttaataaaagaaactttcagtcagaaaaa

SEQ ID NO: 311288 - DNA, 1634 bp, Homo sapiens
ggcaggaccgaaccgctccttctttaaatatataaatttcagcccaggtcagcctcggcggcccccctcaccgcgctcccggcgccctcccgtcagttcgccagctgccagccccgggaccttttcatctcttcccttttggccggagagccgagttcagatccgccactccgcacccgagactgacacactgaactccacttcctcctcttaaatttatttctacttaatagccactcgtctctttttttccccatctcattgctccaagaatttttttcttcttactcgccaaagtcagggttccctctgcccgtcccgtattaatatttccacttttggaactactggccttttctttttaaaggaattcaagcaggatacgtttttctgttgggcattgactagattgtttgcaaaagtttcgcatcaaaaacaacaacaacaaaaaaccaaacaactctccttgatctatactttgagaattgttgatttcttttttttattctgacttttaaaaacaacttttttttccacttttttaaaaaatgcactactgtgtgctgagcgcttttctgatcctgcatctggtcacggtcgcgctcagcctgtctacctgcagcacactcgatatggaccagttcatgcgcaagaggatcgaggcgatccgcgggcagatcctgagcaagctgaagctcaccagtcccccagaagactatcctgagcccgaggaagtccccccggaggtgatttccatctacaacagcaccagggacttgctccaggagaaggcgagccggagggcggccgcctgcgagcgcgagaggagcgacgaagagtactacgccaaggaggtttacaaaatagacatgccgcccttcttcccctccgaaactgtctgcccagttgttacaacaccctctggctcagtgggcagcttgtgctccagacagtcccaggtgctctgtgggtaccttgatgccatcccgcccactttctacagaccctacttcagaattgttctgtttgttaaaactggcatctgacacaaaaaaagttgaaggccttattctacatttcacctactttgtaagtgagagagacaagaagcaaattttttttaaagaaaaaaataaacactggaagaatttattagtgttaattatgtgaacaacgacaacaacaacaacaacaacaaacaggaaaatcccattaagtggagttgctgtacgtaccgttcctatcccgcgcctcacttgatttttctgtattgctatgcaataggcacccttcccattcttactcttagagttaacagtgagttatttattgtgtgttactatataatgaacgtttcattgcccttggaaaataaaacaggtgtataaagtggagaccaaatactttgccagaaactcatggatggcttaaggaacttgaactcaaacgagccagaaaaaaagaggtcatattaatgggatgaaaacccaagtgagttattatatgaccgagaaagtctgcattaagataaagaccctgaaaacacatgttatgtatcagctgcctaaggaagcttcttgtaaggtccaaaaactaaaaagactgttaataaaagaaactttcagtcagaaaaa

SEQ ID NO: 311289 - DNA, 1567 bp, Homo sapiens
  misc_feature (42)..(42): n is a, c, g, or t
  misc_feature (46)..(47): n is a, c, g, or t
  misc_feature (52)..(52): n is a, c, g, or t
actcaatacttcagtattttgcgaaaatgatgagaacaaaangcgnncttantattctcaagtccaaagatttaacatctccaacccagcgctacatcgacagcaaagttgtgaaaacaagagcagaaggcgaatggctctccttcgatgtaactgatgctgttcatgaatggcttcaccataaagacaggaacctgggatttaaaataagcttacactgtccctgctgcacttttgtaccatctaataattacatcatcccaaataaaagtgaagaactagaagcaagatttgcaggtattgatggcacctccacatataccagtggtgatcagaaaactataaagtccactaggaaaaaaaacagtgggaagaccccacatctcctgctaatgttattgccctcctacagacttgagtcacaacagaccaaccggcggaagaagcgtgctttggatgcggcctattgctttagaaatgtgcaggataattgctgcctacgtccactttacattgatttcaagagggatctagggtggaaatggatacacgaacccaaagggtacaatgccaacttctgtgctggagcatgcccgtatttatggagttcagacactcagcacagcagggtcctgagcttatataataccataaatccagaagcatctgcttctccttgctgcgtgtcccaagatttagaacctctaaccattctctactacattggcaaaacacccaagattgaacagctttctaatatgattgtaaagtcttgcaaatgcagctaaaattcttggaaaagtggcaagaccaaaatgacaatgatgatgataatgatgatgacgacgacaacgatgatgcttgtaacaagaaaacataagagagccttggttcatcagtgttaaaaaatttttgaaaaggcggtactagttcagacactttggaagtttgtgttctgtttgttaaaactggcatctgacacaaaaaaagttgaaggccttattctacatttcacctactttgtaagtgagagagacaagaagcaaattttttttaaagaaaaaaataaacactggaagaatttattagtgttaattatgtgaacaacgacaacaacaacaacaacaacaaacaggaaaatcccattaagtggagttgctgtacgtaccgttcctatcccgcgcctcacttgatttttctgtattgctatgcaataggcacccttcccattcttactcttagagttaacagtgagttatttattgtgtgttactatataatgaacgtttcattgcccttggaaaataaaacaggtgtataaagtggagaccaaatactttgccagaaactcatggatggcttaaggaacttgaactcaaacgagccagaaaaaaagaggtcatattaatgggatgaaaacccaagtgagttattatatgaccgagaaagtctgcattaagataaagaccctgaaaacacatgttatgtatcagctgcctaaggaagcttcttgtaaggtccaaaaactaaaaagactgttaataaaagaaactttcagtcagaaaaa

SEQ ID NO: 311290 - DNA, 1289 bp, Homo sapiens
ggcaggaccgaaccgctccttctttaaatatataaatttcagcccaggtcagcctcggcggcccccctcaccgcgctcccggcgccctcccgtcagttcgccagctgccagccccgggaccttttcatctcttcccttttggccggagagccgagttcagatccgccactccgcacccgagactgacacactgaactccacttcctcctcttaaatttatttctacttaatagccactcgtctctttttttccccatctcattgctccaagaatttttttcttcttactcgccaaagtcagggttccctctgcccgtcccgtattaatatttccacttttggaactactggccttttctttttaaaggaattcaagcaggatacgtttttctgttgggcattgactagattgtttgcaaaagtttcgcatcaaaaacaacaacaacaaaaaaccaaacaactctccttgatctatactttgagaattgttgatttcttttttttattctgacttttaaaaacaacttttttttccacttttttaaaaaatgcactactgtgtgctgagcgcttttctgatcctgcatctggtcacggtcgcgctcagcctgtctacctgcagcacactcgatatggaccagttcatgcgcaagaggatcgaggcgatccgcgggcagatcctgagcaagctgaagctcaccagtcccccagaagactatcctgagcccgaggaagtccccccggaggtgatttccatctacaacagcaccagggacttgctccaggagaaggcgagccggagggcggccgcctgcgagcgcgagaggagcgacgaagagtactacgccaaggaggtttacaaaatagacatgccgcccttcttcccctccgaaaatgccatcccgcccactttctacagaccctacttcagaattgttcgatttgacgtctcagcaatggagaagaatgcttccaatttggtgaaagcagagttcagagtctttcgtttgcagaacccaaaagccagagtgcctgaacaacggattgagctatatcagattctcaagtccaaagatttaacatctccaacccagcgctacatcgacagcaaagttgtgaaaacaagagcagaaggcgaatggctctccttcgatgtaactgatgctgttcatgaatggcttcaccataaaggttacaagccactctctcttttcctcccaagatgttcagtatccctaagttactttaaattgattgcagatttaagggtatagacacacatacaaatg

SEQ ID NO: 311291 - DNA, 415 bp, Homo sapiens
gatcccctgcgcgcgcctgcgcgctcggtgacctttccgagttggctgcagatttgtggtgcgttctgagccgtctgtcctgcgccaagatgcttcaaagtattattaaaaacatatggatccccatgaagccctactacaccaaagtttaccaggagatttggataggaatggggctgatgggcttcatcgtttataaaatccgggctgctgataaaagaagtaaggctttgaaagcttcagcgcctgctcctggtcatcactaaccagatttacttggagtacatgtgaaagaaaacgtcagtctgcctgtaaatttcagcaagccgtgttagatggggagcgtggaacgtcactgtacacttgtataagtaccgtttacttcatggcatgaataaatggatctgtgagatgc

SEQ ID NO: 311292 - DNA, 419 bp, Homo sapiens
gggatgagtggaggatgggatgagtggaggatgggatgagtggcgttggctgcagatttgtggtgcgttctgagccgtctgtcctgcgccaagatgcttcaaagtattattaaaaacatatggatccccatgaagccctactacaccaaagtttaccaggagatttggataggaatggggctgatgggcttcatcgtttataaaatccgggctgctgataaaagaagtaaggctttgaaagcttcagcgcctgctcctggtcatcactaaccagatttacttggagtacatgtgaaagaaaacgtcagtctgcctgtaaatttcagcaagccgtgttagatggggagcgtggaacgtcactgtacacttgtataagtaccgtttacttcatggcatgaataaatggatctgtgagatgc

SEQ ID NO: 311293 - DNA, 671 bp, Homo sapiens
gggatgagtggaggatgggatgagtggaggatgggatgagtggcgttggctgcagatttgtggtgcgttctgagccgtctgtcctgcgccaagatgcttcaaagtattattaaaaacatatggatccccatgaagccctactacaccaaagtttaccaggagatttggataggaatggggctgatgggcttcatcgtttataaaatccgggctgctgataaaagaagtaaggctttgaaagcttcagcgcctgctcctggtcatcactaaccagatttacttggagtacatgtgaaagaaaacgtcagtctgcctgtaaatttcagcaagccgtgttagatggggagcgtggaacgtcactgtacacttgtataagtaccgtttacttcatggcatgaataaatggatctgtgagatgcaaaaaaaaaaaaaaaaaaaaaaaaaaaaaaaaaaaaaaaaaaaaaaaaaaaaaaaaaaaaaaaaaaaaaaaaaaaaaaaaaaaaaaaaaaaaaaaagaaaaaaaaaaaaaaacattttgggccccttgggccaagtggattttagacttgggcaagtttatgattgcggccgaaattggggctacattggccaaatccccttatggggggcggattccaattaattggccggggtttacacggtgggattgg

SEQ ID NO: 311294 - DNA, 297 bp, Homo sapiens
  misc_feature (251)..(251): n is a, c, g, or t
cgtcgactgcgttctgagccgtctgtcctgcgccaagataaaagaagtaaggctttgaaagcttcagcgcctgctcctggtcatcactaaccagatttacttggagtacatgtgaaagaaaacgtcagtctgcctgtaaatttcagcaagccgtgttagatggggagcgtggaacgtcactgtacacttgtataagtaccgtttacttcatggcatgaataaatggatctgtgagatgcaaaaaaaaagtngacgcggccgcgaatttagtagtagtaggcgacccgggtatttctg

SEQ ID NO: 311295 - DNA, 360 bp, Homo sapiens
gtaggaattttaccatttcttggctataagacattttctgaaagcttcctgaattgctttacctaagctacaatgccttcagctaaatgttaattttgacaaaggcatttttgtaaagcattgatatgactgcttttttttccttccttttattttagataaaagaagtaaggctttgaaagcttcagcgcctgctcctggtcatcactaaccagatttacttggagtacatgtgaaagaaaacgtcagtctgcctgtaaatttcagcaagccgtgttagatggggagcgtggaacgtcactgtacacttgtataagtaccgtttacttcatggcatgaataaatggatctgtgagatgc

SEQ ID NO: 311296 - DNA, 295 bp, Homo sapiens
tcatgagatgttggaaggccttccaacatctcatggcgtgaagtaaggctttgaaagcttcagcgcctgctcctggtcatcactaaccagatttacttggagtacatgtgaaagaaaacgtcagtctgcctgtaaatttcagcaagccgtgttagatggggagcgtggaacgtcactgtacacttgtataagtaccgtttacttcatggcatgaataaatggatctgtgagatgcagatgttggaaggatctcatgtctccttccaacatctcatcactccttccaacatctcat

SEQ ID NO: 311297 - DNA, 1178 bp, Homo sapiens
gggatgagtggaggatgggatgagtggaggatgggatgagtggcgttggctgcagatttgtggtgcgttctgagccgtctgtcctgcgccaaggtgagtacggggacctggacctggctcccgaggtgcgagacggcgggggcgggagggcgagaagccgccttggccccagctgatcttggggttccacccctccgccggcacgcgcctgcttttctgcccggctttcccttctctgaagggaggtaggccagggtcggttgccagagggaagcatcgcctaggcctgcgccgcgtttccctccttggccttaacgcgctcagtgcacctgaattctcccacggttttgacagggagcgtaccttggccttgagaggttcagctgcctaacccagaggctacgcagagttagagaagccagagtccaagccaagaactctgactccacatccagtcccttctctcctttataactcaagtttccttgcgccacactgccctccacgttatgctgtacatgacaacttgggtgaggcaacagggaagctgaaaagagatcatacggtgctgaatgaaattgtatggaactcgcgggtcagacatttcccatttccagtgtcagatgcttcaaagtattattaaaaacatatggatccccatgaagccctactacaccaaagtttaccaggagatttggataggaatggggctgatgggcttcatcgtttataaaatccgggctgctgataaaagaagtaaggctttgaaagcttcagcgcctgctcctggtcatcactaaccagatttacttggagtacatgtgaaagaaaacgtcagtctgcctgtaaatttcagcaagccgtgttagatggggagcgtggaacgtcactgtacacttgtataagtaccgtttacttcatggcatgaataaatggatctgtgagatgcactgctacctggtactgctttcagtgtgttccccctcagcccctccggcgtgtcaggcatactctgagtagataatttgtcatgcagcgcatgcaatcagaatctcactgagccacccatcattgtgaaataattacctcagttgtacaggacttggtgatcaggatccaggcactcacttgtattctactgctcaataaacgtttattaaacttgatcctgctactta

SEQ ID NO: 311298 - DNA, 707 bp, Homo sapiens
  misc_feature (478)..(478): n is a, c, g, or t
gatcccctgcgcgcgcctgcgcgctcggtgacctttccgagttggctgcagatttgtggtgcgttctgagccgtctgtcctgcgccaagatgcttcaaagtattattaaaaacatatggatccccatgaagccctactacaccaaagtttaccaggagatttggataggaatggggctgatgggcttcatcgtttataaaatccgggctgctgataaaagaagtaaggctttgaaagcttcagcgcctgctcctggtcatcactaaccagatttacttggagtacatgtgaaagaaaacgtcagtctgcctgtaaatttcagcaagccgtgttagatggggagcgtggaacgtcactgtacacttgtataagtaccgtttacttcatggcatgaataaatggatctgtgagatgcaaaaaaaaaaaaaaaaaaaaaaaaaaaaattttggggcgccttgggcccttggaaaagttttntaacacccactcgtgtgggcggcggggccccaagtcaggtacaggtggacacgcggcacataagggggtcccacaggacacccgggaaagcaaaacggccggggcatcacaacacacataagaaaggccgggggggcaccggaacgtctctgaccaactccgagtggagctccgaggggcacaaggggacatacgacacgacgtcacagagactcatattattagcccg

SEQ ID NO: 311299 - DNA, 799 bp, Homo sapiens
gatcccctgcgcgcgcctgcgcgctcggtgacctttccgagttggctgcagatttgtggtgcgttctgagccgtctgtcctgcgccaagatgcttcaaagtattattaaaaacatatggatccccatgaagccctactacaccaaagtttaccaggagatttggataggaatggggctgatgggcttcatcgtttataaaatccgggctgctgagatggggttttgccatgttacccaggctggtcttgaattcctgggctcaagcagtcctccaatcttggcttcccaaagtgctggaattaacaagcgtgagccacaacacctggcccaattggggaactttgaacaagactttaatatcagaattataaaagaagtaaggctttgaaagcttcagcgcctgctcctggtcatcactaaccagatttacttggagtacatgtgaaagaaaacgtcagtctgcctgtaaatttcagcaagccgtgttagatggggagcgtggaacgtcactgtacacttgtataagtaccgtttacttcatggcatgaataaatggatctgtgagatgcactgctacctggtactgctttcagtgtgttccccctcagcccctccggcgtgtcaggcatactctgagtagataatttgtcatgcagcgcatgcaatcagaatctcactgagccacccatcattgtgaaataattacctcagttgtacaggacttggtgatcaggatccaggcactcacttgtattctactgctcaataaacgtttattaaacttgatcctgctactta

SEQ ID NO: 311300 - DNA, 771 bp, Homo sapiens
cctaattttcccccattcctctaggtaattccaacaaccaaaagggtttgatagctgacagatgcttcaaagtattattaaaaacatatggatccccatgaagccctactacaccaaagtttaccaggagatttggataggaatggggctgatgggcttcatcgtttataaaatccgggctgctgagatggggttttgccatgttacccaggctggtcttgaattcctgggctcaagcagtcctccaatcttggcttcccaaagtgctggaattaacaagcgtgagccacaacacctggcccaattggggaactttgaacaagactttaatatcagaattataaaagaagtaaggctttgaaagcttcagcgcctgctcctggtcatcactaaccagatttacttggagtacatgtgaaagaaaacgtcagtctgcctgtaaatttcagcaagccgtgttagatggggagcgtggaacgtcactgtacacttgtataagtaccgtttacttcatggcatgaataaatggatctgtgagatgcactgctacctggtactgctttcagtgtgttccccctcagcccctccggcgtgtcaggcatactctgagtagataatttgtcatgcagcgcatgcaatcagaatctcactgagccacccatcattgtgaaataattacctcagttgtacaggacttggtgatcaggatccaggcactcacttgtattctactgctcaataaacgtttattaaacttgatcctgctactta

SEQ ID NO: 311301 - DNA, 1909 bp, Homo sapiens
gatcccctgcgcgcgcctgcgcgctcggtgacctttccgagttggctgcagatttgtggtgcgttctgagccgtctgtcctgcgccaagatgcttcaaagtattattaaaaacatatggatccccatgaagccctactacaccaaagtttaccaggagatttggataggaatggggctgatgggcttcatcgtttataaaatccgggctgctgataaaagaagtaaggctttgaaaggtaagatttttgcttctgaaaatggttgggaatggaaaacagcatcatgtcttttcaggacaaggtatatcgttgttctcaattgaaatcgaaacacagttcagtatatatgtaaggtgcagttgaaatgcttcacagcttgaagtttgctatgcctgctgggaaagagaattctgaatttctgctttttatagtcaagtggatcaagtaaaacttccaggagtaatagaggaatggattaattagaggtagtcgatatcatcaccaatagggaagcacaagtgagctgtgcaagcatgctgtcctagaagttccctaatgatgtcgttttattttgtttattgttttttgagacggagcctcgctctgtcgcccaggctggactgcagtgctgcgatctcagctcactgcaagctccgcctcccaggttcatgccgttctcctgcctcagccttctgagtagctgggactacaggcacctgccgccacgcctggctaatgttttgtatttttagtagagatagggtttcacatagccaggatggtctggatctcctgaccttgtgatccaccgcctcagcctacccgtaatgatgtgtttttaatggtttggttttgttttttgggtttttttttttttgagacagagtctcgctgtgttgcccaggctggagtgcagtggcacaatcttggctcactgcaacctccgccttccaggttcaagcaattctcctgccttagcctcccaagtagctgggattacaggtgcccgccaccatacccggctaattttttgtatttttagtagagatggggttggccggctggtttcaaactcctacctcaggtgatccacctgccttggcctcccaaagtgttgggattacaggcgtgagccactgcgcctggcctttaatgtattttgaaagaaagcgccttataaatttatgccagagtgacaatgaaactgtagccatttgaatgttacacaaacccaggactggctacatgagtttgaggaggaggtgtttccctgcctctctctttgcgctgtgggtgaccactgcctgtctgctgtcattacatgaacccttaagcactctgggtgtttcatatagaaataatcctacttttcaatagtattgaaaggtgtcatttatctttttggactgttgatcaacttcttttgatacttgtttaataaattacatccaacttgttccttccttcttaaatcatatttatatatgcatctctttcaaaagcttcagcgcctgctcctggtcatcactaaccagatttacttggagtacatgtgaaagaaaacgtcagtctgcctgtaaatttcagcaagccgtgttagatggggagcgtggaacgtcactgtacacttgtataagtaccgtttacttcatggcatgaataaatggatctgtgagatgcactgctacctggtactgctttcagtgtgttccccctcagcccctccggcgtgtcaggcatactctgagtagataatttgtcatgcagcgcatgcaatcagaatctcactgagccacccatcattgtgaaataattacctcagttgtacaggacttggtgatcaggatccaggcactcacttgtattctactgctcaataaacgtttattaaacttgatcctgctactta

SEQ ID NO: 311302 - DNA, 473 bp, Homo sapiens
  misc_feature (427)..(427): n is a, c, g, or t
gatcccctgcgcgcgcctgcgcgctcggtgacctttccgagttggctgcagatttgtggtgcgttctgagccgtctgtcctgcgccaagatgcttcaaagtattattaaaaacatatggatccccatgaagccctactacaccaaagtttaccaggagatttggataggaatggggctgatgggcttcatcgtttataaaatccgggctgctgataaaagaagtaaggctttgaaagcttcagcgcctgctcctggtcatcactaaccagatttacttggagtacatgtgaaagaaaacgtcagtctgcctgtaaatttcagcaagccgtgttagatggggagcgtggaacgtcactgtacacttgtataagtaccgtttacttcatggcatgaataaatggatctgtgagatgcaaaaaaaaagtngacgcggccgcgaatttagtagtagtaggcgacccgggtatttctg

SEQ ID NO: 311303 - DNA, 638 bp, Homo sapiens
gatcccctgcgcgcgcctgcgcgctcggtgacctttccgagttggctgcagatttgtggtgcgttctgagccgtctgtcctgcgccaagatgcttcaaagtattattaaaaacatatggatccccatgaagccctactacaccaaagtttaccaggagatttggataggaatggggctgatgggcttcatcgtttataaaatccgggctgctgataaaagaagtaaggctttgaaagcttcagcgcctgctcctggtcatcactaaccagatttacttggagtacatgtgaaagaaaacgtcagtctgcctgtaaatttcagcaagccgtgttagatggggagcgtggaacgtcactgtacacttgtataagtaccgtttacttcatggcatgaataaatggatctgtgagatgcaaaaaaaaaaaaaaaaaaaaaaaaaaaaaaaaaaaaaaaaaaaaaaaaaaaaaaaaaaaaaaaaaaagaaaaaaaaaaaaaaacattttgggccccttgggccaagtggattttagacttgggcaagtttatgattgcggccgaaattggggctacattggccaaatccccttatggggggcggattccaattaattggccggggtttacacggtgggattgg

SEQ ID NO: 311304 - DNA, 413 bp, Homo sapiens
  misc_feature (357)..(357): n is a, c, g, or t
gatcccctgcgcgcgcctgcgcgctcggtgacctttccgagttggctgcagatttgtggtgcgttctgagccgtctgtcctgcgccaagatgcttcaaagtattattaaaaacatatggatccccatgaagccctactacaccaaagtttaccaggagatttggataggaatggggctgatgggcttcatcgtttataaaatccgggctgctgataaaagaagtaaggctttgaaagcttcagcgcctgctcctggtcatcactaaccagatttacttggagtacatgtgaaagaaaacgtcagtctgcctgtaaatttcagcaagccgtgttagatggggagcgtggaacggtacntatacaagtgtacagtgacgttccagtcagacggccgcgaatttagtagtagtagt

SEQ ID NO: 311305 - DNA, 1007 bp, Homo sapiens
  misc_feature (961)..(961): n is a, c, g, or t
gggatgagtggaggatgggatgagtggaggatgggatgagtggcgttggctgcagatttgtggtgcgttctgagccgtctgtcctgcgccaaggtgagtacggggacctggacctggctcccgaggtgcgagacggcgggggcgggagggcgagaagccgccttggccccagctgatcttggggttccacccctccgccggcacgcgcctgcttttctgcccggctttcccttctctgaagggaggtaggccagggtcggttgccagagggaagcatcgcctaggcctgcgccgcgtttccctccttggccttaacgcgctcagtgcacctgaattctcccacggttttgacagggagcgtaccttggccttgagaggttcagctgcctaacccagaggctacgcagagttagagaagccagagtccaagccaagaactctgactccacatccagtcccttctctcctttataactcaagtttccttgcgccacactgccctccacgttatgctgtacatgacaacttgggtgaggcaacagggaagctgaaaagagatcatacggtgctgaatgaaattgtatggaactcgcgggtcagacatttcccatttccagtgtcagatgcttcaaagtattattaaaaacatatggatccccatgaagccctactacaccaaagtttaccaggagatttggataggaatggggctgatgggcttcatcgtttataaaatccgggctgctgataaaagaagtaaggctttgaaagcttcagcgcctgctcctggtcatcactaaccagatttacttggagtacatgtgaaagaaaacgtcagtctgcctgtaaatttcagcaagccgtgttagatggggagcgtggaacgtcactgtacacttgtataagtaccgtttacttcatggcatgaataaatggatctgtgagatgcaaaaaaaaagtngacgcggccgcgaatttagtagtagtaggcgacccgggtatttctg

SEQ ID NO: 311306 - DNA, 1104 bp, Homo sapiens
gggatgagtggaggatgggatgagtggaggatgggatgagtggcgttggctgcagatttgtggtgcgttctgagccgtctgtcctgcgccaaggtgagtacggggacctggacctggctcccgaggtgcgagacggcgggggcgggagggcgagaagccgccttggccccagctgatcttggggttccacccctccgccggcacgcgcctgcttttctgcccggctttcccttctctgaagggaggtaggccagggtcggttgccagagggaagcatcgcctaggcctgcgccgcgtttccctccttggccttaacgcgctcagtgcacctgaattctcccacggttttgacagggagcgtaccttggccttgagaggttcagctgcctaacccagaggctacgcagagttagagaagccagagtccaagccaagaactctgactccacatccagtcccttctctcctttataactcaagtttccttgcgccacactgccctccacgttatgctgtacatgacaacttgggtgaggcaacagggaagctgaaaagagatcatacggtgctgaatgaaattgtatggaactcgcgggtcagacatttcccatttccagtgtcagatgcttcaaagtattattaaaaacatatggatccccatgaagccctactacaccaaagtttaccaggagatttggataggaatggggctgatgggcttcatcgtttataaaatccgggctgctgagatggggttttgccatgttacccaggctggtcttgaattcctgggctcaagcagtcctccaatcttggcttcccaaagtgctggaattaacaagcgtgagccacaacacctggcccaattggggaactttgaacaagactttaatatcagaattataaaagaagtaaggctttgaaagcttcagcgcctgctcctggtcatcactaaccagatttacttggagtacatgtgaaagaaaacgtcagtctgcctgtaaatttcagcaagccgtgttagatggggagcgtggaacgtcactgtacacttgtataagtaccgtttacttcatggcatgaataaatggatctgtgagatgc

SEQ ID NO: 311307 - DNA, 644 bp, Homo sapiens
gatcccctgcgcgcgcctgcgcgctcggtgacctttccgagttggctgcagatttgtggtgcgttctgagccgtctgtcctgcgccaagatgcttcaaagtattattaaaaacatatggatccccatgaagccctactacaccaaagtttaccaggagatttggataggaatggggctgatgggcttcatcgtttataaaatccgggctgctgataaaagaagtaaggctttgaaagcttcagcgcctgctcctggtcatcactaaccagatttacttggagtacatgtgaaagaaaacgtcagtctgcctgtaaatttcagcaagccgtgttagatggggagcgtggaacgtcactgtacacttgtataagtaccgtttacttcatggcatgaataaatggatctgtgagatgcactgctacctggtactgctttcagtgtgttccccctcagcccctccggcgtgtcaggcatactctgagtagataatttgtcatgcagcgcatgcaatcagaatctcactgagccacccatcattgtgaaataattacctcagttgtacaggacttggtgatcaggatccaggcactcacttgtattctactgctcaataaacgtttattaaacttgatcctgctactta

SEQ ID NO: 311308 - DNA, 871 bp, Homo sapiens
gatcccctgcgcgcgcctgcgcgctcggtgacctttccgagttggctgcagatttgtggtgcgttctgagccgtctgtcctgcgccaagatgcttcaaagtattattaaaaacatatggatccccatgaagccctactacaccaaagtttaccaggagatttggataggaatggggctgatgggcttcatcgtttataaaatccgggctgctgagatggggttttgccatgttacccaggctggtcttgaattcctgggctcaagcagtcctccaatcttggcttcccaaagtgctggaattaacaagcgtgagccacaacacctggcccaattggggaactttgaacaagactttaatatcagaattataaaagaagtaaggctttgaaagcttcagcgcctgctcctggtcatcactaaccagatttacttggagtacatgtgaaagaaaacgtcagtctgcctgtaaatttcagcaagccgtgttagatggggagcgtggaacgtcactgtacacttgtataagtaccgtttacttcatggcatgaataaatggatctgtgagatgcactgctacctggtactgctttcagtgtgttccccctcagcccctccggcgtgtcaggcatactctgagtagataatttgtcatgcagcgcatgcaatcagaatctcactgagccacccatcattgtgaaataattacctcagttgtacaggacttggtgatcaggatccaggcactcacttgtattctactgctcaataaacgtttattaaacttgatcctgctacttaaaaaaaaaaccccaatctattttacatttggaatatgatataatgagaatcaggagtggaaaacccccgtag

SEQ ID NO: 311309 - DNA, 1680 bp, Homo sapiens
gatcccctgcgcgcgcctgcgcgctcggtgacctttccgagttggctgcagatttgtggtgcgttctgagccgtctgtcctgcgccaagatgcttcaaagtattattaaaaacatatggatccccatgaagccctactacaccaaagtttaccaggagatttggataggaatggggctgatgggcttcatcgtttataaaatccgggctgctgataaaagaagtaaggctttgaaaggtaagatttttgcttctgaaaatggttgggaatggaaaacagcatcatgtcttttcaggacaaggtatatcgttgttctcaattgaaatcgaaacacagttcagtatatatgtaaggtgcagttgaaatgcttcacagcttgaagtttgctatgcctgctgggaaagagaattctgaatttctgctttttatagtcaagtggatcaagtaaaacttccaggagtaatagaggaatggattaattagaggtagtcgatatcatcaccaatagggaagcacaagtgagctgtgcaagcatgctgtcctagaagttccctaatgatgtcgttttattttgtttattgttttttgagacggagcctcgctctgtcgcccaggctggactgcagtgctgcgatctcagctcactgcaagctccgcctcccaggttcatgccgttctcctgcctcagccttctgagtagctgggactacaggcacctgccgccacgcctggctaatgttttgtatttttagtagagatagggtttcacatagccaggatggtctggatctcctgaccttgtgatccaccgcctcagcctacccgtaatgatgtgtttttaatggtttggttttgttttttgggtttttttttttttgagacagagtctcgctgtgttgcccaggctggagtgcagtggcacaatcttggctcactgcaacctccgccttccaggttcaagcaattctcctgccttagcctcccaagtagctgggattacaggtgcccgccaccatacccggctaattttttgtatttttagtagagatggggttggccggctggtttcaaactcctacctcaggtgatccacctgccttggcctcccaaagtgttgggattacaggcgtgagccactgcgcctggcctttaatgtattttgaaagaaagcgccttataaatttatgccagagtgacaatgaaactgtagccatttgaatgttacacaaacccaggactggctacatgagtttgaggaggaggtgtttccctgcctctctctttgcgctgtgggtgaccactgcctgtctgctgtcattacatgaacccttaagcactctgggtgtttcatatagaaataatcctacttttcaatagtattgaaaggtgtcatttatctttttggactgttgatcaacttcttttgatacttgtttaataaattacatccaacttgttccttccttcttaaatcatatttatatatgcatctctttcaaaagcttcagcgcctgctcctggtcatcactaaccagatttacttggagtacatgtgaaagaaaacgtcagtctgcctgtaaatttcagcaagccgtgttagatggggagcgtggaacgtcactgtacacttgtataagtaccgtttacttcatggcatgaataaatggatctgtgagatgc

SEQ ID NO: 311310 - DNA, 1093 bp, Homo sapiens
ctgggaattgcagtccccgctctgctctgtccggtcacaggactttttgccctctgttcccgggtccctcaggcggccacccagtgggcacactcccaggcggcgctccggccccgcgctccctccctctgcctttcattcccagctgtcaacatcctggaagctttgaagctcaggaaagaagagaaatccactgagaacagtctgtaaaggtccgtagtgctatctacatccagacggtggaagggagagaaagagaaagaaggtatcctaggaatacctgcctgcttagaccctctataaaagctctgtgcatcctgccactgaggactccgaagaggtagcagtcttctgaaagacttcaactgtgaggacatgtcgttcagatttggccaacatctcatcaagccctctgtagtgtttctcaaaacagaactgtccttcgctcttgtgaataggaaacctgtggtaccaggacatgtccttgtgtgcccgctgcggccagtggagcgcttccatgacctgcgtcctgatgaagtggccgatttgtttcagacgacccagagagtcgggacagtggtggaaaaacatttccatgggacctctctcaccttttccatgcaggatggccccgaagccggacagactgtgaagcacgttcacgtccatgttcttcccaggaaggctggagactttcacaggaatgacagcatctatgaggagctccagaaacatgacaaggaggactttcctgcctcttggagatcagaggaggaaatggcagcagaagccgcagctctgcgggtctactttcagtgacacagatgtttttcagatcctgaattccagcaaaagagctattgccaaccagtttgaagaccgcccccccgcctctccccaagaggaactgaatcagcatgaaaatgcagtttcttcatctcaccatcctgtattcttcaaccagtgatcccccacctcggtcactccaactcccttaaaatacctagacctaaacggctcagacaggcagatttgaggtttccccctgtctccttattcggcagccttatgattaaacttccttctctgctgc

SEQ ID NO: 311311 - DNA, 630 bp, Homo sapiens
ctgggaattgcagtccccgctctgctctgtccggtcacaggactttttgccctctgttcccgggtccctcaggcggccacccagtgggcacactcccaggcggcgctccggccccgcgctccctccctctgcctttcattcccagctgtcaacatcctggaagctttgaagctcaggaaagaagagaaatccactgagaacagtctgtaaaggtccgtagtgctatctacatccagacggtggaagggagagaaagagaaagaaggtatcctaggaatacctgcctgcttagaccctctataaaagctctgtgcatcctgccactgaggactccgaagaggtagcagtcttctgaaagcattctgtgtgctgaaatgggaagtatgcagaaagaactgctgctgtgtactgacatatcatggttgtctcaaggaaaagcacttgtgagactgggtagtgaaatgaaccagctaccttttatatggaacactatttttctgcatgaaagaagcattgaaagacaaaatataattacgcaaactcaagtatttaacatattttctttaaaatgcacaaagtgagtctgttgctttaagtaaaccgttggccagtatttgttgatagtgataa

SEQ ID NO: 311312 - DNA, 485 bp, Homo sapiens
ctgggaattgcagtccccgctctgctctgtccggtcacaggactttttgccctctgttcccgggtccctcaggcggccacccagtgggcacactcccaggcggcgctccggccccgcgctccctccctctgcctttcattcccagctgtcaacatcctggaagctgattctaaagtgcatctaagattgaaaaccactgattctaataacacagcattgtggaatgattcgcagctgattctaaagtgcatttaacattgaaaaccactgattctaataacacagcatcgtggaatgaatcaggaactgactcagcacaggaggacagctttgactccctgtgatttcatctccaattcgaccgatcagcactccccactgcctggcccgctacccaccaaattatccttaaaaaatcccagtctctgaaatgttccagggagactgatctcagtaataataaaactctggtctcctgttcagcc

SEQ ID NO: 311313 - DNA, 1174 bp, Homo sapiens
ctgggaattgcagtccccgctctgctctgtccggtcacaggactttttgccctctgttcccgggtccctcaggcggccacccagtgggcacactcccaggcggcgctccggccccgcgctccctccctctgcctttcattcccagctgtcaacatcctggaagctttgaagctcaggaaagaagagaaatccactgagaacagtctgtaaaggtccgtagtgctatctacatccagacggtggaagggagagaaagagaaagaaggtatcctaggaatacctgcctgcttagaccctctataaaagctctgtgcatcctgccactgaggactccgaagaggtagcagtcttctgaaaggtctccgtcggatcaatcagtggaagaagggggttgctgattcacattacgtaaaaacacaagtcctcacttgagtcatagacttcaactgtgaggacatgtcgttcagatttggccaacatctcatcaagccctctgtagtgtttctcaaaacagaactgtccttcgctcttgtgaataggaaacctgtggtaccaggacatgtccttgtgtgcccgctgcggccagtggagcgcttccatgacctgcgtcctgatgaagtggccgatttgtttcagacgacccagagagtcgggacagtggtggaaaaacatttccatgggacctctctcaccttttccatgcaggatggccccgaagccggacagactgtgaagcacgttcacgtccatgttcttcccaggaaggctggagactttcacaggaatgacagcatctatgaggagctccagaaacatgacaaggaggactttcctgcctcttggagatcagaggaggaaatggcagcagaagccgcagctctgcgggtctactttcagtgacacagatgtttttcagatcctgaattccagcaaaagagctattgccaaccagtttgaagaccgcccccccgcctctccccaagaggaactgaatcagcatgaaaatgcagtttcttcatctcaccatcctgtattcttcaaccagtgatcccccacctcggtcactccaactcccttaaaatacctagacctaaacggctcagacaggcagatttgaggtttccccctgtctccttattcggcagccttatgattaaacttccttctctgctgc

SEQ ID NO: 311314 - DNA, 925 bp, Homo sapiens
ctgggaattgcagtccccgctctgctctgtccggtcacaggactttttgccctctgttcccgggtccctcaggcggccacccagtgggcacactcccaggcggcgctccggccccgcgctccctccctctgcctttcattcccagctgtcaacatcctggaagctttgaagctcaggaaagaagagaaatccactgagaacagtctgtaaagagtgagaagtggaccttggaccaccctgtctggagtcattccctgggcttctccagcccctgaagaaaatagtctcactcttgtcacccaggctggagtgcaatggctcgatctcggctcactgcaacctctgactcctgggttcaagatattctcctgcctcagtctcccgagtagctggtattacaggcatgcgccaccacacctggctaatttttgtatttttagtagagacagagattcaccatgttggccaggctggtcttgaactgctgaccttgggtgatctgtccacctcagcctcccaaagtgctgggattacaggtatgagccactgtgcccagcctgtcagtcaattttctaggcaatttatagacattactcaaaattttttgaacaggcaaaaaacaagtaactctattaaaagatgggcaaaagatatgaacagacacttcccaaaagaagacatacaagtggccaacaaacatatgagaaaatgctcatcatcactaatcatcagagaaatgcaaatcaaaaccacagtgagataccatctcacactgtcagaatggctattattaaaaagtctaaaaacaacacatgttggtgaggctgtggggaaaaaggatgcttataaactgttgtcgagaatgtaaattaggtcagccactgtggaaagcagtttggagatttctcaaagaacttaaaacagg

SEQ ID NO: 311315 - DNA, 631 bp, Homo sapiens
  misc_feature (564)..(564): n is a, c, g, or t
  misc_feature (571)..(571): n is a, c, g, or t
  misc_feature (597)..(597): n is a, c, g, or t
ctgggaattgcagtccccgctctgctctgtccggtcacaggactttttgccctctgttcccgggtccctcaggcggccacccagtgggcacactcccaggcggcgctccggccccgcgctccctccctctgcctttcattcccagctgtcaacatcctggaagctttgaagctcaggaaagaagagaaatccactgagaacagtctgtaaaggtccgtagtgctatctacatccagacggtggaagggagagaaagagaaagaaggtaaaaccatttcttaaaatacttaacagaattggcacatatgccactggctaaagtcacctggccacacaagcgggtctgttcaaaaataataaatatttagaaggagagatatatgaatttttggtaaacagccttcagttctcacattatactgcactatactttcaagaactacacaaagattttgaaattctcacttttttcattattatcataattacttttgttatatctttaaggtattgttctggttcataacatggcaatttttaatttagcctcaaaaaaggaatttnactggcntttccaaggttaaagggggcaattgnaagggggaaaatcaaggtggaatgggttattaaa

SEQ ID NO: 311316 - DNA, 3876 bp, Homo sapiens
  misc_feature (2902)..(2902): n is a, c, g, or t
  misc_feature (2974)..(2974): n is a, c, g, or t
acatagttatacagtcattacgaatcgtgatattaattatcctcgcttgtggttgtcataattaatcattttgtttgttgtaatttggttcttcagcacaagatatttttcacgtcttacgcaagagagaagaagggggatcggctttttttcccgaaaagaatcaaatcggcggcacagcagtcatgcggtgtcttatatctctcgctgtcgaagcgcttttgctataatagtagagctcgcacccagccgaccgccttcccgtggagtggtgaaaaagaagcgtcggccgctaggaggggcgagcctctcgttgttgactgagagagaagaggggggagcgcgaggctgagagatgggagctgccgctgctagaggagagagatagttctatagagagagtggcgccggcccctctgttttttcttttttgtgttttgatttttttttttttttttttttgtttttcttttttttttttgtttttttttttttttttaattgtgaagtaaaattttgttcctttgcaaattttaataaattattgaagtttattttttgtttcaaataatctgggcttcagttctaataatggaaggacaatgtgaaggcccagaattcagcatagcgcctggcattaataggaggtcagtacatttttagtacatgtttctcaaatagatcttaaaatttcatttaagagcgtttcctcacgtcacagtatgtctctggcgttacttaattttgaaaaacctcaacacagattctagttttaggcaaagctcagaaaatttcttttctacttaaggatatttccaaagcgaaaggaagcgcggagacgttcatgactggcatcatctcgcacgtggttccggaaattctcggtaggatgccctacatctgctctccctccactaagaagaacctctttgtgtggcgaaagtaaaagtattagggcttttaagttgcccagagtcaaggaacacggataaagacgctgggagattgacatgcatttcgaccaatagcattgcagagaggcgtatcatttcgcggatgttccaatcagtacgcagagagtcgccgtctccaaggtgaaagcggaagtagggccttcgcgcacctcatggaatcccttctgcagcacctggatcgcttttccgagcttctggcggtctcaagcactacctacgtcagcacctgggaccccgccaccgtgcgccgggccttgcagtgggcgcgctacctgcgccacatccatcggcgctttggtcggcatggccccattcgcacggctctggagcggcggctgcacaaccagtggaggcaagagggcggctttgggcggggtccagttccgggattagcgaacttccaggccctcggtcactgtgacgtcctgctctctctgcgcctgctggagaaccgggccctcggggatgcagctcgttaccacctggtgcagcaactctttcccggcccgggcgtccgggacgccgatgaggagacactccaagagagcctggcccgccttgcccgccggcggtctgcggtgcacatgctgcgcttcaatggctatagagagaacccaaatctccaggaggactctctgatgaagacccaggcggagctgctgctggagcgtctgcaggaggtggggaaggccgaagcggagcgtcccgccaggtttctcagcagcctgtgggagcgcttgcctcagaacaacttcctgaaggtgatagcggtggcgctgttgcagccgcctttgtctcgtcggccccaagaagagttggaacccggcatccacaaatcacctggagaggggagccaagtgctagtccactggcttctggggaattcggaagtctttgctgccttttgtcgcgccctcccagccgggcttttgactttagtgactagccgccacccagcgctgtctcctgtctatctgggtctgctaacagactggggtcaacgtttgcactatgaccttcagaaaggcatttgggttggaactgagtcccaagatgtgccctgggaggagttgcacaataggtttcaaagcctctgtcaggcccctccacctctgaaagataaagttctaactgccctggagacctgtaaagcgcaggatggagattttgaagtacctggtcttagcatctggacagacctcttattagctcttcgtagtggtgcatttaggaaaagacaagttttgggtctcagcgcaggcctcagttctgtataggcaatgctgtgttattacttgaatatagaatatatagtttacaaaatgaaaattacaatgttctcaccaaatatatgccttcgtgtgtccaaagtataattattttagatgctaattttgaatagtttattaaacagttataaatatgcaaagtagctggcatgtagtgtcacggattttctggatagaggaagtgattggaagtattccacttaaagccatggaattagcaatagtttgctttttaatagaaggcccatttgtaagaatgttgaaaatatgtgtaccgtttaaagaaaaagcagctttaaagtgacaaacaaaataccctttttcttttagtatggtttatttttctaggttttctgtccctccctcagtagtgaagagttttctttattcctggcagtgtcaggaatattggtttgaaaagctgttggcctatctggagtttggccttgttaacctagtattctaaccagttaaccagccttagtatgcattaaaattgtattgttcagaaagtttgtttctcattttctgcaaattcttactttgaaaatgaatcaccacatagtatgtccctttaaagcattgacgcacagacaaatgtttaaagcacagtaaatacaaatatatgcctttggatantaaattaatgcttgatgataaaagaatcaaacttttttttttttgagatggagtctcgctctgtcacccagnctggagtgcagtggtgtgatcactgctcagtgcaacctctgcctcccaggatcaagcaattctgactcagcctcccaagtagctgggattacaggtgcaggccaccatgcccggctaattttttgtatttttagtagagacggggtttcaccatgctggccaggctggtctcaaacacctgaccttgtgatccgtccgccttggcctcccaaagtgctgggattacaggcgtgagccaccgcgcctggccaaaacaacattttaagtagaagatccaggttttagtgcagcttctgccgttaactaggttaataaatcacaaccttggggccacagttgccttatatgtaaatgaagtgtttagaataaaatagttaaatttccttatttttcccttggtggctgccctgtggaaacagtttagaatatttgttttgtgtgtaggaacctagttgtgttagtttacctgggtgttccacagctgatagtgattgccttgaataaattcaagggcaatttattcatttttactagggagatagacctttacagcaatcaagatatttttgtccatatccaggttagctggtaagaggatttttttggagaaaaaaaatgatatttagaaagttaatttctaattccggaatggaataaaaacaatatgagtagtgtaatcttgtagaaaaagagttgtataatcttgtagaatttctcattctgtggtacaacccaggggtaaactattattccagtagtcagtacacttttctagataaatcttgagtgaaaaccagcaatttctttttccttgtggtctgattcctttttctaatccatgaaggccatcttgtagattacatttatcattaatgcaagaataaagacaattcctcctgtca

SEQ ID NO: 311317 - DNA, 2401 bp, Homo sapiens
acatagttatacagtcattacgaatcgtgatattaattatcctcgcttgtggttgtcataattaatcattttgtttgttgtaatttggttcttcagcacaagatatttttcacgtcttacgcaagagagaagaagggggatcggctttttttcccgaaaagaatcaaatcggcggcacagcagtcatgcggtgtcttatatctctcgctgtcgaagcgcttttgctataatagtagagctcgcacccagccgaccgccttcccgtggagtggtgaaaaagaagcgtcggccgctaggaggggcgagcctctcgttgttgactgagagagaagaggggggagcgcgaggctgagagatgggagctgccgctgctagaggagagagatagttctatagagagagtggcgccggcccctctgttttttcttttttgtgttttgatttttttttttttttttttttgtttttcttttttttttttgtttttttttttttttttaattgtgaagtaaaattttgttcctttgcaaattttaataaattattgaagtttattttttgtttcaaataatctgggcttcagttctaataatggaaggacaatgtgaaggcccagaattcagcatagcgcctggcattaataggaggtcagtacatttttagtacatgtttctcaaatagatcttaaaatttcatttaagagcgtttcctcacgtcacagtatgtctctggcgttacttaattttgaaaaacctcaacacagattctagttttaggcaaagctcagaaaatttcttttctacttaaggatatttccaaagcgaaaggaagcgcggagacgttcatgactggcatcatctcgcacgtggttccggaaattctcggtaggatgccctacatctgctctccctccactaagaagaacctctttgtgtggcgaaagtaaaagtattagggcttttaagttgcccagagtcaaggaacacggataaagacgctgggagattgacatgcatttcgaccaatagcattgcagagaggcgtatcatttcgcggatgttccaatcagtacgcagagagtcgccgtctccaaggtgaaagcggaagtagggccttcgcgcacctcatggaatcccttctgcagcacctggatcgcttttccgagcttctggcggtctcaagcactacctacgtcagcacctgggaccccgccaccgtgcgccgggccttgcagtgggcgcgctacctgcgccacatccatcggcgctttggtcggcatggccccattcgcacggctctggagcggcggctgcacaaccagtggaggcaagagggcggctttgggcggggtccagttccgggattagcgaacttccaggccctcggtcactgtgacgtcctgctctctctgcgcctgctggagaaccgggccctcggggatgcagctcgttaccacctggtgcagcaactctttcccggcccgggcgtccgggacgccgatgaggagacactccaagagagcctggcccgccttgcccgccggcggtctgcggtgcacatgctgcgcttcaatggctatagagagaacccaaatctccaggaggactctctgatgaagacccaggcggagctgctgctggagcgtctgcaggaggtggggaaggccgaagcggagcgtcccgccaggtttctcagcagcctgtgggagcgcttgcctcagaacaacttcctgaaggtgatagcggtggcgctgttgcagccgcctttgtctcgtcggccccaagaagagttggaacccggcatccacaaatcacctggagaggggagccaagtgctagtccactggcttctggggaattcggaagtctttgctgccttttgtcgcgccctcccagccgggcttttgactttagtgactagccgccacccagcgctgtctcctgtctatctgggtctgctaacagactggggtcaacgtttgcactatgaccttcagaaaggcatttgggttggaactgagtcccaagatgtgccctgggaggagttgcacaataggtttcaaagcctctgtcaggcccctccacctctgaaagataaagttctaactgccctggagacctgtaaagcgcaggatggagattttgaagtacctggtcttagcatctggacagacctcttattagctcttcgtagtggtgcatttaggaaaagacaagttttgggtctcagcgcaggcctcagttctgtataggcaatgctgtgttattacttgaatatagaatatatagtttacaaaatgaaaattacaatgttctcaccaaatatatgccttcgtgtgtccaaagtataattattttagatgctaattttgaatagtttattaaacagttataaatatgca

SEQ ID NO: 311318 - DNA, 2319 bp, Homo sapiens
acatagttatacagtcattacgaatcgtgatattaattatcctcgcttgtggttgtcataattaatcattttgtttgttgtaatttggttcttcagcacaagatatttttcacgtcttacgcaagagagaagaagggggatcggctttttttcccgaaaagaatcaaatcggcggcacagcagtcatgcggtgtcttatatctctcgctgtcgaagcgcttttgctataatagtagagctcgcacccagccgaccgccttcccgtggagtggtgaaaaagaagcgtcggccgctaggaggggcgagcctctcgttgttgactgagagagaagaggggggagcgcgaggctgagagatgggagctgccgctgctagaggagagagatagttctatagagagagtggcgccggcccctctgttttttcttttttgtgttttgatttttttttttttttttttttgtttttcttttttttttttgtttttttttttttttttaattgtgaagtaaaattttgttcctttgcaaattttaataaattattgaagtttattttttgtttcaaataatctgggcttcagttctaataatggaaggacaatgtgaaggcccagaattcagcatagcgcctggcattaataggaggtcagtacatttttagtacatgtttctcaaatagatcttaaaatttcatttaagagcgtttcctcacgtcacagtatgtctctggcgttacttaattttgaaaaacctcaacacagattctagttttaggcaaagctcagaaaatttcttttctacttaaggatatttccaaagcgaaaggaagcgcggagacgttcatgactggcatcatctcgcacgtggttccggaaattctcggtaggatgccctacatctgctctccctccactaagaagaacctctttgtgtggcgaaagtaaaagtattagggcttttaagttgcccagagtcaaggaacacggataaagacgctgggagattgacatgcatttcgaccaatagcattgcagagaggcgtatcatttcgcggatgttccaatcagtacgcagagagtcgccgtctccaaggtgaaagcggaagtagggccttcgcgcacctcatggaatcccttctgcagcacctggatcgcttttccgagcttctggcggtctcaagcactacctacgtcagcacctgggaccccgccaccgtgcgccgggccttgcagtgggcgcgctacctgcgccacatccatcggcgctttggtcggcatggccccattcgcacggctctggagcggcggctgcacaaccagtggaggcaagagggcggctttgggcggggtccagttccgggattagcgaacttccaggccctcggtcactgtgacgtcctgctctctctgcgcctgctggagaaccgggccctcggggatgcagctcgttaccacctggtgcagcaactctttcccggcccgggcgtccgggacgccgatgaggagacactccaagagagcctggcccgccttgcccgccggcggtctgcggtgcacatgctgcgcttcaatggctatagagagaacccaaatctccaggaggactctctgatgaagacccaggcggagctgctgctggagcgtctgcaggaggtggggaaggccgaagcggagcgtcccgccaggtttctcagcagcctgtgggagcgcttgcctcagaacaacttcctgaaggtgatagcggtggcgctgttgcagccgcctttgtctcgtcggccccaagaagagttggaacccggcatccacaaatcacctggagaggggagccaagtgctagtccactggcttctggggaattcggaagtctttgctgccttttgtcgcgccctcccagccgggcttttgactttagtgactagccgccacccagcgctgtctcctgtctatctgggtctgctaacagactggggtcaacgtttgcactatgaccttcagaaaggcatttgggttggaactgagtcccaagatgtgccctgggaggagttgcacaataggtttcaaagcctctgtcaggcccctccacctctgaaagataaagttctaactgccctggagacctgtaaagcgcaggatggagattttgaagtacctggtcttagcatctggacagacctcttattagctcttcgtagtggtgcatttaggaaaagacaagttttgggtctcagcgcaggcctcagttctgtataggcaatgctgtgttattacttgaatatagaatatatagtttacaaaatgaaaattacaatgttctcacc

SEQ ID NO: 311319 - DNA, 879 bp, Homo sapiens
ggccaagaattgggcacgagggaatttctcattctgtggtacaacccaggggtaaactattattccagtagtcagtacacttttctagataaatcttgagtgaaaaccagcaatttctttttccttgtggtctgattcctttttctaatccatgaaggccatcttgtagattacatttatcattaatgcaagaataaagacaattcctcctgtcagttgcgtgaattttttttaagaaacaacccagtgaagagttctaccatagcaaggcctaatgttagctttagctttagaaaataacagtttgtgaacttacttccctatatttgcagctgtatctcacactatgatttacaataaaattgtaaagattgacaatagacttaagaaataacattttaaaatctattttatacttaccatttattattctgttattttagtctccatatgttcattacatacataatcttatttaatcttcacaccaaaactgtattcttatgaatatacgctaaaagattaagtaaaatgcccaagggtataaacaaaagcaacatgaaagtggaagccgtatctgtcatttattttatttccagaagcctagcacagtgtccagcatatggtagatacttgtagtgtttgaataaatgaaaccagcattagagctttatatactttctcttaaggacttgaaaagattaggaatctacgcatacactgagagagaaaaaagtgagaggaagactataaaaatagaatatttgataacttctttataaaatctagagatatttattttgtgttttttccctatgtcctatcaaatgagggagcactattgaaatctcccattgtaacattgtttcaggaaatttt

SEQ ID NO: 311320 - DNA, 4540 bp, Homo sapiens
  misc_feature (2902)..(2902): n is a, c, g, or t
  misc_feature (2974)..(2974): n is a, c, g, or t
acatagttatacagtcattacgaatcgtgatattaattatcctcgcttgtggttgtcataattaatcattttgtttgttgtaatttggttcttcagcacaagatatttttcacgtcttacgcaagagagaagaagggggatcggctttttttcccgaaaagaatcaaatcggcggcacagcagtcatgcggtgtcttatatctctcgctgtcgaagcgcttttgctataatagtagagctcgcacccagccgaccgccttcccgtggagtggtgaaaaagaagcgtcggccgctaggaggggcgagcctctcgttgttgactgagagagaagaggggggagcgcgaggctgagagatgggagctgccgctgctagaggagagagatagttctatagagagagtggcgccggcccctctgttttttcttttttgtgttttgatttttttttttttttttttttgtttttcttttttttttttgtttttttttttttttttaattgtgaagtaaaattttgttcctttgcaaattttaataaattattgaagtttattttttgtttcaaataatctgggcttcagttctaataatggaaggacaatgtgaaggcccagaattcagcatagcgcctggcattaataggaggtcagtacatttttagtacatgtttctcaaatagatcttaaaatttcatttaagagcgtttcctcacgtcacagtatgtctctggcgttacttaattttgaaaaacctcaacacagattctagttttaggcaaagctcagaaaatttcttttctacttaaggatatttccaaagcgaaaggaagcgcggagacgttcatgactggcatcatctcgcacgtggttccggaaattctcggtaggatgccctacatctgctctccctccactaagaagaacctctttgtgtggcgaaagtaaaagtattagggcttttaagttgcccagagtcaaggaacacggataaagacgctgggagattgacatgcatttcgaccaatagcattgcagagaggcgtatcatttcgcggatgttccaatcagtacgcagagagtcgccgtctccaaggtgaaagcggaagtagggccttcgcgcacctcatggaatcccttctgcagcacctggatcgcttttccgagcttctggcggtctcaagcactacctacgtcagcacctgggaccccgccaccgtgcgccgggccttgcagtgggcgcgctacctgcgccacatccatcggcgctttggtcggcatggccccattcgcacggctctggagcggcggctgcacaaccagtggaggcaagagggcggctttgggcggggtccagttccgggattagcgaacttccaggccctcggtcactgtgacgtcctgctctctctgcgcctgctggagaaccgggccctcggggatgcagctcgttaccacctggtgcagcaactctttcccggcccgggcgtccgggacgccgatgaggagacactccaagagagcctggcccgccttgcccgccggcggtctgcggtgcacatgctgcgcttcaatggctatagagagaacccaaatctccaggaggactctctgatgaagacccaggcggagctgctgctggagcgtctgcaggaggtggggaaggccgaagcggagcgtcccgccaggtttctcagcagcctgtgggagcgcttgcctcagaacaacttcctgaaggtgatagcggtggcgctgttgcagccgcctttgtctcgtcggccccaagaagagttggaacccggcatccacaaatcacctggagaggggagccaagtgctagtccactggcttctggggaattcggaagtctttgctgccttttgtcgcgccctcccagccgggcttttgactttagtgactagccgccacccagcgctgtctcctgtctatctgggtctgctaacagactggggtcaacgtttgcactatgaccttcagaaaggcatttgggttggaactgagtcccaagatgtgccctgggaggagttgcacaataggtttcaaagcctctgtcaggcccctccacctctgaaagataaagttctaactgccctggagacctgtaaagcgcaggatggagattttgaagtacctggtcttagcatctggacagacctcttattagctcttcgtagtggtgcatttaggaaaagacaagttttgggtctcagcgcaggcctcagttctgtataggcaatgctgtgttattacttgaatatagaatatatagtttacaaaatgaaaattacaatgttctcaccaaatatatgccttcgtgtgtccaaagtataattattttagatgctaattttgaatagtttattaaacagttataaatatgcaaagtagctggcatgtagtgtcacggattttctggatagaggaagtgattggaagtattccacttaaagccatggaattagcaatagtttgctttttaatagaaggcccatttgtaagaatgttgaaaatatgtgtaccgtttaaagaaaaagcagctttaaagtgacaaacaaaataccctttttcttttagtatggtttatttttctaggttttctgtccctccctcagtagtgaagagttttctttattcctggcagtgtcaggaatattggtttgaaaagctgttggcctatctggagtttggccttgttaacctagtattctaaccagttaaccagccttagtatgcattaaaattgtattgttcagaaagtttgtttctcattttctgcaaattcttactttgaaaatgaatcaccacatagtatgtccctttaaagcattgacgcacagacaaatgtttaaagcacagtaaatacaaatatatgcctttggatantaaattaatgcttgatgataaaagaatcaaacttttttttttttgagatggagtctcgctctgtcacccagnctggagtgcagtggtgtgatcactgctcagtgcaacctctgcctcccaggatcaagcaattctgactcagcctcccaagtagctgggattacaggtgcaggccaccatgcccggctaattttttgtatttttagtagagacggggtttcaccatgctggccaggctggtctcaaacacctgaccttgtgatccgtccgccttggcctcccaaagtgctgggattacaggcgtgagccaccgcgcctggccaaaacaacattttaagtagaagatccaggttttagtgcagcttctgccgttaactaggttaataaatcacaaccttggggccacagttgccttatatgtaaatgaagtgtttagaataaaatagttaaatttccttatttttcccttggtggctgccctgtggaaacagtttagaatatttgttttgtgtgtaggaacctagttgtgttagtttacctgggtgttccacagctgatagtgattgccttgaataaattcaagggcaatttattcatttttactagggagatagacctttacagcaatcaagatatttttgtccatatccaggttagctggtaagaggatttttttggagaaaaaaaatgatatttagaaagttaatttctaattccggaatggaataaaaacaatatgagtagtgtaatcttgtagaaaaagagttgtataatcttgtagaatttctcattctgtggtacaacccaggggtaaactattattccagtagtcagtacacttttctagataaatcttgagtgaaaaccagcaatttctttttccttgtggtctgattcctttttctaatccatgaaggccatcttgtagattacatttatcattaatgcaagaataaagacaattcctcctgtcagttgcgtgaattttttttaagaaacaacccagtgaagagttctaccatagcaaggcctaatgttagctttagctttagaaaataacagtttgtgaacttacttccctatatttgcagctgtatctcacactatgatttacaataaaattgtaaagattgacaatagacttaagaaataacattttaaaatctattttatacttaccatttattattctgttattttagtctccatatgttcattacatacataatcttatttaatcttcacaccaaaactgtattcttatgaatatacgctaaaagattaagtaaaatgcccaagggtataaacaaaagcaacatgaaagtggaagccgtatctgtcatttattttatttccagaagcctagcacagtgtccagcatatggtagatacttgtagtgtttgaataaatgaaaccagcattagagctttatatactttctcttaaggacttgaaaagattaggaatctacgcatacactgagagagaaaaaagtgagaggaagactataaaaatagaatatttgataacttctttataaaatctagagatatttattttgtgttttttccctatgtcctatcaaatgagggagcactattgaaatctcccattgtaacattgtttcaggaaatttt

SEQ ID NO: 311321 - DNA, 4275 bp, Homo sapiens
  misc_feature (2902)..(2902): n is a, c, g, or t
  misc_feature (2974)..(2974): n is a, c, g, or t
acatagttatacagtcattacgaatcgtgatattaattatcctcgcttgtggttgtcataattaatcattttgtttgttgtaatttggttcttcagcacaagatatttttcacgtcttacgcaagagagaagaagggggatcggctttttttcccgaaaagaatcaaatcggcggcacagcagtcatgcggtgtcttatatctctcgctgtcgaagcgcttttgctataatagtagagctcgcacccagccgaccgccttcccgtggagtggtgaaaaagaagcgtcggccgctaggaggggcgagcctctcgttgttgactgagagagaagaggggggagcgcgaggctgagagatgggagctgccgctgctagaggagagagatagttctatagagagagtggcgccggcccctctgttttttcttttttgtgttttgatttttttttttttttttttttgtttttcttttttttttttgtttttttttttttttttaattgtgaagtaaaattttgttcctttgcaaattttaataaattattgaagtttattttttgtttcaaataatctgggcttcagttctaataatggaaggacaatgtgaaggcccagaattcagcatagcgcctggcattaataggaggtcagtacatttttagtacatgtttctcaaatagatcttaaaatttcatttaagagcgtttcctcacgtcacagtatgtctctggcgttacttaattttgaaaaacctcaacacagattctagttttaggcaaagctcagaaaatttcttttctacttaaggatatttccaaagcgaaaggaagcgcggagacgttcatgactggcatcatctcgcacgtggttccggaaattctcggtaggatgccctacatctgctctccctccactaagaagaacctctttgtgtggcgaaagtaaaagtattagggcttttaagttgcccagagtcaaggaacacggataaagacgctgggagattgacatgcatttcgaccaatagcattgcagagaggcgtatcatttcgcggatgttccaatcagtacgcagagagtcgccgtctccaaggtgaaagcggaagtagggccttcgcgcacctcatggaatcccttctgcagcacctggatcgcttttccgagcttctggcggtctcaagcactacctacgtcagcacctgggaccccgccaccgtgcgccgggccttgcagtgggcgcgctacctgcgccacatccatcggcgctttggtcggcatggccccattcgcacggctctggagcggcggctgcacaaccagtggaggcaagagggcggctttgggcggggtccagttccgggattagcgaacttccaggccctcggtcactgtgacgtcctgctctctctgcgcctgctggagaaccgggccctcggggatgcagctcgttaccacctggtgcagcaactctttcccggcccgggcgtccgggacgccgatgaggagacactccaagagagcctggcccgccttgcccgccggcggtctgcggtgcacatgctgcgcttcaatggctatagagagaacccaaatctccaggaggactctctgatgaagacccaggcggagctgctgctggagcgtctgcaggaggtggggaaggccgaagcggagcgtcccgccaggtttctcagcagcctgtgggagcgcttgcctcagaacaacttcctgaaggtgatagcggtggcgctgttgcagccgcctttgtctcgtcggccccaagaagagttggaacccggcatccacaaatcacctggagaggggagccaagtgctagtccactggcttctggggaattcggaagtctttgctgccttttgtcgcgccctcccagccgggcttttgactttagtgactagccgccacccagcgctgtctcctgtctatctgggtctgctaacagactggggtcaacgtttgcactatgaccttcagaaaggcatttgggttggaactgagtcccaagatgtgccctgggaggagttgcacaataggtttcaaagcctctgtcaggcccctccacctctgaaagataaagttctaactgccctggagacctgtaaagcgcaggatggagattttgaagtacctggtcttagcatctggacagacctcttattagctcttcgtagtggtgcatttaggaaaagacaagttttgggtctcagcgcaggcctcagttctgtataggcaatgctgtgttattacttgaatatagaatatatagtttacaaaatgaaaattacaatgttctcaccaaatatatgccttcgtgtgtccaaagtataattattttagatgctaattttgaatagtttattaaacagttataaatatgcaaagtagctggcatgtagtgtcacggattttctggatagaggaagtgattggaagtattccacttaaagccatggaattagcaatagtttgctttttaatagaaggcccatttgtaagaatgttgaaaatatgtgtaccgtttaaagaaaaagcagctttaaagtgacaaacaaaataccctttttcttttagtatggtttatttttctaggttttctgtccctccctcagtagtgaagagttttctttattcctggcagtgtcaggaatattggtttgaaaagctgttggcctatctggagtttggccttgttaacctagtattctaaccagttaaccagccttagtatgcattaaaattgtattgttcagaaagtttgtttctcattttctgcaaattcttactttgaaaatgaatcaccacatagtatgtccctttaaagcattgacgcacagacaaatgtttaaagcacagtaaatacaaatatatgcctttggatantaaattaatgcttgatgataaaagaatcaaacttttttttttttgagatggagtctcgctctgtcacccagnctggagtgcagtggtgtgatcactgctcagtgcaacctctgcctcccaggatcaagcaattctgactcagcctcccaagtagctgggattacaggtgcaggccaccatgcccggctaattttttgtatttttagtagagacggggtttcaccatgctggccaggctggtctcaaacacctgaccttgtgatccgtccgccttggcctcccaaagtgctgggattacaggcgtgagccaccgcgcctggccaaaacaacattttaagtagaagatccaggttttagtgcagcttctgccgttaactaggttaataaatcacaaccttggggccacagttgccttatatgtaaatgaagtgtttagaataaaatagttaaatttccttatttttcccttggtggctgccctgtggaaacagtttagaatatttgttttgtgtgtaggaacctagttgtgttagtttacctgggtgttccacagctgatagtgattgccttgaataaattcaagggcaatttattcatttttactagggagatagacctttacagcaatcaagatatttttgtccatatccaggttagctggtaagaggatttttttggagaaaaaaaatgatatttagaaagttaatttctaattccggaatggaataaaaacaatatgagtagtgtaatcttgtagaaaaagagttgtataatcttgtagaatttctcattctgtggtacaacccaggggtaaactattattccagtagtcagtacacttttctagataaatcttgagtgaaaaccagcaatttctttttccttgtggtctgattcctttttctaatccatgaaggccatcttgtagattacatttatcattaatgcaagaataaagacaattcctcctgtcaaaaaaaaaaaaaaaaaaaaaaaaaaaaaaaaaaaaaaaagaaaaaaaaaaaaaaaaaacaaacaaaagaagaaaaacagaaaaacaaccaaaccacaaaacaagaagacaaaaacacaaacgaaaaaagaaaagagggggggggagagcaaagatcaaaacacttcggggagggcgccgccacagtacgatgcctgcaccctatagtgttaaagagaagcggccggccactaaaaacagaggagcgacgactaatcactaacacgacgcggaagggcggcgcaagaacaaaaagcagcgcacaaacgaagaagaagacaccgagaagagagagtacacgattcgaaaagacaccacactctgcggcggggcgcccaactagcgggagcaaacaaccgcg

SEQ ID NO: 311322 - DNA, 287 bp, Homo sapiens
ctgatagggcagtggaaccacctgtctgccttggagatattttcttcacagccctcaccattgcttttaatgacatatttgtgtgtttcttatactagggtctgtcccaccacgttcctgagggtaggacctaggtccctttgtattaattgttctaagaactccatgtttaagaaaccataattagtcagtttgacaaacggcacccccctgcccatttccacatcttcaaaactggaatttggtttataattgatcaggtcttacaactacaattgtttgtattt

SEQ ID NO: 311323 - DNA, 3367 bp, Homo sapiens
gccaaacagcagttgaatctgcgtacgcatatggccgatgaaaataaaaatgaatatgctgcacaattacaaaactttaatggagaacaacataaacatttttatgtagtgattcctcagatttacaagcaactacaagaaatggacgaacgaaggactattaaactcagtgagtgttacagaggatttgctgactcagaacgcaaagttattcccatcatttcaaaatgtttggaaggaatgattcttgcagcaaaatcagttgatgaaagaagagactctcaaatggtggtagactccttcaaatctggttttgaacctccaggagactttccatttgaagattacagtcaacatatatatagaaccatttctgatgggactatcagtgcatccaaacaggagagtgggaagatggatgccaaaaccacagtaggaaaggccaagggcaaattgtggctctttggaaagaagccaaagggcccagcactagaagatttcagtcatctgccaccagaacagagacgtaaaaaactacagcagcgcattgatgaacttaacagagaactacagaaagaatcagaccaaaaagatgcactcaacaaaatgaaagatgtatatgagaagaatccacaaatgggggatccagggagtttgcagcctaaattagcagagaccatgaataacattgaccgcctacgaatggaaatccataagaatgaggcttggctctctgaagtcgaaggcaaaacaggtgggagaggagacagaagacatagcagtgacataaatcatcttgtaacacagggacgagaaagtcctgagggaagttacactgatgatgcaaaccaggaagtccgtgggccaccccagcagcatggtcaccacaatgagtttgatgatgaatttgaggatgatgatcccttgcctgctattggacactgcaaagctatctacccttttgatggacataatgaaggtactctagcaatgaaagaaggtgaagttctctacattatagaggaggacaaaggtgacggatggacaagagctcggagacagaacggtgaagaaggctacgttcccacgtcatacatagatgtaactctagagaaaaacagtaaaggttcctgaagagggtttctgaggaaatgggcaagatgttgaaggaggttacatgcagctgcttttgggggagggtattagagttgtcaggctcaaagagagtgagagaagcaagttgcatgagtgcatgcagacatgattttttttttactaacttcattagcatttccatacattgtttttaaaaatcataataccaacccttaagttcctagttcacagttattcccacaaaagaaaaagccaacaatagtgtaccatttttctatttattttattgctgtctaatcaataaagaatgcagagctgtcaaaaaatgtgtcttacattagctgtcccaacaggattgtcttccctcccagctctgttttaattggcttttagacccactatctgtcagatccttgccatctgtcagtgtctgcctgcgccacctccgtgcttgcttaacatcctgttgcatgtctagcgtgattgagctagatttttcaggcatgtctttagattcccttgttcttgtcaaagccttgttttgttttacatttgtagtgcaaatcactttgtcaaacatctccagcactaatgtttccatcttagtatttgtgcacactgctataacttccccactgcaaacattccagttttggcattacgaagaagtagctgtgaacctgaagtatttatgataagaaaaagaaaacatctctgctgtagcctacagcccagttgaaagaactctttgaaacgtgatacatcttcagcacctcagtctgggaagaatctagtcagcactgaaatcctggcataataaacacagaagatattcaccacctcaagacaaaggactattgtcaaaagtcagctgcttccattcaaatgctgccttaaacttgagtgcctaaatctgttgattgccaacactaccactacagtatcccacaaagggctttatgtgtcagctcagtgcgacctgctttaactctgcagcaccgctgcagctgccgatgtagcctcggtaggtggctattagagctctaccatatacagtggtgcatcttcaaatttatgcatcaaactaaagacatgtccaagtccattttaatttcctcagtggttttatgagaagttttatgggcctcccccaattgtctttttattttgggttatgacgatcatgtttgataattacaatgatagtctctttccacgtgatgcttttgtttgaacctgataaaatttagtgaaactttgtaatgatctatgtgcacttttacttgtaaaatggaatttctgtatgtttatacttgtaaatatgattgttgttagtgctcctgttgctcatggtgtcctgcctcgcatttgtgattctgttaatgacatgtatcttaactaatttcttagtggtgttgtaatagggagatggggcaggtggggggttatttgtaccactgaatcttcattaatttggttctttactgttttgaggggagaaagaacgtgaaatggtttgtgtattattgaattttaagcaatattttagaagctgtgtgactgctttaataactttttcccagtgttatttgaatcatactacccgttatactaaagctgaatgacaattgtgtgaaagttactgccttcataagatcaagtcaccactgttacacagctgacatatagtgtattacctttgcagctagtaaactataaagtttagatattgaatctcgttacagggttatttatataatgtgacattattcagtactgacagactacatgaagtagttttaaaatctagtgctatttttattttaaaggttagcaatgaggaggaaatgtgatctggctgtgtttgtcttctgtacaaagcctgaagtgcttatggttttttggctaacagccacagagggcaaagtttaagactttcttgtaaggactaactgttcttttcaagctactgtttgtttttctaaaagcaggatttgcttccgtaggaggcaagttccttgatgtggaatagtgcaacctgtatatgggttattataataggaaagacatttgtacttgcacagtttaaatcattcttaaattttgaacatgtgaattgtcccaaaaaatctttaattttttggtaatttttactctttttgtgcacatgttgatttcttaatggtaaatccttcatttaaagatagtgttctctgttgagaatatttacatggaataaaacaatcttttc

SEQ ID NO: 311324 - DNA, 4738 bp, Homo sapiens
agttgagaatcttttaattttcagtgacagaatgaatactttacccatgctggcttaaactaaaaatggacttcattggctgacttcagggagagcttgatctaggagctcagatgttatccctaggactcaatttctctccacctcacagctgtgctttctactgtgttggcttccttttaaggctccaaagctctaggcgagtattcctgcaggtttcgagtccagtagaaaagggacagagtgaattctcttcgaagagtcccaagcaaaagtttctgtgcatttcttaaatctgattaggttacaggacttcttgtgaactggttatatagatgattgctctgatgggccactccagattcagaatagaaacaatccacctgaagcgtgtgaactaaacatggatatgcatggatcccttaaggaattttaggatgataaatttgggatgatggaagacaagggtctagaacgtttttctgttttatgtctagaccgagtgatagtgaggtgtatttactgaataatactttgtgcctagaatattgtaatcttgtaatttttttttaattcaggaaattcagcaaagcagcattttgtattagaagtaatttgtatacttgacatttgaaaaaaatagggcttaagtggaaactgtgtcattaatatttaatttttggaattgatcctgaggtgatcaatttataaataatatatagaattctcatgtttatgatacttgatcagagataattttttgttttatagtcctgagggaagttacactgatgatgcaaaccaggaagtccgtgggccaccccagcagcatggtcaccacaatgagtttgatgatgaatttgaggatgatgatcccttgcctgctattggacactgcaaagctatctacccttttgatggacataatgaaggtactctagcaatgaaagaaggtgaagttctctacattatagaggaggacaaaggtgacggatggacaagagctcggagacagaacggtgaagaaggctacgttcccacgtcatacatagatgtaactctagagaaaaacagtaaaggtgcagtaacttatatctaaactaaccaggcacctttgtgccatgtgtgacataggaagagtaacataaaatgaaaacacattcaacaggttgaaaaaaataaggaaacttaaagggcatccaagattaattgttcactatgtgagctgagtgtaggcttgatcttgtgaatattaccacaagaaacattttgtggcactttactgtttgagtaacgttggtgtgaagcttaattgatgccttttgctttatgtcccgcttaagtctgtgtgaaggatttgtgtttttctgccttacaaatagaatttgatttattgggcaggaattcatggatagtaatgctctctgccccctttacttcagaaaacacagtgactttagtgaatttgaatagtgaaactgctctgaaatgctatggaaagccgactccccaaagagtggtttcttctagaagtttgaatttgtagctacagtttccaagaagaaaaatagtagttggataatttagtaaaataataacatcattttcattttcttacctattcttaactttggtttcctaaaggaagaaaatgagcaggtagcacataatctatttaagtagatttaaagagagtttcaaaataaatctcctggtctagctcttaggtgaataaaatagattttgtttgagacctcaaaatattttgaggttagctggtaattttcaataatttacaagcttccttccaaactaatctcatacttttgtatgtttcatcttgaaaatatcttttgggaaataccactttagtgattatttagcatttagcagttacacataggaaaatacacagttacatagaaaaatacacatttgaagatagaggaaaccttgaatggaggggaagtgttgacaaattttaatttttaaaggagaaactttttgactatctgggttagaggaagatatgtgtaccgcctttagggcattttgttatttccgctgaatcattagttattaggatagataaatttttccaattagtttcagcaagcgttgttggaaacactgtgcagtcaaggattgtgcagtgctggttgtgtgaccacaccctgagtcagtggtgtggggaagtaaagtgtgaagaagcagtaagattggtttttaattttgcccatgttttaaattttcctggtgttttcggtagctgactataaaatgatagagacatttgggacaggcactttaaactgaacaccccttttggttttaccaaaggtcttcagtaattgttcttttctttttcctcctggactgcaggttcctgaagagggtttctgaggaaatgggcaagatgttgaaggaggttacatgcagctgcttttgggggagggtattagagttgtcaggctcaaagagagtgagagaagcaagttgcatgagtgcatgcagacatgattttttttttactaacttcattagcatttccatacattgtttttaaaaatcataataccaacccttaagttcctagttcacagttattcccacaaaagaaaaagccaacaatagtgtaccatttttctatttattttattgctgtctaatcaataaagaatgcagagctgtcaaaaaatgtgtcttacattagctgtcccaacaggattgtcttccctcccagctctgttttaattggcttttagacccactatctgtcagatccttgccatctgtcagtgtctgcctgcgccacctccgtgcttgcttaacatcctgttgcatgtctagcgtgattgagctagatttttcaggcatgtctttagattcccttgttcttgtcaaagccttgttttgttttacatttgtagtgcaaatcactttgtcaaacatctccagcactaatgtttccatcttagtatttgtgcacactgctataacttccccactgcaaacattccagttttggcattacgaagaagtagctgtgaacctgaagtatttatgataagaaaaagaaaacatctctgctgtagcctacagcccagttgaaagaactctttgaaacgtgatacatcttcagcacctcagtctgggaagaatctagtcagcactgaaatcctggcataataaacacagaagatattcaccacctcaagacaaaggactattgtcaaaagtcagctgcttccattcaaatgctgccttaaacttgagtgcctaaatctgttgattgccaacactaccactacagtatcccacaaagggctttatgtgtcagctcagtgcgacctgctttaactctgcagcaccgctgcagctgccgatgtagcctcggtaggtggctattagagctctaccatatacagtggtgcatcttcaaatttatgcatcaaactaaagacatgtccaagtccattttaatttcctcagtggttttatgagaagttttatgggcctcccccaattgtctttttattttgggttatgacgatcatgtttgataattacaatgatagtctctttccacgtgatgcttttgtttgaacctgataaaatttagtgaaactttgtaatgatctatgtgcacttttacttgtaaaatggaatttctgtatgtttatacttgtaaatatgattgttgttagtgctcctgttgctcatggtgtcctgcctcgcatttgtgattctgttaatgacatgtatcttaactaatttcttagtggtgttgtaatagggagatggggcaggtggggggttatttgtaccactgaatcttcattaatttggttctttactgttttgaggggagaaagaacgtgaaatggtttgtgtattattgaattttaagcaatattttagaagctgtgtgactgctttaataactttttcccagtgttatttgaatcatactacccgttatactaaagctgaatgacaattgtgtgaaagttactgccttcataagatcaagtcaccactgttacacagctgacatatagtgtattacctttgcagctagtaaactataaagtttagatattgaatctcgttacagggttatttatataatgtgacattattcagtactgacagactacatgaagtagttttaaaatctagtgctatttttattttaaaggttagcaatgaggaggaaatgtgatctggctgtgtttgtcttctgtacaaagcctgaagtgcttatggttttttggctaacagccacagagggcaaagtttaagactttcttgtaaggactaactgttcttttcaagctactgtttgtttttctaaaagcaggatttgcttccgtaggaggcaagttccttgatgtggaatagtgcaacctgtatatgggttattataataggaaagacatttgtacttgcacagtttaaatcattcttaaattttgaacatgtgaattgtcccaaaaaatctttaattttttggtaatttttactctttttgtgcacatgttgatttcttaatggtaaatccttcatttaaagatagtgttctctgttgagaatatttacatggaataaaacaatcttttcatggcctgttaaggtgtttagtgtgtgatctttcattgctatgtgaatcagagatgtgatgattttgttcttgaatgtgccaagtctcagataatacagagtagatgacaaattc

SEQ ID NO: 311325 - DNA, 4960 bp, Homo sapiens
gccaaacagcagttgaatctgcgtacgcatatggccgatgaaaataaaaatgaatatgctgcacaattacaaaactttaatggagaacaacataaacatttttatgtagtgattcctcagatttacaagcaactacaagaaatggacgaacgaaggactattaaactcagtgagtgttacagaggatttgctgactcagaacgcaaagttattcccatcatttcaaaatgtttggaaggaatgattcttgcagcaaaatcagttgatgaaagaagagactctcaaatggtggtagactccttcaaatctggttttgaacctccaggagactttccatttgaagattacagtcaacatatatatagaaccatttctgatgggactatcagtgcatccaaacaggagagtgggaagatggatgccaaaaccacagtaggaaaggccaagggcaaattgtggctctttggaaagaagccaaagccacagtccccacccttaacccctactagtttattcacatccagtactcctaatgggtcccagtttctcacattctccattgagcccgtgcattattgtatgaatgaaataaaaacagggaagcccagaattccttctttcagaagcctcaaaagaggggtaagtttaataatggggcccagcactagaagatttcagtcatctgccaccagaacagagacgtaaaaaactacagcagcgcattgatgaacttaacagagaactacagaaagaatcagaccaaaaagatgcactcaacaaaatgaaagatgtatatgagaagaatccacaaatgggggatccagggagtttgcagcctaaattagcagagaccatgaataacattgaccgcctacgaatggaaatccataagaatgaggcttggctctctgaagtcgaaggcaaaacaggtgggagaggagacagaagacatagcagtgacataaatcatcttgtaacacagggacgagaaagtcctgagggaagttacactgatgatgcaaaccaggaagtccgtgggccaccccagcagcatggtcaccacaatgagtttgatgatgaatttgaggatgatgatcccttgcctgctattggacactgcaaagctatctacccttttgatggacataatgaaggtactctagcaatgaaagaaggtgaagttctctacattatagaggaggacaaaggtgacggatggacaagagctcggagacagaacggtgaagaaggctacgttcccacgtcatacatagatgtaactctagagaaaaacagtaaaggtgcagtaacttatatctaaactaaccaggcacctttgtgccatgtgtgacataggaagagtaacataaaatgaaaacacattcaacaggttgaaaaaaataaggaaacttaaagggcatccaagattaattgttcactatgtgagctgagtgtaggcttgatcttgtgaatattaccacaagaaacattttgtggcactttactgtttgagtaacgttggtgtgaagcttaattgatgccttttgctttatgtcccgcttaagtctgtgtgaaggatttgtgtttttctgccttacaaatagaatttgatttattgggcaggaattcatggatagtaatgctctctgccccctttacttcagaaaacacagtgactttagtgaatttgaatagtgaaactgctctgaaatgctatggaaagccgactccccaaagagtggtttcttctagaagtttgaatttgtagctacagtttccaagaagaaaaatagtagttggataatttagtaaaataataacatcattttcattttcttacctattcttaactttggtttcctaaaggaagaaaatgagcaggtagcacataatctatttaagtagatttaaagagagtttcaaaataaatctcctggtctagctcttaggtgaataaaatagattttgtttgagacctcaaaatattttgaggttagctggtaattttcaataatttacaagcttccttccaaactaatctcatacttttgtatgtttcatcttgaaaatatcttttgggaaataccactttagtgattatttagcatttagcagttacacataggaaaatacacagttacatagaaaaatacacatttgaagatagaggaaaccttgaatggaggggaagtgttgacaaattttaatttttaaaggagaaactttttgactatctgggttagaggaagatatgtgtaccgcctttagggcattttgttatttccgctgaatcattagttattaggatagataaatttttccaattagtttcagcaagcgttgttggaaacactgtgcagtcaaggattgtgcagtgctggttgtgtgaccacaccctgagtcagtggtgtggggaagtaaagtgtgaagaagcagtaagattggtttttaattttgcccatgttttaaattttcctggtgttttcggtagctgactataaaatgatagagacatttgggacaggcactttaaactgaacaccccttttggttttaccaaaggtcttcagtaattgttcttttctttttcctcctggactgcaggttcctgaagagggtttctgaggaaatgggcaagatgttgaaggaggttacatgcagctgcttttgggggagggtattagagttgtcaggctcaaagagagtgagagaagcaagttgcatgagtgcatgcagacatgattttttttttactaacttcattagcatttccatacattgtttttaaaaatcataataccaacccttaagttcctagttcacagttattcccacaaaagaaaaagccaacaatagtgtaccatttttctatttattttattgctgtctaatcaataaagaatgcagagctgtcaaaaaatgtgtcttacattagctgtcccaacaggattgtcttccctcccagctctgttttaattggcttttagacccactatctgtcagatccttgccatctgtcagtgtctgcctgcgccacctccgtgcttgcttaacatcctgttgcatgtctagcgtgattgagctagatttttcaggcatgtctttagattcccttgttcttgtcaaagccttgttttgttttacatttgtagtgcaaatcactttgtcaaacatctccagcactaatgtttccatcttagtatttgtgcacactgctataacttccccactgcaaacattccagttttggcattacgaagaagtagctgtgaacctgaagtatttatgataagaaaaagaaaacatctctgctgtagcctacagcccagttgaaagaactctttgaaacgtgatacatcttcagcacctcagtctgggaagaatctagtcagcactgaaatcctggcataataaacacagaagatattcaccacctcaagacaaaggactattgtcaaaagtcagctgcttccattcaaatgctgccttaaacttgagtgcctaaatctgttgattgccaacactaccactacagtatcccacaaagggctttatgtgtcagctcagtgcgacctgctttaactctgcagcaccgctgcagctgccgatgtagcctcggtaggtggctattagagctctaccatatacagtggtgcatcttcaaatttatgcatcaaactaaagacatgtccaagtccattttaatttcctcagtggttttatgagaagttttatgggcctcccccaattgtctttttattttgggttatgacgatcatgtttgataattacaatgatagtctctttccacgtgatgcttttgtttgaacctgataaaatttagtgaaactttgtaatgatctatgtgcacttttacttgtaaaatggaatttctgtatgtttatacttgtaaatatgattgttgttagtgctcctgttgctcatggtgtcctgcctcgcatttgtgattctgttaatgacatgtatcttaactaatttcttagtggtgttgtaatagggagatggggcaggtggggggttatttgtaccactgaatcttcattaatttggttctttactgttttgaggggagaaagaacgtgaaatggtttgtgtattattgaattttaagcaatattttagaagctgtgtgactgctttaataactttttcccagtgttatttgaatcatactacccgttatactaaagctgaatgacaattgtgtgaaagttactgccttcataagatcaagtcaccactgttacacagctgacatatagtgtattacctttgcagctagtaaactataaagtttagatattgaatctcgttacagggttatttatataatgtgacattattcagtactgacagactacatgaagtagttttaaaatctagtgctatttttattttaaaggttagcaatgaggaggaaatgtgatctggctgtgtttgtcttctgtacaaagcctgaagtgcttatggttttttggctaacagccacagagggcaaagtttaagactttcttgtaaggactaactgttcttttcaagctactgtttgtttttctaaaagcaggatttgcttccgtaggaggcaagttccttgatgtggaatagtgcaacctgtatatgggttattataataggaaagacatttgtacttgcacagtttaaatcattcttaaattttgaacatgtgaattgtcccaaaaaatctttaattttttggtaatttttactctttttgtgcacatgttgatttcttaatggtaaatccttcatttaaagatagtgttctctgttgagaatatttacatggaataaaacaatcttttcatggcctgttaaggtgtttagtgtgtgatctttcattgctatgtgaatcagagatgtgatgattttgttcttgaatgtgccaagtctcagataatacagagtagatgacaaattc

SEQ ID NO: 311326 - DNA, 3482 bp, Homo sapiens
gccaaacagcagttgaatctgcgtacgcatatggccgatgaaaataaaaatgaatatgctgcacaattacaaaactttaatggagaacaacataaacatttttatgtagtgattcctcagatttacaagcaactacaagaaatggacgaacgaaggactattaaactcagtgagtgttacagaggatttgctgactcagaacgcaaagttattcccatcatttcaaaatgtttggaaggaatgattcttgcagcaaaatcagttgatgaaagaagagactctcaaatggtggtagactccttcaaatctggttttgaacctccaggagactttccatttgaagattacagtcaacatatatatagaaccatttctgatgggactatcagtgcatccaaacaggagagtgggaagatggatgccaaaaccacagtaggaaaggccaagggcaaattgtggctctttggaaagaagccaaagggcccagcactagaagatttcagtcatctgccaccagaacagagacgtaaaaaactacagcagcgcattgatgaacttaacagagaactacagaaagaatcagaccaaaaagatgcactcaacaaaatgaaagatgtatatgagaagaatccacaaatgggggatccagggagtttgcagcctaaattagcagagaccatgaataacattgaccgcctacgaatggaaatccataagaatgaggcttggctctctgaagtcgaaggcaaaacaggtgggagaggagacagaagacatagcagtgacataaatcatcttgtaacacagggacgagaaagtcctgagggaagttacactgatgatgcaaaccaggaagtccgtgggccaccccagcagcatggtcaccacaatgagtttgatgatgaatttgaggatgatgatcccttgcctgctattggacactgcaaagctatctacccttttgatggacataatgaaggtactctagcaatgaaagaaggtgaagttctctacattatagaggaggacaaaggtgacggatggacaagagctcggagacagaacggtgaagaaggctacgttcccacgtcatacatagatgtaactctagagaaaaacagtaaaggttcctgaagagggtttctgaggaaatgggcaagatgttgaaggaggttacatgcagctgcttttgggggagggtattagagttgtcaggctcaaagagagtgagagaagcaagttgcatgagtgcatgcagacatgattttttttttactaacttcattagcatttccatacattgtttttaaaaatcataataccaacccttaagttcctagttcacagttattcccacaaaagaaaaagccaacaatagtgtaccatttttctatttattttattgctgtctaatcaataaagaatgcagagctgtcaaaaaatgtgtcttacattagctgtcccaacaggattgtcttccctcccagctctgttttaattggcttttagacccactatctgtcagatccttgccatctgtcagtgtctgcctgcgccacctccgtgcttgcttaacatcctgttgcatgtctagcgtgattgagctagatttttcaggcatgtctttagattcccttgttcttgtcaaagccttgttttgttttacatttgtagtgcaaatcactttgtcaaacatctccagcactaatgtttccatcttagtatttgtgcacactgctataacttccccactgcaaacattccagttttggcattacgaagaagtagctgtgaacctgaagtatttatgataagaaaaagaaaacatctctgctgtagcctacagcccagttgaaagaactctttgaaacgtgatacatcttcagcacctcagtctgggaagaatctagtcagcactgaaatcctggcataataaacacagaagatattcaccacctcaagacaaaggactattgtcaaaagtcagctgcttccattcaaatgctgccttaaacttgagtgcctaaatctgttgattgccaacactaccactacagtatcccacaaagggctttatgtgtcagctcagtgcgacctgctttaactctgcagcaccgctgcagctgccgatgtagcctcggtaggtggctattagagctctaccatatacagtggtgcatcttcaaatttatgcatcaaactaaagacatgtccaagtccattttaatttcctcagtggttttatgagaagttttatgggcctcccccaattgtctttttattttgggttatgacgatcatgtttgataattacaatgatagtctctttccacgtgatgcttttgtttgaacctgataaaatttagtgaaactttgtaatgatctatgtgcacttttacttgtaaaatggaatttctgtatgtttatacttgtaaatatgattgttgttagtgctcctgttgctcatggtgtcctgcctcgcatttgtgattctgttaatgacatgtatcttaactaatttcttagtggtgttgtaatagggagatggggcaggtggggggttatttgtaccactgaatcttcattaatttggttctttactgttttgaggggagaaagaacgtgaaatggtttgtgtattattgaattttaagcaatattttagaagctgtgtgactgctttaataactttttcccagtgttatttgaatcatactacccgttatactaaagctgaatgacaattgtgtgaaagttactgccttcataagatcaagtcaccactgttacacagctgacatatagtgtattacctttgcagctagtaaactataaagtttagatattgaatctcgttacagggttatttatataatgtgacattattcagtactgacagactacatgaagtagttttaaaatctagtgctatttttattttaaaggttagcaatgaggaggaaatgtgatctggctgtgtttgtcttctgtacaaagcctgaagtgcttatggttttttggctaacagccacagagggcaaagtttaagactttcttgtaaggactaactgttcttttcaagctactgtttgtttttctaaaagcaggatttgcttccgtaggaggcaagttccttgatgtggaatagtgcaacctgtatatgggttattataataggaaagacatttgtacttgcacagtttaaatcattcttaaattttgaacatgtgaattgtcccaaaaaatctttaattttttggtaatttttactctttttgtgcacatgttgatttcttaatggtaaatccttcatttaaagatagtgttctctgttgagaatatttacatggaataaaacaatcttttcatggcctgttaaggtgtttagtgtgtgatctttcattgctatgtgaatcagagatgtgatgattttgttcttgaatgtgccaagtctcagataatacagagtagatgacaaattc

SEQ ID NO: 311327 - DNA, 664 bp, Homo sapiens
gccaaacagcagttgaatctgcgtacgcatatggccgatgaaaataaaaatgaatatgctgcacaattacaaaactttaatggagaacaacataaacatttttatgtagtgattcctcagatttacaagcaactacaagaaatggacgaacgaaggactattaaactcagtgagtgttacagaggatttgctgactcagaacgcaaagttattcccatcatttcaaaatgtttggaaggaatgattcttgcagcaaaatcagttgatgaaagaagagactctcaaatggtggtagactccttcaaatctggttttgaacctccaggagactttccatttgaagattacagtcaacatatatatagaaccatttctgatgggactatcagtgcatccaaacaggagagtgggaagatggatgccaaaaccacagtaggaaaggccaagggcaaattgtggctctttggaaagaagccaaagttaggcgcccagcaactagtagatatcactcatatgccaacagtacagagactgtcaaggtagatcatcggcgatacttcgatgaaaggaacagacgatcacgacaaggatcaaccccggccgatgcaatctacgcatgcatacaggtagaactgaagaggaatcacaaacaggcaaatctaca

SEQ ID NO: 311328 - DNA, 143 bp, Homo sapiens
taacaacagtgtaactatgagggtagaaatatttaatttttgatgggggatcactaattgaactcctttagaatgattgaaaaattcagttttctctttttaaaaaaattcttgattattagcaactacaagaaatggacgaa

SEQ ID NO: 311329 - DNA, 4785 bp, Homo sapiens
gccaaacagcagttgaatctgcgtacgcatatggccgatgaaaataaaaatgaatatgctgcacaattacaaaactttaatggagaacaacataaacatttttatgtagtgattcctcagatttacaagcaactacaagaaatggacgaacgaaggactattaaactcagtgagtgttacagaggatttgctgactcagaacgcaaagttattcccatcatttcaaaatgtttggaaggaatgattcttgcagcaaaatcagttgatgaaagaagagactctcaaatggtggtagactccttcaaatctggttttgaacctccaggagactttccatttgaagattacagtcaacatatatatagaaccatttctgatgggactatcagtgcatccaaacaggagagtgggaagatggatgccaaaaccacagtaggaaaggccaagggcaaattgtggctctttggaaagaagccaaagggcccagcactagaagatttcagtcatctgccaccagaacagagacgtaaaaaactacagcagcgcattgatgaacttaacagagaactacagaaagaatcagaccaaaaagatgcactcaacaaaatgaaagatgtatatgagaagaatccacaaatgggggatccagggagtttgcagcctaaattagcagagaccatgaataacattgaccgcctacgaatggaaatccataagaatgaggcttggctctctgaagtcgaaggcaaaacaggtgggagaggagacagaagacatagcagtgacataaatcatcttgtaacacagggacgagaaagtcctgagggaagttacactgatgatgcaaaccaggaagtccgtgggccaccccagcagcatggtcaccacaatgagtttgatgatgaatttgaggatgatgatcccttgcctgctattggacactgcaaagctatctacccttttgatggacataatgaaggtactctagcaatgaaagaaggtgaagttctctacattatagaggaggacaaaggtgacggatggacaagagctcggagacagaacggtgaagaaggctacgttcccacgtcatacatagatgtaactctagagaaaaacagtaaaggtgcagtaacttatatctaaactaaccaggcacctttgtgccatgtgtgacataggaagagtaacataaaatgaaaacacattcaacaggttgaaaaaaataaggaaacttaaagggcatccaagattaattgttcactatgtgagctgagtgtaggcttgatcttgtgaatattaccacaagaaacattttgtggcactttactgtttgagtaacgttggtgtgaagcttaattgatgccttttgctttatgtcccgcttaagtctgtgtgaaggatttgtgtttttctgccttacaaatagaatttgatttattgggcaggaattcatggatagtaatgctctctgccccctttacttcagaaaacacagtgactttagtgaatttgaatagtgaaactgctctgaaatgctatggaaagccgactccccaaagagtggtttcttctagaagtttgaatttgtagctacagtttccaagaagaaaaatagtagttggataatttagtaaaataataacatcattttcattttcttacctattcttaactttggtttcctaaaggaagaaaatgagcaggtagcacataatctatttaagtagatttaaagagagtttcaaaataaatctcctggtctagctcttaggtgaataaaatagattttgtttgagacctcaaaatattttgaggttagctggtaattttcaataatttacaagcttccttccaaactaatctcatacttttgtatgtttcatcttgaaaatatcttttgggaaataccactttagtgattatttagcatttagcagttacacataggaaaatacacagttacatagaaaaatacacatttgaagatagaggaaaccttgaatggaggggaagtgttgacaaattttaatttttaaaggagaaactttttgactatctgggttagaggaagatatgtgtaccgcctttagggcattttgttatttccgctgaatcattagttattaggatagataaatttttccaattagtttcagcaagcgttgttggaaacactgtgcagtcaaggattgtgcagtgctggttgtgtgaccacaccctgagtcagtggtgtggggaagtaaagtgtgaagaagcagtaagattggtttttaattttgcccatgttttaaattttcctggtgttttcggtagctgactataaaatgatagagacatttgggacaggcactttaaactgaacaccccttttggttttaccaaaggtcttcagtaattgttcttttctttttcctcctggactgcaggttcctgaagagggtttctgaggaaatgggcaagatgttgaaggaggttacatgcagctgcttttgggggagggtattagagttgtcaggctcaaagagagtgagagaagcaagttgcatgagtgcatgcagacatgattttttttttactaacttcattagcatttccatacattgtttttaaaaatcataataccaacccttaagttcctagttcacagttattcccacaaaagaaaaagccaacaatagtgtaccatttttctatttattttattgctgtctaatcaataaagaatgcagagctgtcaaaaaatgtgtcttacattagctgtcccaacaggattgtcttccctcccagctctgttttaattggcttttagacccactatctgtcagatccttgccatctgtcagtgtctgcctgcgccacctccgtgcttgcttaacatcctgttgcatgtctagcgtgattgagctagatttttcaggcatgtctttagattcccttgttcttgtcaaagccttgttttgttttacatttgtagtgcaaatcactttgtcaaacatctccagcactaatgtttccatcttagtatttgtgcacactgctataacttccccactgcaaacattccagttttggcattacgaagaagtagctgtgaacctgaagtatttatgataagaaaaagaaaacatctctgctgtagcctacagcccagttgaaagaactctttgaaacgtgatacatcttcagcacctcagtctgggaagaatctagtcagcactgaaatcctggcataataaacacagaagatattcaccacctcaagacaaaggactattgtcaaaagtcagctgcttccattcaaatgctgccttaaacttgagtgcctaaatctgttgattgccaacactaccactacagtatcccacaaagggctttatgtgtcagctcagtgcgacctgctttaactctgcagcaccgctgcagctgccgatgtagcctcggtaggtggctattagagctctaccatatacagtggtgcatcttcaaatttatgcatcaaactaaagacatgtccaagtccattttaatttcctcagtggttttatgagaagttttatgggcctcccccaattgtctttttattttgggttatgacgatcatgtttgataattacaatgatagtctctttccacgtgatgcttttgtttgaacctgataaaatttagtgaaactttgtaatgatctatgtgcacttttacttgtaaaatggaatttctgtatgtttatacttgtaaatatgattgttgttagtgctcctgttgctcatggtgtcctgcctcgcatttgtgattctgttaatgacatgtatcttaactaatttcttagtggtgttgtaatagggagatggggcaggtggggggttatttgtaccactgaatcttcattaatttggttctttactgttttgaggggagaaagaacgtgaaatggtttgtgtattattgaattttaagcaatattttagaagctgtgtgactgctttaataactttttcccagtgttatttgaatcatactacccgttatactaaagctgaatgacaattgtgtgaaagttactgccttcataagatcaagtcaccactgttacacagctgacatatagtgtattacctttgcagctagtaaactataaagtttagatattgaatctcgttacagggttatttatataatgtgacattattcagtactgacagactacatgaagtagttttaaaatctagtgctatttttattttaaaggttagcaatgaggaggaaatgtgatctggctgtgtttgtcttctgtacaaagcctgaagtgcttatggttttttggctaacagccacagagggcaaagtttaagactttcttgtaaggactaactgttcttttcaagctactgtttgtttttctaaaagcaggatttgcttccgtaggaggcaagttccttgatgtggaatagtgcaacctgtatatgggttattataataggaaagacatttgtacttgcacagtttaaatcattcttaaattttgaacatgtgaattgtcccaaaaaatctttaattttttggtaatttttactctttttgtgcacatgttgatttcttaatggtaaatccttcatttaaagatagtgttctctgttgagaatatttacatggaataaaacaatcttttcatggcctgttaaggtgtttagtgtgtgatctttcattgctatgtgaatcagagatgtgatgattttgttcttgaatgtgccaagtctcagataatacagagtagatgacaaattc

SEQ ID NO: 311330 - DNA, 2344 bp, Homo sapiens
gccaaacagcagttgaatctgcgtacgcatatggccgatgaaaataaaaatgaatatgctgcacaattacaaaactttaatggagaacaacataaacatttttatgtagtgattcctcagatttacaagcaactacaagaaatggacgaacgaaggactattaaactcagtgagtgttacagaggatttgctgactcagaacgcaaagttattcccatcatttcaaaatgtttggaaggaatgattcttgcagcaaaatcagttgatgaaagaagagactctcaaatggtggtagactccttcaaatctggttttgaacctccaggagactttccatttgaagattacagtcaacatatatatagaaccatttctgatgggactatcagtgcatccaaacaggagagtgggaagatggatgccaaaaccacagtaggaaaggccaagggcaaattgtggctctttggaaagaagccaaagggcccagcactagaagatttcagtcatctgccaccagaacagagacgtaaaaaactacagcagcgcattgatgaacttaacagagaactacagaaagaatcagaccaaaaagatgcactcaacaaaatgaaagatgtatatgagaagaatccacaaatgggggatccagggagtttgcagcctaaattagcagagaccatgaataacattgaccgcctacgaatggaaatccataagaatgaggcttggctctctgaagtcgaaggcaaaacaggtgggagaggagacagaagacatagcagtgacataaatcatcttgtaacacagggacgagaaagtcctgagggaagttacactgatgatgcaaaccaggaagtccgtgggccaccccagcagcatggtcaccacaatgagtttgatgatgaatttgaggatgatgatcccttgcctgctattggacactgcaaagctatctacccttttgatggacataatgaaggtactctagcaatgaaagaaggtgaagttctctacattatagaggaggacaaaggtgacggatggacaagagctcggagacagaacggtgaagaaggctacgttcccacgtcatacatagatgtaactctagagaaaaacagtaaaggttcctgaagagggtttctgaggaaatgggcaagatgttgaaggaggttacatgcagctgcttttgggggagggtattagagttgtcaggctcaaagagagtgagagaagcaagttgcatgagtgcatgcagacatgattttttttttactaacttcattagcatttccatacattgtttttaaaaatcataataccaacccttaagttcctagttcacagttattcccacaaaagaaaaagccaacaatagtgtaccatttttctatttattttattgctgtctaatcaataaagaatgcagagctgtcaaaaaatgtgtcttacattagctgtcccaacaggattgtcttccctcccagctctgttttaattggcttttagacccactatctgtcagatccttgccatctgtcagtgtctgcctgcgccacctccgtgcttgcttaacatcctgttgcatgtctagcgtgattgagctagatttttcaggcatgtctttagattcccttgttcttgtcaaagccttgttttgttttacatttgtagtgcaaatcactttgtcaaacatctccagcactaatgtttccatcttagtatttgtgcacactgctataacttccccactgcaaacattccagttttggcattacgaagaagtagctgtgaacctgaagtatttatgataagaaaaagaaaacatctctgctgtagcctacagcccagttgaaagaactctttgaaacgtgatacatcttcagcacctcagtctgggaagaatctagtcagcactgaaatcctggcataataaacacagaagatattcaccacctcaagacaaaggactattgtcaaaagtcagctgcttccattcaaatgctgccttaaacttgagtgcctaaatctgttgattgccaacactaccactacagtatcccacaaagggctttatgtgtcagctcagtgcgacctgctttaactctgcagcaccgctgcagctgccgatgtagcctcggtaggtggctattagagctctaccatatacagtggtgcatcttcaaatttatgcatcaaactaaagacatgtccatgccatgccatttagtaagtaatcacttcatcatcaccgtcaccatccttaccatcaccatcattgccatgccatttagtaaataatccttcatcaccaccgtcatcatccttaccatcgccatcattg

SEQ ID NO: 311331 - DNA, 1117 bp, Homo sapiens
gccaaacagcagttgaatctgcgtacgcatatggccgatgaaaataaaaatgaatatgctgcacaattacaaaactttaatggagaacaacataaacatttttatgtagtgattcctcagatttacaagcaactacaagaaatggacgaacgaaggactattaaactcagtgagtgttacagaggatttgctgactcagaacgcaaagttattcccatcatttcaaaatgtttggaaggaatgattcttgcagcaaaatcagttgatgaaagaagagactctcaaatggtggtagactccttcaaatctggttttgaacctccaggagactttccatttgaagattacagtcaacatatatatagaaccatttctgatgggactatcagtgcatccaaacaggagagtgggaagatggatgccaaaaccacagtaggaaaggccaagggcaaattgtggctctttggaaagaagccaaagggcccagcactagaagatttcagtcatctgccaccagaacagagacgtaaaaaactacagcagcgcattgatgaacttaacagagaactacagaaagaatcagaccaaaaagatgcactcaacaaaatgaaagatgtatatgagaagaatccacaaatgggggatccagggagtttgcagcctaaattagcagagaccatgaataacattgaccgcctacgaatggaaatccataagaatgaggcttggctctctgaagtcgaaggcaaaacaggtgggagaggagacagaagacatagcagtgacataaatcatcttgtaacacagggacgagaaaggtgattttttgtattttatttgtatttcttctccccagagttttctcacccttttgtcctaaactttatacaattcgtttttttcttccaaatttaacaagttaagcttttagtaacctcagtcttttgaacctaagtaattttctttagtgataattacaggtgaagtaggaaagttcatcttgctattcaatcctagtttgtcatgcatccaaacacagagctaggaacatagaaaattcttggagctacagtctgagggcctaggctcctcgggcatgggaaggtttcctaaggtt

SEQ ID NO: 311332 - DNA, 3721 bp, Homo sapiens
ctccaaagggacggttttctagagctccgacgcctctcggtgcccctctgctccggcccttgccctttgacctcgctctcgcggcagggtgagaggtcgggtggccatcttgtggcggcggcgcgggcggctgttactgcggagacccatcccctcccccttctcgcacccctggcagtctgtcagtcggtaaaaagtcccgcagcctgtcaggtgaggccccggcctcgtgccgtcgctcttcccgccgcactgggcggcccaggccgctccctgccgggcctcactgccgccaccatgtcctccttctctgagtcggcgctggagaagaagctctcggagctgagcaactctcagcagagcgtgcagaccctgtccctttggctcatccaccaccgcaagcacgcgggacccatcgtctccgtgtggcaccgcgagctccgcaaagccaaatcaaatagaaagcttacttttctgtatttagcgaatgatgtcatccaaaacagtaaaaggaaaggacctgaattcactagagaatttgaatctgtccttgtggatgctttttctcatgttgccagagaggcagatgaaggctgtaaaaaacctttagaaagattgctgaacatctggcaagaacgaagtgtgtatggcggcgagttcatacagcagctgaagctgtctatggaggactccaagagccctccccccaaagcaacagaagagaagaaatctctgaaacgaacttttcagcaaattcaggaggaggaggatgacgactaccctggcagctactctcctcaggatccttctgcaggacccctcttgactgaggaactaatcaaagctttgcaggatctggaaaatgccgcatcaggggatgctactgtccgacagaaaattgcttctctgccccaggaagtgcaagatgtttctctattggaaaaaataacagacaaagaggcagctgaacgtctttcaaaaacagtagatgaagcatgtctgttactagcagaatataacgggcgcctggcagcagaactggaggaccgtcgccagctggctcggatgttggtggagtatacccagaatcagaaagatgttttgtcggagaaggagaaaaaactagaggaatacaaacagaagcttgcacgagtaacccaggtccgcaaggaactgaaatcccatattcagagcttgccagacctctcactgctgcccaacgtcacagggggcttagcccccctgccctctgctggggacctgttttcaactgactaggatgggtgtcatgtcccagatttctgtttgtaccagcagaaagaagagggcaagtcatggttggaaataaccttctagcccctggttctatcccttcttccgcccagccccccagcctcaagaaagaacctcagactctgattctcctcttcagcctctcatcttgagcacagttcagaacagtggcgactggaatctggtttatattcatatttgcaaagactacagactttttctcccacttcatattttcatgcccccctgttggttttccattcttaactgtctccttatacctaagaagttatgaaaatcatgtgtacttctggaagctttcgaaagaatcttgtccctcatgacagcattttatcatgaaagcagcttctcctttctgggctgggcttgttcaagttcggtgtgggcttccactaaggcacttgtcctggagacgttggctttcccagctgcatctgccccaaaaggttgtaggcacagctgtcgtagcgttgccataaagagtttgccaaatctctgatcctccctttccattgcttctcctagtgatgcacgaagattaggtgcatttattttgtaaacagattggagaatctagcaataagattcaaagctaatctggagcataaaggcacagttcagagacagaataacagggatcacaagcatgaattaaaaggaatttatttgcttcaagttcctagatacaaccttcccatgctgcacttctccactgtcggagcacgttccgaaaaacagaatgccttgatccctggtgggtgcgaaggcagttgttagggatggcaggcattggtgggctccaaaagatgaaggccccacacacaggtgtgctgcatttgggatctgtgtgggtgtttcttggaccctttcttctgggagtagggtacacactaacgtttaatccgctgtctgggtgcatgtccacagtacggtggctaaactcgaacatcactgcaaataggacgctgagcaggtccgtctgtcatgtcacgccactgcacaggtccttgtccccacacgacggggagtacttgcgtcagatgttattgaatagctcgtctcgggcaggggaagcggggagttggggatattaattgggggttttaattctattatcatgtcagctgacattatgactatataatgtagttagagacaatttttatcttgcttatagtaaaggttcagcctgccaattgtaaatcattctaatttggcaggcttatttttgacattggaaagggcagaaagcgatttgccccagtagtgtaataggagttatagaccagaggctgaaacccaaactatataaaaaggaattcagtggagggggctttgtaatctccattaatttgtgttgctacttccaggatcaccaaaaattacatgtaattttacatgttaaacacattgaaacataacctatgtttataaagcataacgggcttcccttccagaagctctcctgcttgtcatgaagtgagaacaatgactgttattcagatttgaattcagactgtgtgttgtttgcttatggacactgcctgtcgttctgtcactgttaaattaatgagtctataaggtttttcttccagaggccataggtgacatcactaaaattgcaagataaattgtaatctttgctgctgctgcactccccaacctctcccccaccccccgtggtgtgctgctttctagatgagcgtgttttggagcaggcccatctgggacactctatgctttcaccaaggaagtgcgatctgagcagccacaatccagccaaaagaggatcgtagatatttgctctgatcaactagatgaaaatatagcagaatggatttagcccactgctctgttttatccaactgagtctctgaccagcaattggtgcataattattacagcaaaagttaagaaatgaaactgtagcaattatgtaaatgaatgtgttggcctcttaatacctgttactagtggacttcctgtgaggaagttagttttttgttttgatgaaatgctttcgttttttaaatcttaattctgctgtccacatcctcccaaagtgtgcttacttcatttgtttaatttaaatgaactttcctccttgtatgtatgaggtgacttggtgggtggggtgggtggtttttgtttttgtgttttttctttcttagggcatctgtaggcctcaaaggacctttcctttaggtcatattcctcagaaagtcttcaatcttcccttgtttttgtttgtttgtttttcttaaagaatattttcaaagcttaaatttgtatattaatttaggactatttagaagtataggctgtcgttggcggcagcagtatattctgaaatgtctcatagatatatatttttgaataaagatggtgttgttgaacaaaaaaaaat

SEQ ID NO: 311333 - DNA, 2403 bp, Homo sapiens
gaggctggggggctggacggaagaagggaaagaacctcagactctgattctcctcttcagcctctcatcttgagcacagttcagaacagtggcgactggaatctggtttatattcatatttgcaaagactacagactttttctcccacttcatattttcatgcccccctgttggttttccattcttaactgtctccttatacctaagaagttatgaaaatcatgtgtacttctggaagctttcgaaagaatcttgtccctcatgacagcattttatcatgaaagcagcttctcctttctgggctgggcttgttcaagttcggtgtgggcttccactaaggcacttgtcctggagacgttggctttcccagctgcatctgccccaaaaggttgtaggcacagctgtcgtagcgttgccataaagagtttgccaaatctctgatcctccctttccattgcttctcctagtgatgcacgaagattaggtgcatttattttgtaaacagattggagaatctagcaataagattcaaagctaatctggagcataaaggcacagttcagagacagaataacagggatcacaagcatgaattaaaaggaatttatttgcttcaagttcctagatacaaccttcccatgctgcacttctccactgtcggagcacgttccgaaaaacagaatgccttgatccctggtgggtgcgaaggcagttgttagggatggcaggcattggtgggctccaaaagatgaaggccccacacacaggtgtgctgcatttgggatctgtgtgggtgtttcttggaccctttcttctgggagtagggtacacactaacgtttaatccgctgtctgggtgcatgtccacagtacggtggctaaactcgaacatcactgcaaataggacgctgagcaggtccgtctgtcatgtcacgccactgcacaggtccttgtccccacacgacggggagtacttgcgtcagatgttattgaatagctcgtctcgggcaggggaagcggggagttggggatattaattgggggttttaattctattatcatgtcagctgacattatgactatataatgtagttagagacaatttttatcttgcttatagtaaaggttcagcctgccaattgtaaatcattctaatttggcaggcttatttttgacattggaaagggcagaaagcgatttgccccagtagtgtaataggagttatagaccagaggctgaaacccaaactatataaaaaggaattcagtggagggggctttgtaatctccattaatttgtgttgctacttccaggatcaccaaaaattacatgtaattttacatgttaaacacattgaaacataacctatgtttataaagcataacgggcttcccttccagaagctctcctgcttgtcatgaagtgagaacaatgaaaagtcatagcagatactcagtttaactctgtgtagaacctagtagtgtttgagctgttattcagatttgaattcagactgtgtgttgtttgcttatggacactgcctgtcgttctgtcactgttaaattaatgagtctataaggtttttcttccagaggccataggtgacatcactaaaattgcaagataaattgtaatctttgctgctgctgcactccccaacctctcccccaccccccgtggtgtgctgctttctagatgagcgtgttttggagcaggcccatctgggacactctatgctttcaccaaggaagtgcgatctgagcagccacaatccagccaaaagaggatcgtagatatttgctctgatcaactagatgaaaatatagcagaatggatttagcccactgctctgttttatccaactgagtctctgaccagcaattggtgcataattattacagcaaaagttaagaaatgaaactgtagcaattatgtaaatgaatgtgttggcctcttaatacctgttactagtggacttcctgtgaggaagttagttttttgttttgatgaaatgctttcgttttttaaatcttaattctgctgtccacatcctcccaaagtgtgcttacttcatttgtttaatttaaatgaactttcctccttgtatgtatgaggtgacttggtgggtggggtgggtggtttttgtttttgtgttttttctttcttagggcatctgtaggcctcaaaggacctttcctttaggtcatattcctcagaaagtcttcaatcttcccttgtttttgtttgtttgtttttcttaaagaatattttcaaagcttaaatttgtatattaatttaggactatttagaagtataggctgtcgttggcggcagcagtatattctgaaatgtctcatagatatatatttttgaataaagatggtgttgttgaacaaaaaaaaat

SEQ ID NO: 311334 - DNA, 1560 bp, Homo sapiens
ctccaaagggacggttttctagagctccgacgcctctcggtgcccctctgctccggcccttgccctttgacctcgctctcgcggcagggtgagaggtcgggtggccatcttgtggcggcggcgcgggcggctgttactgcggagacccatcccctcccccttctcgcacccctggcagtctgtcagtcggtaaaaagtcccgcagcctgtcaggtgaggccccggcctcgtgccgtcgctcttcccgccgcactgggcggcccaggccgctccctgccgggcctcactgccgccaccatgtcctccttctctgagtcggcgctggagaagaagctctcggagctgagcaactctcagcagagcgtgcagaccctgtccctttggctcatccaccaccgcaagcacgcgggacccatcgtctccgtgtggcaccgcgagctccgcaaagccaaatcaaatagaaagcttacttttctgtatttagcgaatgatgtcatccaaaacagtaaaaggaaaggacctgaattcactagagaatttgaatctgtccttgtggatgctttttctcatgttgccagagaggcagatgaaggctgtaaaaaacctttagaaagattgctgaacatctggcaagaacgaagtgtgtatggcggcgagttcatacagcagctgaagctgtctatggaggactccaagagccctccccccaaagcaacagaagagaagaaatctctgaaacgaacttttcagcaaattcaggaggaggaggatgacgactaccctggcagctactctcctcaggatccttctgcaggacccctcttgactgaggaactaatcaaagctttgcaggatctggaaaatgccgcatcaggggatgctactgtccgacagaaaattgcttctctgccccaggaagtgcaagatgtttctctattggaaaaaataacagacaaagaggcagctgaacgtctttcaaaaacagtagatgaagcatgtctgttactagcagaatataacgggcgcctggcagcagaactggaggaccgtcgccagctggctcggatgttggtggagtatacccagaatcagaaagatgttttgtcggagaaggagaaaaaactagagggtgtcatgattgactttggcctatgatgttggcccttaaacaccaggcaagggtggaaggaatgctgctgaaaatctgtgggtaatgtttttgtcatgaacatgagaaaacctagaaatggagaaggcacgtggaaggaagcacaaatggcagcccaaagaggaggttagagaatgtggagggtatagaagaaagcccattcagaaaggcaaaggccaaagataccagaaaagccttccagcttcacttccagagcaaagagaagctttgtttgtggttgacagaggtgactacattactcccagatgtctgctcaaagctcataagacatagcgtgagtgggttggatagggttcctgtcttgtcagcgtgaataaagcatgatacagacatgttctgttagcatgatcagtgcatgtggaagagtgtgt

SEQ ID NO: 311335 - DNA, 719 bp, Homo sapiens
ttgtgagtatctgtaatagagcaacaaatttcaatataagtcaacaaatttcaatacgagctcataaggctttatcttattttttattttccgtagtgttttcttcatgcccccaaaatatttctacccatgaactgggtggtaaatctctgaaaaacaaattttttttgacaaagtaaattttgaaaagatttttttttcttttttttttttttttgtctcaggaagaaagaaatcttgcatcacaatctttcttgctggaataaactgaagtagtctcacctatcaggttttccagcttcaaatctcagatataactaatcattttttcccttctttgcttttctagcaaacttccagaaacaaaacctcgtgccgaattcggcacgaggtttaatttaaatgaactttcctccttgtatgtatgaggtgacttggtgggtggggtgggtggtttttgtttttgtgttttttctttcttagggcatctgtaggcctcaaaggacctttcctttaggtcatattcctcagaaagtcttcaatcttcccttgtttttgtttgtttgtttttcttaaagaatattttcaaagcttaaatttgtatattaatttaggactatttagaagtataggctgtcgttggcggcagcagtatattctgaaatgtctcatagatatatatttttgaataaagatggtgttgttgaacaaaaaaaaat

SEQ ID NO: 311336 - DNA, 3775 bp, Homo sapiens
ctccaaagggacggttttctagagctccgacgcctctcggtgcccctctgctccggcccttgccctttgacctcgctctcgcggcagggtgagaggtcgggtggccatcttgtggcggcggcgcgggcggctgttactgcggagacccatcccctcccccttctcgcacccctggcagtctgtcagtcggtaaaaagtcccgcagcctgtcaggtgaggccccggcctcgtgccgtcgctcttcccgccgcactgggcggcccaggccgctccctgccgggcctcactgccgccaccatgtcctccttctctgagtcggcgctggagaagaagctctcggagctgagcaactctcagcagagcgtgcagaccctgtccctttggctcatccaccaccgcaagcacgcgggacccatcgtctccgtgtggcaccgcgagctccgcaaagccaaatcaaatagaaagcttacttttctgtatttagcgaatgatgtcatccaaaacagtaaaaggaaaggacctgaattcactagagaatttgaatctgtccttgtggatgctttttctcatgttgccagagaggcagatgaaggctgtaaaaaacctttagaaagattgctgaacatctggcaagaacgaagtgtgtatggcggcgagttcatacagcagctgaagctgtctatggaggactccaagagccctccccccaaagcaacagaagagaagaaatctctgaaacgaacttttcagcaaattcaggaggaggaggatgacgactaccctggcagctactctcctcaggatccttctgcaggacccctcttgactgaggaactaatcaaagctttgcaggatctggaaaatgccgcatcaggggatgctactgtccgacagaaaattgcttctctgccccaggaagtgcaagatgtttctctattggaaaaaataacagacaaagaggcagctgaacgtctttcaaaaacagtagatgaagcatgtctgttactagcagaatataacgggcgcctggcagcagaactggaggaccgtcgccagctggctcggatgttggtggagtatacccagaatcagaaagatgttttgtcggagaaggagaaaaaactagaggaatacaaacagaagcttgcacgagtaacccaggtccgcaaggaactgaaatcccatattcagagcttgccagacctctcactgctgcccaacgtcacagggggcttagcccccctgccctctgctggggacctgttttcaactgactaggatgggtgtcatgtcccagatttctgtttgtaccagcagaaagaagagggcaagtcatggttggaaataaccttctagcccctggttctatcccttcttccgcccagccccccagcctcaagaaagaacctcagactctgattctcctcttcagcctctcatcttgagcacagttcagaacagtggcgactggaatctggtttatattcatatttgcaaagactacagactttttctcccacttcatattttcatgcccccctgttggttttccattcttaactgtctccttatacctaagaagttatgaaaatcatgtgtacttctggaagctttcgaaagaatcttgtccctcatgacagcattttatcatgaaagcagcttctcctttctgggctgggcttgttcaagttcggtgtgggcttccactaaggcacttgtcctggagacgttggctttcccagctgcatctgccccaaaaggttgtaggcacagctgtcgtagcgttgccataaagagtttgccaaatctctgatcctccctttccattgcttctcctagtgatgcacgaagattaggtgcatttattttgtaaacagattggagaatctagcaataagattcaaagctaatctggagcataaaggcacagttcagagacagaataacagggatcacaagcatgaattaaaaggaatttatttgcttcaagttcctagatacaaccttcccatgctgcacttctccactgtcggagcacgttccgaaaaacagaatgccttgatccctggtgggtgcgaaggcagttgttagggatggcaggcattggtgggctccaaaagatgaaggccccacacacaggtgtgctgcatttgggatctgtgtgggtgtttcttggaccctttcttctgggagtagggtacacactaacgtttaatccgctgtctgggtgcatgtccacagtacggtggctaaactcgaacatcactgcaaataggacgctgagcaggtccgtctgtcatgtcacgccactgcacaggtccttgtccccacacgacggggagtacttgcgtcagatgttattgaatagctcgtctcgggcaggggaagcggggagttggggatattaattgggggttttaattctattatcatgtcagctgacattatgactatataatgtagttagagacaatttttatcttgcttatagtaaaggttcagcctgccaattgtaaatcattctaatttggcaggcttatttttgacattggaaagggcagaaagcgatttgccccagtagtgtaataggagttatagaccagaggctgaaacccaaactatataaaaaggaattcagtggagggggctttgtaatctccattaatttgtgttgctacttccaggatcaccaaaaattacatgtaattttacatgttaaacacattgaaacataacctatgtttataaagcataacgggcttcccttccagaagctctcctgcttgtcatgaagtgagaacaatgaaaagtcatagcagatactcagtttaactctgtgtagaacctagtagtgtttgagctgttattcagatttgaattcagactgtgtgttgtttgcttatggacactgcctgtcgttctgtcactgttaaattaatgagtctataaggtttttcttccagaggccataggtgacatcactaaaattgcaagataaattgtaatctttgctgctgctgcactccccaacctctcccccaccccccgtggtgtgctgctttctagatgagcgtgttttggagcaggcccatctgggacactctatgctttcaccaaggaagtgcgatctgagcagccacaatccagccaaaagaggatcgtagatatttgctctgatcaactagatgaaaatatagcagaatggatttagcccactgctctgttttatccaactgagtctctgaccagcaattggtgcataattattacagcaaaagttaagaaatgaaactgtagcaattatgtaaatgaatgtgttggcctcttaatacctgttactagtggacttcctgtgaggaagttagttttttgttttgatgaaatgctttcgttttttaaatcttaattctgctgtccacatcctcccaaagtgtgcttacttcatttgtttaatttaaatgaactttcctccttgtatgtatgaggtgacttggtgggtggggtgggtggtttttgtttttgtgttttttctttcttagggcatctgtaggcctcaaaggacctttcctttaggtcatattcctcagaaagtcttcaatcttcccttgtttttgtttgtttgtttttcttaaagaatattttcaaagcttaaatttgtatattaatttaggactatttagaagtataggctgtcgttggcggcagcagtatattctgaaatgtctcatagatatatatttttgaataaagatggtgttgttgaacaaaaaaaaat

SEQ ID NO: 311337 - DNA, 3721 bp, Homo sapiens
ctccaaagggacggttttctagagctccgacgcctctcggtgcccctctgctccggcccttgccctttgacctcgctctcgcggcagggtgagaggtcgggtggccatcttgtggcggcggcgcgggcggctgttactgcggagacccatcccctcccccttctcgcacccctggcagtctgtcagtcggtaaaaagtcccgcagcctgtcaggtgaggccccggcctcgtgccgtcgctcttcccgccgcactgggcggcccaggccgctccctgccgggcctcactgccgccaccatgtcctccttctctgagtcggcgctggagaagaagctctcggagctgagcaactctcagcagagcgtgcagaccctgtccctttggctcatccaccaccgcaagcacgcgggacccatcgtctccgtgtggcaccgcgagctccgcaaagccaaatcaaatagaaagcttacttttctgtatttagcgaatgatgtcatccaaaacagtaaaaggaaaggacctgaattcactagagaatttgaatctgtccttgtggatgctttttctcatgttgccagagaggcagatgaaggctgtaaaaaacctttagaaagattgctgaacatctggcaagaacgaagtgtgtatggcggcgagttcatacagcagctgaagctgtctatggaggactccaagagccctccccccaaagcaacagaagagaagaaatctctgaaacgaacttttcagcaaattcaggaggaggaggatgacgactaccctggcagctactctcctcaggatccttctgcaggacccctcttgactgaggaactaatcaaagctttgcaggatctggaaaatgccgcatcaggggatgctactgtccgacagaaaattgcttctctgccccaggaagtgcaagatgtttctctattggaaaaaataacagacaaagaggcagctgaacgtctttcaaaaacagtagatgaagcatgtctgttactagcagaatataacgggcgcctggcagcagaactggaggaccgtcgccagctggctcggatgttggtggagtatacccagaatcagaaagatgttttgtcggagaaggagaaaaaactagaggaatacaaacagaagcttgcacgagtaacccaggtccgcaaggaactgaaatcccatattcagagcttgccagacctctcactgctgcccaacgtcacagggggcttagcccccctgccctctgctggggacctgttttcaactgactaggatgggtgtcatgtcccagatttctgtttgtaccagcagaaagaagagggcaagtcatggttggaaataaccttctagcccctggttctatcccttcttccgcccagccccccagcctcaagaaagaacctcagactctgattctcctcttcagcctctcatcttgagcacagttcagaacagtggcgactggaatctggtttatattcatatttgcaaagactacagactttttctcccacttcatattttcatgcccccctgttggttttccattcttaactgtctccttatacctaagaagttatgaaaatcatgtgtacttctggaagctttcgaaagaatcttgtccctcatgacagcattttatcatgaaagcagcttctcctttctgggctgggcttgttcaagttcggtgtgggcttccactaaggcacttgtcctggagacgttggctttcccagctgcatctgccccaaaaggttgtaggcacagctgtcgtagcgttgccataaagagtttgccaaatctctgatcctccctttccattgcttctcctagtgatgcacgaagattaggtgcatttattttgtaaacagattggagaatctagcaataagattcaaagctaatctggagcataaaggcacagttcagagacagaataacagggatcacaagcatgaattaaaaggaatttatttgcttcaagttcctagatacaaccttcccatgctgcacttctccactgtcggagcacgttccgaaaaacagaatgccttgatccctggtgggtgcgaaggcagttgttagggatggcaggcattggtgggctccttcttggaccctttcttctgggagtagggtacacactaacgtttaatccgctgtctgggtgcatgtccacagtacggtggctaaactcgaacatcactgcaaataggacgctgagcaggtccgtctgtcatgtcacgccactgcacaggtccttgtccccacacgacggggagtacttgcgtcagatgttattgaatagctcgtctcgggcaggggaagcggggagttggggatattaattgggggttttaattctattatcatgtcagctgacattatgactatataatgtagttagagacaatttttatcttgcttatagtaaaggttcagcctgccaattgtaaatcattctaatttggcaggcttatttttgacattggaaagggcagaaagcgatttgccccagtagtgtaataggagttatagaccagaggctgaaacccaaactatataaaaaggaattcagtggagggggctttgtaatctccattaatttgtgttgctacttccaggatcaccaaaaattacatgtaattttacatgttaaacacattgaaacataacctatgtttataaagcataacgggcttcccttccagaagctctcctgcttgtcatgaagtgagaacaatgaaaagtcatagcagatactcagtttaactctgtgtagaacctagtagtgtttgagctgttattcagatttgaattcagactgtgtgttgtttgcttatggacactgcctgtcgttctgtcactgttaaattaatgagtctataaggtttttcttccagaggccataggtgacatcactaaaattgcaagataaattgtaatctttgctgctgctgcactccccaacctctcccccaccccccgtggtgtgctgctttctagatgagcgtgttttggagcaggcccatctgggacactctatgctttcaccaaggaagtgcgatctgagcagccacaatccagccaaaagaggatcgtagatatttgctctgatcaactagatgaaaatatagcagaatggatttagcccactgctctgttttatccaactgagtctctgaccagcaattggtgcataattattacagcaaaagttaagaaatgaaactgtagcaattatgtaaatgaatgtgttggcctcttaatacctgttactagtggacttcctgtgaggaagttagttttttgttttgatgaaatgctttcgttttttaaatcttaattctgctgtccacatcctcccaaagtgtgcttacttcatttgtttaatttaaatgaactttcctccttgtatgtatgaggtgacttggtgggtggggtgggtggtttttgtttttgtgttttttctttcttagggcatctgtaggcctcaaaggacctttcctttaggtcatattcctcagaaagtcttcaatcttcccttgtttttgtttgtttgtttttcttaaagaatattttcaaagcttaaatttgtatattaatttaggactatttagaagtataggctgtcgttggcggcagcagtatattctgaaatgtctcatagatatatatttttgaataaagatggtgttgttgaacaaaaaaaaat

SEQ ID NO: 311338 - DNA, 3720 bp, Homo sapiens
ctccaaagggacggttttctagagctccgacgcctctcggtgcccctctgctccggcccttgccctttgacctcgctctcgcggcagggtgagaggtcgggtggccatcttgtggcggcggcgcgggcggctgttactgcggagacccatcccctcccccttctcgcacccctggcagtctgtcagtcggtaaaaagtcccgcagcctgtcaggtgaggccccggcctcgtgccgtcgctcttcccgccgcactgggcggcccaggccgctccctgccgggcctcactgccgccaccatgtcctccttctctgagtcggcgctggagaagaagctctcggagctgagcaactctcagcagagcgtgcagaccctgtccctttggctcatccaccaccgcaagcacgcgggacccatcgtctccgtgtggcaccgcgagctccgcaaagccaaatcaaatagaaagcttacttttctgtatttagcgaatgatgtcatccaaaacagtaaaaggaaaggacctgaattcactagagaatttgaatctgtccttgtggatgctttttctcatgttgccagagaggcagatgaaggctgtaaaaaacctttagaaagattgctgaacatctggcaagaacgaagtgtgtatggcggcgagttcatacagcagctgaagctgtctatggaggactccaagagccctccccccaaagcaacagaagagaagaaatctctgaaacgaacttttcagcaaattcaggaggaggaggatgacgactaccctggcagctactctcctcaggatccttctgcaggacccctcttgactgaggaactaatcaaagctttgcaggatctggaaaatgccgcatcaggggatgctactgtccgacagaaaattgcttctctgccccaggaagtgcaagatgtttctctattggaaaaaataacagacaaagaggcagctgaacgtctttcaaaaacagtagatgaagcatgtctgttactagcagaatataacgggcgcctggcagcagaactggaggaccgtcgccagctggctcggatgttggtggagtatacccagaatcagaaagatgttttgtcggagaaggagaaaaaactagaggaatacaaacagaagcttgcacgagtaacccaggtccgcaaggaactgaaatcccatattcagagcttgccagacctctcactgctgcccaacgtcacagggggcttagcccccctgccctctgctggggacctgttttcaactgactaggatgggtgtcatgtcccagatttctgtttgtaccagcagaaagaagagggcaagtcatggttggaaataaccttctagcccctggttctatcccttcttccgcccagccccccagcctcaagaaagaacctcagactctgattctcctcttcagcctctcatcttgagcacagttcagaacagtggcgactggaatctggtttatattcatatttgcaaagactacagactttttctcccacttcatattttcatgcccccctgttggttttccattcttaactgtctccttatacctaagaagttatgaaaatcatgtgtacttctggaagctttcgaaagaatcttgtccctcatgacagcattttatcatgaaagcagcttctcctttctgggctgggcttgttcaagttcggtgtgggcttccactaaggcacttgtcctggagacgttggctttcccagctgcatctgccccaaaaggttgtaggcacagctgtcgtagcgttgccataaagagtttgccaaatctctgatcctccctttccattgcttctcctagtgatgcacgaagattaggtgcatttattttgtaaacagattggagaatctagcaataagattcaaagctaatctggagcataaaggcacagttcagagacagaataacagggatcacaagcatgaattaaaaggaatttatttgcttcaagttcctagatacaaccttcccatgctgcacttctccactgtcggagcacgttccgaaaaacagaatgccttgatccctggtgggtgcgaaggcagttgttagggatggcaggcattggtgggctccaaaagatgaaggccccacacacaggtgtgctgcatttgggatctgtgtgggtgtttcttggaccctttcttctgggagtagggtacacactaacgtttaatccgctgtctgggtgcatgtccacagtacggtggctaaactcgaacatcactgcaaataggacgctgagcaggtccgtctgtcatgtcacgccactgcacaggtccttgtccccacacgacggggagtacttgcgtcagatgttattgaatagctcgtctcgggcaggggaagcggggagttggggatattaattgggggttttaattctattatcatgtcagctgacattatgactatataatgtagttagagacaatttttatcttgcttatagtaaaggttcagcctgccaattgtaaatcattctaatttggcaggcttatttttgacattggaaagggcagaaagcgatttgccccagtagtgtaataggagttatagaccagaggctgaaacccaaactatataaaaaggaattcagtggagggggctttgtaatctccattaatttgtgttgctacttccaggatcaccaaaaattacatgtaattttacatgttaaacacattgaaacataacctatgtttataaagcataacgggcttcccttccagaagctctcctgcttgtcatgaagtgagaacaatgaaaagtcatagcagatactcagtttaactctgtgtagaacctagtagtgtttgagctgttattcagatttgaattcagactgtgtgttgtttgcttatggacactgcctgtcgttctgtcactgttaaattaatgagtctataaggtttttcttccagaggccataggtgacatcactaaaattgcaagataaattgtaatctttgctgctgctgcactccccaacctctcccccaccccccgtggtgtgctgctttctagatgagcgtgttttggagcaggcccatctgggacactctatgctttcaccaaggaagtgcgatctgagcagccacaatccagccaaaagaggatcgtagatatttgctctgatcaactagatgaaaatatagcagaatggatttagcccactgctctgttttatccaactgagtctctgaccagcaattggtgcataattattacagcaaaactgttactagtggacttcctgtgaggaagttagttttttgttttgatgaaatgctttcgttttttaaatcttaattctgctgtccacatcctcccaaagtgtgcttacttcatttgtttaatttaaatgaactttcctccttgtatgtatgaggtgacttggtgggtggggtgggtggtttttgtttttgtgttttttctttcttagggcatctgtaggcctcaaaggacctttcctttaggtcatattcctcagaaagtcttcaatcttcccttgtttttgtttgtttgtttttcttaaagaatattttcaaagcttaaatttgtatattaatttaggactatttagaagtataggctgtcgttggcggcagcagtatattctgaaatgtctcatagatatatatttttgaataaagatggtgttgttgaacaaaaaaaaat

SEQ ID NO: 311339 - DNA, 4079 bp, Homo sapiens
ttaatattaaaaaaaaaaaaaaagccctaaccctgttacattgtgtccttttgaaggtactattggtctgggaaacagaagtccgcagggcctccctaatgtctttggagcttaaaccccttgtatatttgccccttttcaataaacgccccacgctgatagcacagaggagcccggcatgcactgtatgggaaagcagtccaccttgttacagttttaaatttcttgctatcttagcattcagataccaatggcttgctaaaagaaaaaaagaaatgtaatgtctttttattctcaggtcaatcgctcacactttgttttcagaatcattgttttatatattattgttttttcagtttttttttttttttttgttccagaaaagattttttgttttgttaacttaaaaatgggcagaaagtattcaagaaaaacaatgtgaactgctttagctttctggggatttttaaggatagcttttctgctgaagccaatttcaaggggaaaagttaagcactcccactttcaaaaaaaaaaaaaaataataacccacacacacaaagagtgttgaggacttgtagcttaaaaaaaataagttttaaaaactgactttctgtatttatgatagatatgaccatttttggtgttgagtagattgttgcattggaaatgaactgaagcagtatggtagattttaaaaggaaaaaaaaaaaaaaaccttttgtgtacatttagctttttgtatggtccagctgacagctcctcatttgatgttgtcttgttcattcctagcagatgatagattgcaatccgttgattcgcctaagcttttctccccttgtcccttaattccactttctctttcttgtcccttaattccactttctctttccttctcccacctcccgtcctataatctcccacttaaggtagctgccttcatttcttagagggagctgcagaattattttataaaactaaagaaagaatttcaagggattctaggggtcattaggatcctcacagattatttttggttggggagttgaaactttttaaaggcatataattctagttacctgtgtctgttagctttgtgcatttattttttatttatccttcttttggcttttttttctttgtaccccttcttttcctccttgtttggtaggagcttcaaatattctttttttttctatactaaaggatttgtttccatttgtgtaattggctgtgtacttttcttttctaaaaaaagtttttggttagggatttggtttttggttttgtgtttgttttttctttcctctctcagaaaaaaaaatttcatgctttaaataaaatccaaagacacaccctttcactgctgatgcagaaaaaagggaaagggttcttgttacttgagaatttgtttctgatttaaacaaacaagacttagtttaataaaagaaagagaaaaacaaaagattcccaggttgttatgtgcttcttctgcaagcagagaggcaaatgttaatgacaattccatataccaaaagacacattttttacttcaaagttttgtccttgtgttaggcagtctgagcagcgagtgatccagagcgcagccaacaaagcagcagatagcagtgtacagaaagcaaaaaaggaactgtatgtgaggcacttgtttctgttaatatccatattcctgttaacacacaccctttctcatgtaaaaagaaaaataaataaatggtctgaactttgaaaactttgtgctgctaaaacatagattttggagacaaataaatagatgctttgctgtttcactttcatagctaaacatcaacagaaaccatctccccttgcccccaaagtgtgaaatccttcttcccttcgttttcttccttatgtttcaaaagggaactttgaagactgtgaatacaggttccattggtcacctttcgggcttctttccccagtgctgaagccactcatcgactttgcaaaagactggagcattccaagatctgaaaatggattttttttctttttttcttttttagccgggactattttatttttatgaatttgtttttagtttaatgaaatagtagatcctgaaatgttgtacatatttctaactaggctgatgcacagtgcaaattccttttttaattgttttttttaagtagaaatactaaagaaagaataccatctaactattcataccagtatccagttgtagcataaggtgtcaaaagcaagtacgcaaaacatttactgttttaacaagctatttccttttaacaagaaatcttgtatttcttcctgtgtttgagatgaacatttttaaattttaaagttgtacagttttttgttttccattattttatcttgtttgtaactctatgaaatatatatatatatattttttgccatttaactgttgtatgttactctgtgtctgtaccatatagaaaaaaaattgtttttgtttttggttctctatgtgatatcagttaacaatgtaacactagctttacctgtcaaattctgctaggtcttctctgaaaacgttgtttttaaaaatgatattgcttggtaatagtgcaatttctatccttttccctcccccctcaacttttaagttcttttctttataattttgctgccccctccctgatggtttgggttttgtttttgtttttgttttttttttcatggagctactatgccatcctccctctgtgaggcagagtgactgtcagtgttttgttatgccatgccttgagctgtgggtgtttggcgacaataaggtggttgaatagatgggctgagcacacttccacccacctagtgttctcagaggggttatgtgattgtttcaacctggagtgggttgcacccttaatgctttcctctgcaactaaaccgcccacatatatgttcattgaaaaaagtaagaataattctcagcactaacccagaagtagcaaagcagtcagtgatggtgaacattagaggtcaaacatgagttagatgtttgtgggctgacagccatcgtggctatgaccagtactatttacaaagcatgaattcactacaatgctcaactgtttgtttagctttatctcacttggggaatttattcctgtctgctgcattgtaggtagctgggtaggatatatttccacttgctttttaaattagttcttcacctccattgacactcgttttttggttttctccctatagtgtgggttggtgctagacaccagtctgacccacagaatgggagttatttcatccatctttcctccatccttccaaaaaccacatatctacacaaggaaaaatttaatacatctaggaattttttttttaattacaagctatttaaagagatgaatgtggccaaagttttacacaattgaaaataaagtaaaacagacggcatgtgtttaaacctgagtttatcaggcatggcaggaagttgcaggagagagaggcagtgacccaagccagtgcacttgatgttcatggacatatattttttttaaataataaattaaaacattttaaatagaagcataaattgagttgtttgttggcgctgagatactgcccactgtgaaacaaagctttgactagttttttgtttgtttactttcttcaggggggaggggggcaagtttgggtaggaaagaaagcataaatgaacgtgaccctgaggtgaagaggtatatgaacagcctttgcaatgtacaaaaagaaaaaaaaacaaaaaacaacaaaaaaaatagagcaagtgaaaccaaaaatgatgttcttggtgtttttctataatgtagtcttgttagcttttttgttactgtaacaatgctgatctcgaactgtaccaaaatacatggagactaacaaacagaaccacatggaactttcaaactgaaaaaaaaatttgtcacaaaaactttgttgtcatagttaagttgattgtagatggtaattgaatatactcctttgaaaatatttcatcaagtatgtttcctgctcattgtgatacattaaaaaaaaaatatgagcaaaaaaaaatg

SEQ ID NO: 311340 - DNA, 430 bp, Homo sapiens
ataagtatgggttggagacccttccaagggttcgcccgttcttttcccctttcctccctcccccggaggaaatagaggagaaggggcctcccttgtcaccttccctcccaccccgtctcagccctgtgctcctggaggccctgctcccaaaaccgctggaaggactggggcactttctgccacagtagaacacagacagggcttcagatcacccacgcctgttttcagctgtgggtggccatgcagacacgcgccctggcatgtggggcctgggtgggcaggcaggacctgggccctcccacccatcagagcccactcaggaccagcgttcggagctcccacctggacgcatccctcaccacgtccggatttccttctttggatggaatgtaacgcgatctctatttaataaaggcaggctttgttggta

SEQ ID NO: 311341 - DNA, 2331 bp, Homo sapiens
cgccacgtgacccgcccagggcagggtcggggctgggctgggggccgcgagcccaggcgtctgagacctactgactggccgcgggcagggctgacaggcggtggggcggctcggcccctggcggagtcggcggcgggcggggacgcggcgctgggaggacgcggcggcgctgggaacggacgcctgggcgccccgaggcgccgggatgtggagcggcccaccccagccagaccagggcctcccgccgccccttgcagctgtcccggtcccctggaagagcacggacccctgccaaggccacagggagtccccaggagccctggtggagacctctgcaggggaggaggcccaaggccaggagggccccgcagccgcccagctggacgtgttgcgcctgcgcagctcttccatggagatccgagagaagggctccgagttcctgaaggaggagctgcacagagcgcagaaggagctgaagctaaaggacgaggaatgtgagcggctgtccaaggtgcgggagcagctagaacaggagctggaagagctgacggccagcctgtttgaggaagctcacaagatggttcgagaagccaacatgaagcaggcggcatcagaaaagcagctgaaggaggctcggggcaagatcgacatgctgcaggcagaggtgacagccttgaagacgctggtcatcacgtccacaccagcctctcccaaccgcgagcttcacccccagctgctgagccccaccaaggccgggccccgaaagggccactctcgccacaagagcaccagcagcaccctctgccccgccgtgtgtcccgctgcgggacacaccctcaccccagacagagagggcaaggaggtggacacaatcctgtttgcagagttccaggcctggagggaatcccccaccctggacaagacctgccccttcctggaaagggtgtaccgagaggacgtgggcccctgcctggacttcacaatgcaggagctctcggtgctggtacgggccgccgtggaggacaacacgctcaccattgagccggtggcttcgcagacgctgcccacagtgaaggtggccgaggttgactgtagcagcaccaacacatgtgccctgagcgggctgacccgcacctgccgccaccgaatccggctcggggactccaaaagccattactacatctcgccatcttcccgggccaggatcaccgcagtgtgcaacttcttcacctacatccgctacatccagcaaggcctggtgcggcaggacgcagagcccatgttctgggagatcatgaggttgcggaaggagatgtcactggccaagctcggcttcttcccccaggaggcttagggcgcggcccaggcctgaaggggagctctgagacagagcaaacacccaccccagaacaagccgacacacagggagacgggggcctggagccagccctgagccagaggcagaatggatggacagacaggccatggaggcagcactgagccagcaccacacgtccatcctgggacagacgggcctggacttcacggcaagacccccctctcttccccactgggttctgccaccaccaggaggatttcaagaaagcaccaaagaccagggagctcggatccatactcggggggcctcagcccttgggaggggacacctgaggcagccagcgccccctccccagtccccagaactgcctgcaggtgccttgttgctggcttgtcttcagaaagggactgttctgggtggctggatctccagggtaccctccaccccagctgccaagccctgggccagcagcacccccttgtggccatcctgtgccttgttcccggtggcctccctattggactactaggaggggctggcagggcctccatagcacagaattgccccaaagccttgttaagatgagtcaagacccctcccccgcttcctcccttcctttcccccttcctccctcccccttcataaaggcctcccttgtcaccttccctcccaccccgtctcagccctgtgctcctggaggccctgctcccaaaaccgctggaaggactggggcactttctgccacagtagaacacagacagggcttcagatcacccacgcctgttttcagctgtgggtggccatgcagacacgcgccctggcatgtggggcctgggtgggcaggcaggacctgggccctcccacccatcagagcccactcaggaccagcgttcggagctcccacctggacgcatccctcaccacgtccggatttccttctttggatggaatgtaacgcgatctctatttaataaaggcaggctttgttggta

SEQ ID NO: 311342 - DNA, 2657 bp, Homo sapiens
ctaggccctgcctcagctgggcaggaagaaggagacccagcttggctgggggcagtaggcagggggccccggggtaagtcagccaggcctggatgctgcctccaggctttatgtgggacacctgccagcccacacccctctcttgggccagtcacagaacaaatagggcagaggccaagaaagaaaaggagggggcttggcatagctggacaggggtgctgggggacactgccagtccagggcccggaagccagacagacaacagcacctccaccctgagctcaggcagccctgatccctgaaggacggagtaaactcaacattcaaagagatagaaacataagccctgggcaccacagaaagacgacagaaaccaggagaggctgggatacacctaggtccaacttcatcaaacccagtcctgcccatgacaacggaatagcatggaatagaccagagctggaccaactagagacacaaggcaagaggatccactgtgctgcgaggtcccccatggactctgccaggctgcagtcggccagcccaccccagccagaccagggcctcccgccgccccttgcagctgtcccggtcccctggaagagcacggacccctgccaaggccacagggagtccccaggagccctggtggagacctctgcaggggaggaggcccaaggccaggagggccccgcagccgcccagctggacgtgttgcgcctgcgcagctcttccatggagatccgagagaagggctccgagttcctgaaggaggagctgcacagagcgcagaaggagctgaagctaaaggacgaggaatgtgagcggctgtccaaggtgcgggagcagctagaacaggagctggaagagctgacggccagcctgtttgaggaagctcacaagatggttcgagaagccaacatgaagcaggcggcatcagaaaagcagctgaaggaggctcggggcaagatcgacatgctgcaggcagaggtgacagccttgaagacgctggtcatcacgtccacaccagcctctcccaaccgcgagcttcacccccagctgctgagccccaccaaggccgggccccgaaagggccactctcgccacaagagcaccagcagcaccctctgccccgccgtgtgtcccgctgcgggacacaccctcaccccagacagagagggcaaggaggtggacacaatcctgtttgcagagttccaggcctggagggaatcccccaccctggacaagacctgccccttcctggaaagggtgtaccgagaggacgtgggcccctgcctggacttcacaatgcaggagctctcggtgctggtacgggccgccgtggaggacaacacgctcaccattgagccggtggcttcgcagacgctgcccacagtgaaggtggccgaggttgactgtagcagcaccaacacatgtgccctgagcgggctgacccgcacctgccgccaccgaatccggctcggggactccaaaagccattactacatctcgccatcttcccgggccaggatcaccgcagtgtgcaacttcttcacctacatccgctacatccagcaaggcctggtgcggcaggacgcagagcccatgttctgggagatcatgaggttgcggaaggagatgtcactggccaagctcggcttcttcccccaggaggcttagggcgcggcccaggcctgaaggggagctctgagacagagcaaacacccaccccagaacaagccgacacacagggagacgggggcctggagccagccctgagccagaggcagaatggatggacagacaggccatggaggcagcactgagccagcaccacacgtccatcctgggacagacgggcctggacttcacggcaagacccccctctcttccccactgggttctgccaccaccaggaggatttcaagaaagcaccaaagaccagggagctcggatccatactcggggggcctcagcccttgggaggggacacctgaggcagccagcgccccctccccagtccccagaactgcctgcaggtgccttgttgctggcttgtcttcagaaagggactgttctgggtggctggatctccagggtaccctccaccccagctgccaagccctgggccagcagcacccccttgtggccatcctgtgccttgttcccggtggcctccctattggactactaggaggggctggcagggcctccatagcacagaattgccccaaagccttgttaagatgagtcaagacccctcccccgcttcctcccttcctttcccccttcctccctcccccttcataaaggcctcccttgtcaccttccctcccaccccgtctcagccctgtgctcctggaggccctgctcccaaaaccgctggaaggactggggcactttctgccacagtagaacacagacagggcttcagatcacccacgcctgttttcagctgtgggtggccatgcagacacgcgccctggcatgtggggcctgggtgggcaggcaggacctgggccctcccacccatcagagcccactcaggaccagcgttcggagctcccacctggacgcatccctcaccacgtccggatttccttctttggatggaatgtaacgcgatctctatttaataaaggcaggctttgttggta

SEQ ID NO: 311343 - DNA, 2361 bp, Homo sapiens
cgccacgtgacccgcccagggcagggtcggggctgggctgggggccgcgagcccaggcgtctgagacctactgactggccgcgggcagggctgacaggcggtggggcggctcggcccctggcggagtcggcggcgggcggggacgcggcgctgggaggacgcggcggcgctgggaacggacgcctgggcgccccgaggcgccgggatgtggagcggcccaccccagccagaccagggcctcccgccgccccttgcagctgtcccggtcccctggaagagcacggacccctgccaaggccacagggagtccccaggagccctggtggagacctctgcaggggaggaggcccaaggccaggagggccccgcagccgcccagctggacgtgttgcgcctgcgcagctcttccatggagatccgagagaagggctccgagttcctgaaggaggagctgcacagagcgcagaaggagctgaagctaaaggacgaggaatgtgagcggctgtccaaggtgcgggagcagctagaacaggagctggaagagctgacggccagcctgtttgaggaagctcacaagatggttcgagaagccaacatgaagcaggcggcatcagaaaagcagctgaaggaggctcggggcaagatcgacatgctgcaggcagaggtgacagccttgaagacgctggtcatcacgtccacaccagcctctcccaaccgcgagcttcacccccagctgctgagccccaccaaggccgggccccgaaagggccactctcgccacaagagcaccagcagcaccctctgccccgccgtgtgtcccgctgcgggacacaccctcaccccagacagagagggcaaggaggtggacacaatcctgtttgcagagttccaggcctggagggaatcccccaccctggacaagacctgccccttcctggaaagggtgtaccgagaggacgtgggcccctgcctggacttcacaatgcaggagctctcggtgctggtacgggccgccgtggaggacaacacgctcaccattgagccggtggcttcgcagacgctgcccacagtgaaggtggccgaggttgactgtagcagcaccaacacatgtgccctgagcgggctgacccgcacctgccgccaccgaatccggctcggggactccaaaagccattactacatctcgccatcttcccgggccaggatcaccgcagtgtgcaacttcttcacctacatccgctacatccagcaaggcctggtgcggcaggacgcagagcccatgttctgggagatcatgaggttgcggaaggagatgtcactggccaagctcggcttcttcccccaggaggcttagggcgcggcccaggcctgaaggggagctctgagacagagcaaacacccaccccagaacaagccgacacacagggagacgggggcctggagccagccctgagccagaggcagaatggatggacagacaggccatggaggcagcactgagccagcaccacacgtccatcctgggacagacgggcctggacttcacggcaagacccccctctcttccccactgggttctgccaccaccaggaggatttcaagaaagcaccaaagaccagggagctcggatccatactcggggggcctcagcccttgggaggggacacctgaggcagccagcgccccctccccagtccccagaactgcctgcaggtgccttgttgctggcttgtcttcagaaagggactgttctgggtggctggatctccagggtaccctccaccccagctgccaagccctgggccagcagcacccccttgtggccatcctgtgccttgttcccggtggcctccctattggactactaggaggggctggcagggcctccatagcacagaattgccccaaagccttgttaagatgagtcaagacccctcccccagtccccagaactgcctgcaggtgccttgttgctggcttgtcttcagaaagggactgttctgggtggctggatctccaggtaccctccacccagctgccaagccctgggcagcagcacccccttgtggccctgctcccaaaaccgctggaaggactggggcactttctgccacagtagaacacagacagggcttcagatcacccacgcctgttttcagctgtgggtggccatgcagacacgcgccctggcatgtggggcctgggtgggcaggcaggacctgggccctcccacccatcagagcccactcaggaccagcgttcggagctcccacctggacgcatccctcaccacgtccggatttccttctttggatggaatgtaacgcgatctctatttaataaaggcaggctttgttggta

SEQ ID NO: 311344 - DNA, 2126 bp, Homo sapiens
cctggtggggggaagaaggctcctgctacctcccttcccggcaccctccagagggaccctcagtctggtcttgcaagcatggactcttctgaggagcacgctgggtgccccgcccgagggacatgtcccgtgttcctggccatgagtgcagggactgtccgctacgccccatcaggcctgtgccctgtacttgaggggaacttgagagaagagccctggggcacagacagcccaccccagccagaccagggcctcccgccgccccttgcagctgtcccggtcccctggaagagcacggacccctgccaaggccacagggagtccccaggagccctggtggagacctctgcaggggaggaggcccaaggccaggagggccccgcagccgcccagctggacgtgttgcgcctgcgcagctcttccatggagatccgagagaagggctccgagttcctgaaggaggagctgcacagagcgcagaaggagctgaagctaaaggacgaggaatgtgagcggctgtccaaggtgcgggagcagctagaacaggagctggaagagctgacggccagcctgtttgaggaagctcacaagatggttcgagaagccaacatgaagcaggcggcatcagaaaagcagctgaaggaggctcggggcaaggtggacacaatcctgtttgcagagttccaggcctggagggaatcccccaccctggacaagacctgccccttcctggaaagggtgtaccgagaggacgtgggcccctgcctggacttcacaatgcaggagctctcggtgctggtacgggccgccgtggaggacaacacgctcaccattgagccggtggcttcgcagacgctgcccacagtgaaggtggccgaggttgactgtagcagcaccaacacatgtgccctgagcgggctgacccgcacctgccgccaccgaatccggctcggggactccaaaagccattactacatctcgccatcttcccgggccaggatcaccgcagtgtgcaacttcttcacctacatccgctacatccagcaaggcctggtgcggcaggacgcagagcccatgttctgggagatcatgaggttgcggaaggagatgtcactggccaagctcggcttcttcccccaggaggcttagggcgcggcccaggcctgaaggggagctctgagacagagcaaacacccaccccagaacaagccgacacacagggagacgggggcctggagccagccctgagccagaggcagaatggatggacagacaggccatggaggcagcactgagccagcaccacacgtccatcctgggacagacgggcctggacttcacggcaagacccccctctcttccccactgggttctgccaccaccaggaggatttcaagaaagcaccaaagaccagggagctcggatccatactcggggggcctcagcccttgggaggggacacctgaggcagccagcgccccctccccagtccccagaactgcctgcaggtgccttgttgctggcttgtcttcagaaagggactgttctgggtggctggatctccagggtaccctccaccccagctgccaagccctgggccagcagcacccccttgtggccatcctgtgccttgttcccggtggcctccctattggactactaggaggggctggcagggcctccatagcacagaattgccccaaagccttgttaagatgagtcaagacccctcccccgcttcctcccttcctttcccccttcctccctcccccttcataaaggcctcccttgtcaccttccctcccaccccgtctcagccctgtgctcctggaggccctgctcccaaaaccgctggaaggactggggcactttctgccacagtagaacacagacagggcttcagatcacccacgcctgttttcagctgtgggtggccatgcagacacgcgccctggcatgtggggcctgggtgggcaggcaggacctgggccctcccacccatcagagcccactcaggaccagcgttcggagctcccacctggacgcatccctcaccacgtccggatttccttctttggatggaatgtaacgcgatctctatttaataaaggcaggctttgttggta

SEQ ID NO: 311345 - DNA, 1384 bp, Homo sapiens
gcccagccccttaccaccctgcctgcctccctggtctgccacagctctcggtgctggtacgggccgccgtggaggacaacacgctcaccattgagccggtggcttcgcagacgctgcccacagtgaaggtggccgaggttgactgtagcagcaccaacacatgtgccctgagcgggctgacccgcacctgccgccaccgaatccggctcggggactccaaaagccattactacatctcgccatcttcccgggccaggatcaccgcagtgtgcaacttcttcacctacatccgctacatccagcaaggcctggtgcggcaggacgcagagcccatgttctgggagatcatgaggttgcggaaggagatgtcactggccaagctcggcttcttcccccaggaggcttagggcgcggcccaggcctgaaggggagctctgagacagagcaaacacccaccccagaacaagccgacacacagggagacgggggcctggagccagccctgagccagaggcagaatggatggacagacaggccatggaggcagcactgagccagcaccacacgtccatcctgggacagacgggcctggacttcacggcaagacccccctctcttccccactgggttctgccaccaccaggaggatttcaagaaagcaccaaagaccagggagctcggatccatactcggggggcctcagcccttgggaggggacacctgaggcagccagcgccccctccccagtccccagaactgcctgcaggtgccttgttgctggcttgtcttcagaaagggactgttctgggtggctggatctccagggtaccctccaccccagctgccaagccctgggccagcagcacccccttgtggccatcctgtgccttgttcccggtggcctccctattggactactaggaggggctggcagggcctccatagcacagaattgccccaaagccttgttaagatgagtcaagacccctcccccgcttcctcccttcctttcccccttcctccctcccccttcataaaggcctcccttgtcaccttccctcccaccccgtctcagccctgtgctcctggaggccctgctcccaaaaccgctggaaggactggggcactttctgccacagtagaacacagacagggcttcagatcacccacgcctgttttcagctgtgggtggccatgcagacacgcgccctggcatgtggggcctgggtgggcaggcaggacctgggccctcccacccatcagagcccactcaggaccagcgttcggagctcccacctggacgcatccctcaccacgtccggatttccttctttggatggaatgtaacgcgatctctatttaataaaggcaggctttgttggta

SEQ ID NO: 311346 - DNA, 2345 bp, Homo sapiens
cctggtggggggaagaaggctcctgctacctcccttcccggcaccctccagagggaccctcagtctggtcttgcaagcatggactcttctgaggagcacgctgggtgccccgcccgagggacatgtcccgtgttcctggccatgagtgcagggactgtccgctacgccccatcaggcctgtgccctgtacttgaggggaacttgagagaagagccctggggcacagacagcccaccccagccagaccagggcctcccgccgccccttgcagctgtcccggtcccctggaagagcacggacccctgccaaggccacagggagtccccaggagccctggtggagacctctgcaggggaggaggcccaaggccaggagggccccgcagccgcccagctggacgtgttgcgcctgcgcagctcttccatggagatccgagagaagggctccgagttcctgaaggaggagctgcacagagcgcagaaggagctgaagctaaaggacgaggaatgtgagcggctgtccaaggtgcgggagcagctagaacaggagctggaagagctgacggccagcctgtttgaggaagctcacaagatggttcgagaagccaacatgaagcaggcggcatcagaaaagcagctgaaggaggctcggggcaagatcgacatgctgcaggcagaggtgacagccttgaagacgctggtcatcacgtccacaccagcctctcccaaccgcgagcttcacccccagctgctgagccccaccaaggccgggccccgaaagggccactctcgccacaagagcaccagcagcaccctctgccccgccgtgtgtcccgctgcgggacacaccctcaccccagacagagagggcaaggaggtggacacaatcctgtttgcagagttccaggcctggagggaatcccccaccctggacaagacctgccccttcctggaaagggtgtaccgagaggacgtgggcccctgcctggacttcacaatgcaggagctctcggtgctggtacgggccgccgtggaggacaacacgctcaccattgagccggtggcttcgcagacgctgcccacagtgaaggtggccgaggttgactgtagcagcaccaacacatgtgccctgagcgggctgacccgcacctgccgccaccgaatccggctcggggactccaaaagccattactacatctcgccatcttcccgggccaggatcaccgcagtgtgcaacttcttcacctacatccgctacatccagcaaggcctggtgcggcaggacgcagagcccatgttctgggagatcatgaggttgcggaaggagatgtcactggccaagctcggcttcttcccccaggaggcttagggcgcggcccaggcctgaaggggagctctgagacagagcaaacacccaccccagaacaagccgacacacagggagacgggggcctggagccagccctgagccagaggcagaatggatggacagacaggccatggaggcagcactgagccagcaccacacgtccatcctgggacagacgggcctggacttcacggcaagacccccctctcttccccactgggttctgccaccaccaggaggatttcaagaaagcaccaaagaccagggagctcggatccatactcggggggcctcagcccttgggaggggacacctgaggcagccagcgccccctccccagtccccagaactgcctgcaggtgccttgttgctggcttgtcttcagaaagggactgttctgggtggctggatctccagggtaccctccaccccagctgccaagccctgggccagcagcacccccttgtggccatcctgtgccttgttcccggtggcctccctattggactactaggaggggctggcagggcctccatagcacagaattgccccaaagccttgttaagatgagtcaagacccctcccccgcttcctcccttcctttcccccttcctccctcccccttcataaaggcctcccttgtcaccttccctcccaccccgtctcagccctgtgctcctggaggccctgctcccaaaaccgctggaaggactggggcactttctgccacagtagaacacagacagggcttcagatcacccacgcctgttttcagctgtgggtggccatgcagacacgcgccctggcatgtggggcctgggtgggcaggcaggacctgggccctcccacccatcagagcccactcaggaccagcgttcggagctcccacctggacgcatccctcaccacgtccggatttccttctttggatggaatgtaacgcgatctctatttaataaaggcaggctttgttggta

SEQ ID NO: 311347 - DNA, 1847 bp, Homo sapiens
cgccacgtgacccgcccagggcagggtcggggctgggctgggggccgcgagcccaggcgtctgagacctactgactggccgcgggcagggctgacaggcggtggggcggctcggcccctggcggagtcggcggcgggcggggacgcggcgctgggaggacgcggcggcgctgggaacggacgcctgggcgccccgaggcgccgggatgtggagcggcccaccccagccagaccagggcctcccgccgccccttgcagctgtcccggtcccctggaagagcacggacccctgccaaggccacagggagtccccaggagccctggtggagacctctgcaggggaggaggcccaaggccaggagggccccgcagccgcccagctggacgtgttgcgcctgcgcagctcttccatggagatccgagagaagggctccgagttcctgaaggaggagctgcacagagcgcagaaggagctgaagctaaaggacgaggaatgtgagcggctgtccaaggtgcgggagcagctagaacaggagctggaagagctgacggccagcctgtttgaggaagctcacaagatggttcgagaagccaacatgaagcaggcggcatcagaaaagcagctgaaggaggctcggggcaagatcgacatgctgcaggcagaggtgacagccttgaagacgctggtcatcacgtccacaccagcctctcccaaccgcgagcttcacccccagctgctgagccccaccaaggccgggccccgaaagggccactctcgccacaagagcaccagcagcaccctctgccccgccgtgtgtcccgctgcgggacacaccctcaccccagacagagagggcaaggaggtggacacaatcctgtttgcagagttccaggcctggagggaatcccccaccctggacaagacctgccccttcctggaaagggtgtaccgagaggacgtgggcccctgcctggacttcacaatgcaggagctctcggtgctggtacgggccgccgtggaggacaacacgctcaccattgagccggtggcttcgcagacgctgcccacagtgaaggtggccgaggttgactgtagcagcaccaacacatgtgccctgagcgggctgacccgcacctgccgccaccgaatccggctcggggactccaaaagccattactacatctcgccatcttcccgggccaggatcaccgcagtgtgcaacttcttcacctacatccgctacatccagcaaggcctggtgcggcaggacggaggcttagggcgcggcccaggcctgaaggggagctctgagacagagcaaacacccacccccttgtggccatcctgtgccttgttcccggtggcctccctattggactactaggaggggctggcagggcctccatagcacagaattgccccaaagccttgttaagatgagtcaagacccctcccccgcttcctcccttcctttcccccttcctccctcccccttcataaaggcctcccttgtcaccttccctcccaccccgtctcagccctgtgctcctggaggccctgctcccaaaaccgctggaaggactggggcactttctgccacagtagaacacagacagggcttcagatcacccacgcctgttttcagctgtgggtggccatgcagacacgcgccctggcatgtggggcctgggtgggcaggcaggacctgggccctcccacccatcagagcccactcaggaccagcgttcggagctcccacctggacgcatccctcaccacgtccggatttccttctttggatggaatgtaacgcgatctctatttaataaaggcaggctttgttggta

SEQ ID NO: 311348 - DNA, 1488 bp, Homo sapiens
gcccggttcatctcacagctctgctgcatgctggttcattagctccgccatctccgtgatggatgtcagcggctttccccgggtggctccgctttcccccatgtaagatggaataataagcgcgtctgctccgttcgctgcaggcgcttgatgaaatggctgctgctgctgctgctgctattacagcagggctagtcatgctgttgttgattactacttgaaagcccagtcccagctgagtcagggagcactgcctggctctgcagggacctggggcctcctgctctggactcagatccgcctgtcaggggacccccagcgtggggctggcaggtcacaccgtccccacctctgcccacagatcaccgcagtgtgcaacttcttcacctacatccgctacatccagcaaggcctggtgcggcaggacgcagagcccatgttctgggagatcatgaggttgcggaaggagatgtcactggccaagctcggcttcttcccccaggaggcttagggcgcggcccaggcctgaaggggagctctgagacagagcaaacacccaccccagaacaagccgacacacagggagacgggggcctggagccagccctgagccagaggcagaatggatggacagacaggccatggaggcagcactgagccagcaccacacgtccatcctgggacagacgggcctggacttcacggcaagacccccctctcttccccactgggttctgccaccaccaggaggatttcaagaaagcaccaaagaccagggagctcggatccatactcggggggcctcagcccttgggaggggacacctgaggcagccagcgccccctccccagtccccagaactgcctgcaggtgccttgttgctggcttgtcttcagaaagggactgttctgggtggctggatctccagggtaccctccaccccagctgccaagccctgggccagcagcacccccttgtggccatcctgtgccttgttcccggtggcctccctattggactactaggaggggctggcagggcctccatagcacagaattgccccaaagccttgttaagatgagtcaagacccctcccccgcttcctcccttcctttcccccttcctccctcccccttcataaaggcctcccttgtcaccttccctcccaccccgtctcagccctgtgctcctggaggccctgctcccaaaaccgctggaaggactggggcactttctgccacagtagaacacagacagggcttcagatcacccacgcctgttttcagctgtgggtggccatgcagacacgcgccctggcatgtggggcctgggtgggcaggcaggacctgggccctcccacccatcagagcccactcaggaccagcgttcggagctcccacctggacgcatccctcaccacgtccggatttccttctttggatggaatgtaacgcgatctctatttaataaaggcaggctttgttggta

SEQ ID NO: 311349 - DNA, 1561 bp, Homo sapiens
cgccacgtgacccgcccagggcagggtcggggctgggctgggggccgcgagcccaggcgtctgagacctactgactggccgcgggcagggctgacaggcggtggggcggctcggcccctggcggagtcggcggcgggcggggacgcggcgctgggaggacgcggcggcgctgggaacggacgcctgggcgccccgaggcgccgggatgtggagcggcccaccccagccagaccagggcctcccgccgccccttgcagctgtcccggtcccctggaagagcacggacccctgccaaggccacagggagtccccaggagccctggtggagacctctgcaggggaggaggcccaaggccaggagggccccgcagccgcccagctggacgtgttgcgcctgcgcagctcttccatggagatccgagagaagggctccgagttcctgaaggaggagctgcacagagcgcagaaggagctgaagctaaaggacgaggaatgtgagcggctgtccaaggtgcgggagcagctagaacaggagctggaagagctgacggccagcctgtttgaggaagctcacaagatggttcgagaagccaacatgaagcaggcggcatcagaaaagcagctgaaggaggctcggggcaagatcgacatgctgcaggcagaggtgacagccttgaagacgctggtcatcacgtccacaccagcctctcccaaccgcgagcttcacccccagctgctgagccccaccaaggccgggccccgaaagggccactctcgccacaagagcaccagcagcaccctctgccccgccgtgtgtcccgctgcgggacacaccctcaccccagacagagagggcaaggaggtggacacaatcctgtttgcagagttccaggcctggagggaatcccccaccctggacaagacctgccccttcctggaaagggtgtaccgagaggacgtgggcccctgcctggacttcacaatgcaggagctctcggtgctggtacgggccgccgtggaggacaacacgctcaccattgagccggtggcttcgcagacgctgcccacagtgaaggtggccgaggttgactgtagcagcaccaacacatgtgccctgagcgggctgacccgcacctgccgccaccgaatccggctcggggactccaaaagccattactacatctcgccatcttcccgggccaggtcacgcagtgttgcaaacttttcacctacattcgttaattcagcaaggctggtgccggaggacgccaagccatgtccgcgacaacttaacgtgcggcaggagatgtctggcacaaccgggttatccccaggagtaggcgcggccggacctgaagggaacctgtaaacggcgcaaaccgcccccaaaaagcgactcctgacgacgcgcccgatccaccgtacctaagcgagtgtgtgcccaccattgactccttccgacgcacattgcgaagcgcggatacgtaaacctctccggtgtcccaacatatccacacgcgctatatgctcttggtatacgaccccatatgttgagtaggac

SEQ ID NO: 311350 - DNA, 6046 bp, Homo sapiens
agcggcctgtcgcccaacggcggcctcaggagtgatcgggcagcagtcggccggccagcggacggcagagcgggcggacgggtaggcccggcctgctcttcgcgaggaggaagaaggtggccactctcccggtccccagaacctccccagcccccgcagtccgcccagaccgtaaagggggacgctgaggagccgcggacgctctccccggtgccgccgccgctgccgccgccatggctgccatgatggatcggaagtgagcattagggttaacggctgccggcgccggctcttcaagtcccggctccccggccgcctccacccggggaagcgcagcgcggcgcagctgactgctgcctctcacggccctcgcgaccacaagccctcaggtccggcgcgttccctgcaagactgagcggcggggagtggctcccggccgccggccccggctgcgagaaagatggcggacctggccgagtgcaacatcaaagtgatgtgtcgcttcagacctctcaacgagtctgaagtgaaccgcggcgacaagtacatcgccaagtttcagggagaagacacggtcgtgatcgcgtccaagccttatgcatttgatcgggtgttccagtcaagcacatctcaagagcaagtgtataatgactgtgcaaagaagattgttaaagatgtacttgaaggatataatggaacaatatttgcatatggacaaacatcctctgggaagacacacacaatggagggtaaacttcatgatccagaaggcatgggaattattccaagaatagtgcaagatatttttaattatatttactccatggatgaaaatttggaatttcatattaaggtttcatattttgaaatatatttggataagataagggacctgttagatgtttcaaagaccaacctttcagttcatgaagacaaaaaccgagttccctatgtaaaggggtgcacagagcgttttgtatgtagtccagatgaagttatggataccatagatgaaggaaaatccaacagacatgtagcagttacaaatatgaatgaacatagctctaggagtcacagtatatttcttattaatgtcaaacaagagaacacacaaacggaacaaaagctgagtggaaaactttatctggttgatttagctggtagtgaaaaggttagtaaaactggagctgaaggtgctgtgctggatgaagctaaaaacatcaacaagtcactttctgctcttggaaatgttatttctgctttggctgagggtagtacatatgttccatatcgagatagtaaaatgacaagaatccttcaagattcattaggtggcaactgtagaaccactattgtaatttgctgctctccatcatcatacaatgagtctgaaacaaaatctacactcttatttggccaaagggccaaaacaattaagaacacagtttgtgtcaatgtggagttaactgcagaacagtggaaaaagaagtatgaaaaagaaaaagaaaaaaataagatcctgcggaacactattcagtggcttgaaaatgagctcaacagatggcgtaatggggagacggtgcctattgatgaacagtttgacaaagagaaagccaacttggaagctttcacagtggataaagatattactcttaccaatgataaaccagcaaccgcaattggagttataggaaattttactgatgctgaaagaagaaagtgtgaagaagaaattgctaaattatacaaacagcttgatgacaaggatgaagaaattaaccagcaaagtcaactggtagagaaactgaagacgcaaatgttggatcaggaggagcttttggcatctaccagaagggatcaagacaatatgcaagctgagctgaatcgccttcaagcagaaaatgatgcctctaaagaagaagtgaaagaagttttacaggccctagaagaacttgctgtcaattatgatcagaagtctcaggaagttgaagacaaaactaaggaatatgaattgcttagtgatgaattgaatcagaaatcggcaactttagcgagtatagatgctgagcttcagaaacttaaggaaatgaccaaccaccagaaaaaacgagcagctgagatgatggcatctttactaaaagaccttgcagaaataggaattgctgtgggaaataatgatgtaaagcagcctgagggaactggcatgatagatgaagagttcactgttgcaagactctacattagcaaaatgaagtcagaagtaaaaaccatggtgaaacgttgcaagcagttagaaagcacacaaactgagagcaacaaaaaaatggaagaaaatgaaaaggagttagcagcatgtcagcttcgtatctctcaacatgaagccaaaatcaagtcattgactgaataccttcaaaatgtggaacaaaagaaaagacagttggaggaatctgtcgatgccctcagtgaagaactagtccagcttcgagcacaagagaaagtccatgaaatggaaaaggagcacttaaataaggttcagactgcaaatgaagttaagcaagctgttgaacagcagatccagagccatagagaaactcatcaaaaacagatcagtagtttgagagatgaagtagaagcaaaagcaaaacttattactgatcttcaagaccaaaaccagaaaatgatgttagagcaggaacgtctaagagtagaacatgagaagttgaaagccacagatcaggaaaagagcagaaaactacatgaacttacggttatgcaagatagacgagaacaagcaagacaagacttgaagggtttggaagagacagtggcaaaagaacttcagactttacacaacctgcgcaaactctttgttcaggacctggctacaagagttaaaaagagtgctgagattgattctgatgacaccggaggcagcgctgctcagaagcaaaaaatctcctttcttgaaaataatcttgaacagctcactaaagtgcacaaacagttggtacgtgataatgcagatctccgctgtgaacttcctaagttggaaaagcgacttcgagctacagctgagagagtgaaagctttggaatcagcactgaaagaagctaaagaaaatgcatctcgtgatcgcaaacgctatcagcaagaagtagatcgcataaaggaagcagtcaggtcaaagaatatggccagaagagggcattctgcacagattgctaaacctattcgtcccgggcaacatccagcagcttctccaactcacccaagtgcaattcgtggaggaggtgcatttgttcagaacagccagccagtggcagtgcgaggtggaggaggcaaacaagtgtaatcgtttatacatacccacaggtgttaaaaagtaatcgaagtacgaagaggaacatggtatcaagcagtcattcaatgactataacctctactcccttgggattgtagaattataacttttaaaaaaaatgtataaattatacctggcctgtacagctgtttcctacctactcttcttgtaaactctgctgcttcccaacacaactagagtgcaattttggcatcttaggagggaaaaaggacagtttacaactgtggccctatttattacacagtttgtctatcgtgtcttaaatttagtctttactgtgccaagctaactgtaccttataggactgtactttttgtattttttgtgtatgtttattttttaatctcagtttaaattacctagctgctactgcttcttgtttttcttttcctattaaaacgtcttcctttttttttcttaagagaaaatggaacatttaggttaaatgtctttaaattttaccacttaacaacactacatgcccataaaatatatccagtcagtactgtattttaaaatcccttgaaatgatgatatcagggttaaaattacttgtattgtttctgaagtttgctcctgaaaactactgtttgagcactgaaacgttacaaatgcctaataggcatttgagactgagcaaggctacttgttatctcatgaaatgcctgttgccgagttattttgaatagaaatattttaaagtatcaaaagcagatcttagtttaagggagtttggaaaaggaattatatttctctttttcctgattctgtactcaacaagtcttgatggaattaaaatactctgctttattctggtgagcctgctagctaatataagtattggacaggtaataatttgtcatctttaatattagtaaaatgaattaagatattataggattaaacataattttatacggttagtactttattggccgacctaaatttatagcgtgtggaaattgagaaaaatgaagaaacaggacagatatatgatgaattaaaaatatatataggtcaattttggtctgaaatccctgaggtgtttttaacctgctacactaatttgtacactaatttatttctttagtctagaaatagtaaattgtttgcaagtcactaataatcattagataaattattttcttggccatagccgataattttgtaatcagtactaagtgtatacgtatttttgccactttttcctcagatgattaaagtaagtcaacagcttattttaggaaactgtaaaagtaatagggaaagagatttcactatttgcttcatcagtggtaggggggcggtgactgcaactgtgttagcagaaattcacagagaatggggatttaaggttagcagagaaacttggaaagttctgtgttaggatcttgctggcagaattaactttttgcaaaagttttatacacagatatttgtattaaatttggagccatagtcagaagactcagatcataattggcttatttttctatttccgtaactattgtaatttccacttttgtaataattttgatttaaaatataaatttatttatttatttttttaatagtcaaaaatctttgctgttgtagtctgcaacctctaaaatgattgtgttgcttttaggattgatcagaagaaacactccaaaaattgagatgaaatgttggtgcagccagttataagtaatatagttaacaagcaaaaaaagtgctgccaccttttatgatgattttctaaatggagaaacatttggctgcatccacatagacctttatgttttgttttcagttgaaaacttgcctcctttggcaacattcgtaaatgaagcagaatttttttttctcttttttccaaatatgttagttttgttcttgtaagatgtatcatgggtattggtgctgtgtaatgaacaacgaattttaattagcatgtggttcagaatatacaatgttaggtttttaaaaagtatcttgatggttcttttctatttataatttcagactttcataaagtgtaccaagaatttcataaatttgttttcagtgaactgctttttgctatggtaggtcattaaacacagcacttactcttaaaaatgaaaatttctgatcatctaggatattgacacatttcaatttgcagtgtctttttgactggatatattaacgttcctctgaatggcattgatagatggttcagaagagaaactcaatgaaataaagagaatatttattcatggcgattaattaaattatttgcctaacttaagaaaactactgtgcgtaactctcagtttgtgcttaactccatttgacatgaggtgacagaagagagtctgagtctacctgtggaatatgttggtttattttcagtgcttgaagatacattcacaaatacttggtttgggaagacaccgtttaattttaagttaacttgcatgttgtaaatgcgttttatgtttaaataaagaggaaaattttttgaaatgtaatgactttcttaaaacttaagtgttaggttgattttacatggctgagttcaggccttctgtcttgacagaatagtgactgatatgtcattatatttatgtatattttgtttcctaatgtcttgcagccttttggaccgcagatattaaatgtataggctaaagagct

SEQ ID NO: 311351 - DNA, 5548 bp, Homo sapiens
agcggcctgtcgcccaacggcggcctcaggagtgatcgggcagcagtcggccggccagcggacggcagagcgggcggacgggtaggcccggcctgctcttcgcgaggaggaagaaggtggccactctcccggtccccagaacctccccagcccccgcagtccgcccagaccgtaaagggggacgctgaggagccgcggacgctctccccggtgccgccgccgctgccgccgccatggctgccatgatggatcggaagtgagcattagggttaacggctgccggcgccggctcttcaagtcccggctccccggccgcctccacccggggaagcgcagcgcggcgcagctgactgctgcctctcacggccctcgcgaccacaagccctcaggtccggcgcgttccctgcaagactgagcggcggggagtggctcccggccgccggccccggctgcgagaaagatggcggacctggccgagtgcaacatcaaagtgatgtgtcgcttcagacctctcaacgagtctgaagtgaaccgcggcgacaagtacatcgccaagtttcagggagaagacacggtcgtgatcgcgtccaagccttatgcatttgatcgggtgttccagtcaagcacatctcaagagcaagtgtataatgactgtgcaaagaagattgttaaagatgtacttgaaggatataatggaacaatatttgcatatggacaaacatcctctgggaagacacacacaatggagggtaaacttcatgatccagaaggcatgggaattattccaagaatagtgcaagatatttttaattatatttactccatggatgaaaatttggaatttcatattaaggtttcatattttgaaatatatttggataagataagggacctgttagatgtttcaaagaccaacctttcagttcatgaagacaaaaaccgagttccctatgtaaaggggtgcacagagcgttttgtatgtagtccagatgaagttatggataccatagatgaaggaaaatccaacagacatgtagcagttacaaatatgaatgaacatagctctaggagtcacagtatatttcttattaatgtcaaacaagagaacacacaaacggaacaaaagctgagtggaaaactttatctggttgatttagctggtagtgaaaaggttagtaaaactggagctgaaggtgctgtgctggatgaagctaaaaacatcaacaagtcactttctgctcttggaaatgttatttctgctttggctgagggtagtacatatgttccatatcgagatagtaaaatgacaagaatccttcaagattcattaggtggcaactgtagaaccactattgtaatttgctgctctccatcatcatacaatgagtctgaaacaaaatctacactcttatttggccaaagggccaaaacaattaagaacacagtttgtgtcaatgtggagttaactgcagaacagtggaaaaagaagtatgaaaaagaaaaagaaaaaaataagatcctgcggaacactattcagtggcttgaaaatgagctcaacagatggcgtaatggggagacggtgcctattgatgaacagtttgacaaagagaaagccaacttggaagctttcacagtggataaagatattactcttaccaatgataaaccagcaaccgcaattggagttataggaaattttactgatgctgaaagaagaaagtgtgaagaagaaattgctaaattatacaaacagcttgatgacaaggatgaagaaattaaccagcaaagtcaactggtagagaaactgaagacgcaaatgttggatcaggaggagcttttggcatctaccagaagggatcaagacaatatgcaagctgagctgaatcgccttcaagcagaaaatgatgcctctaaagaagaagtgaaagaagttttacaggccctagaagaacttgctgtcaattatgatcagaagtctcaggaagttgaagacaaaactaaggaatatgaattgcttagtgatgaattgaatcagaaatcggcaactttagcgagtatagatgctgagcttcagaaacttaaggaaatgaccaaccaccagaaaaaacgagcagctgagatgatggcatctttactaaaagaccttgcagaaataggaattgctgtgggaaataatgatgtaaagcagcctgagggaactggcatgatagatgaagagttcactgttgcaagactctacattagcaaaatgaagtcagaagtaaaaaccatggtgaaacgttgcaagcagttagaaagcacacaaactgagagcaacaaaaaaatggaagaaaatgaaaaggagttagcagcatgtcagcttcgtatctctcaacatgaagccaaaatcaagtcattgactgaataccttcaaaatgtggaacaaaagaaaagacagttggaggaatctgtcgatgccctcagtgaagaactagtccagcttcgagcacaagagaaagtccatgaaatggaaaaggagcacttaaataaggttcagactgcaaatgaagttaagcaagctgttgaacagcagatccagagccatagagaaactcatcaaaaacagatcagtagtttgagagatgaagtagaagcaaaagcaaaacttattactgatcttcaagaccaaaaccagaaaatgatgttagagcaggaacgtctaagagtagaacatgagaagttgaaagccacagatcaggaaaagagcagaaaactacatgaacttacggttatgcaagatagacgagaacaagcaagacaagacttgaagggtttggaagagacagtggcaaaagaacttcagactttacacaacctgcgcaaactctttgttcaggacctggctacaagagttaaaaagagtgctgagattgattctgatgacaccggaggcagcgctgctcagaagcaaaaaatctcctttcttgaaaataatcttgaacagctcactaaagtgcacaaacagttggtacgtgataatgcagatctccgctgtgaacttcctaagttggaaaagcgacttcgagctacagctgagagagtgaaagctttggaatcagcactgaaagaagctaaagaaaatgcatctcgtgatcgcaaacgctatcagcaagaagtagatcgcataaaggaagcagtcaggtcaaagaatatggccagaagagggcattctgcacagattgctaaacctattcgtcccgggcaacatccagcagcttctccaactcacccaagtgcaattcgtggaggaggtgcatttgttcagaacagccagccagtggcagtgcgaggtggaggaggcaaacaagtgtaatcgtttatacatacccacaggtgttaaaaagtaatcgaagtacgaagaggaacatggtatcaagcagtcattcaatgactataacctctactcccttgggattgtagaattataacttttaaaaaaaatgtataaattatacctggcctgtacagctgtttcctacctactcttcttgtaaactctgctgcttcccaacacaactagagtgcaattttggcatcttaggagggaaaaaggacagtttacaactgtggccctatttattacacagtttgtctatcgtgtcttaaatttagtctttactgtgccaagctaactgtaccttataggactgtactttttgtattttttgtgtatgtttattttttaatctcagtttaaattacctagctgctactgcttcttgtttttcttttcctattaaaacgtcttcctttttttttcttaagagaaaatggaacatttaggttaaatgtctttaaattttaccacttaacaacactacatgcccataaaatatatccagtcagtactgtattttaaaatcccttgaaatgatgatatcagggttaaaattacttgtattgtttctgaagtttgctcctgaaaactactgtttgagcactgaaacgttacaaatgcctaataggcatttgagactgagcaaggctacttgttatctcatgaaatgcctgttgccgagttattttgaatagaaatattttaaagtatcaaaagcagatcttagtttaagggagtttggaaaaggaattatatttctctttttcctgattctgtactcaacaagtcttgatggaattaaaatactctgctttattctggtgagcctgctagctaatataagtattggacaggtaataatttgtcatctttaatattagtaaaatgaattaagatattataggattaaacataattttatacggttagtactttattggccgacctaaatttatagcgtgtggaaattgagaaaaatgaagaaacaggacagatatatgatgaattaaaaatatatataggtcaattttggtctgaaatccctgaggtgtttttaacctgctacactaatttgtacactaatttatttctttagtctagaaatagtaaattgtttgcaagtcactaataatcattagataaattattttcttggccatagccgataattttgtaatcagtactaagtgtatacgtatttttgccactttttcctcagatgattaaagtaagtcaacagcttattttaggaaactgtaaaagtaatagggaaagagatttcactatttgcttcatcagtggtaggggggcggtgactgcaactgtgttagcagaaattcacagagaatggggatttaaggttagcagagaaacttggaaagttctgtgttaggatcttgctggcagaattaactttttgcaaaagttttatacacagatatttgtattaaatttggagccatagtcagaagactcagatcataattggcttatttttctatttccgtaactattgtaatttccacttttgtaataattttgatttaaaatataaatttatttatttatttttttaatagtcaaaaatctttgctgttgtagtctgcaacctctaaaatgattgtgttgcttttaggattgatcagaagaaacactccaaaaattgagatgaaatgttggtgcagccagttataagtaatatagttaacaagcaaaaaaagtgctgccaccttttatgatgattttctaaatggagaaacatttggctgcatccacatagacctttatgttttgttttcagttgaaaacttgcctcctttggcaacattcgtaaatgaagcagaatttttttttctcttttttccaaatatgttagttttgttcttgtaagatgtatcatgggtattggtgctgtgtaatgaacaacgaattttaattagcatgtggttcagaatatacaatgttaggtttttaaaaagtatcttgatggttcttttctatttataatttcagactttcataaagtgtaccaagaatttcataaatttgttttcagtgaactgctttttgctatggtaggtcattaaacacagcacttactcttaaaaatgaaaatttctgatcattagatttgcctttcattgcgggcttaggcagatctacgcctgaaga

SEQ ID NO: 311352 - DNA, 6495 bp, Homo sapiens
agcggcctgtcgcccaacggcggcctcaggagtgatcgggcagcagtcggccggccagcggacggcagagcgggcggacgggtaggcccggcctgctcttcgcgaggaggaagaaggtggccactctcccggtccccagaacctccccagcccccgcagtccgcccagaccgtaaagggggacgctgaggagccgcggacgctctccccggtgccgccgccgctgccgccgccatggctgccatgatggatcggaagtgagcattagggttaacggctgccggcgccggctcttcaagtcccggctccccggccgcctccacccggggaagcgcagcgcggcgcagctgactgctgcctctcacggccctcgcgaccacaagccctcaggtccggcgcgttccctgcaagactgagcggcggggagtggctcccggccgccggccccggctgcgagaaagatggcggacctggccgagtgcaacatcaaagtgatgtgtcgcttcagacctctcaacgagtctgaagtgaaccgcggcgacaagtacatcgccaagtttcagggagaagacacggtcgtgatcgcgtccaagccttatgcatttgatcgggtgttccagtcaagcacatctcaagagcaagtgtataatgactgtgcaaagaagattgttaaagatgtacttgaaggatataatggaacaatatttgcatatggacaaacatcctctgggaagacacacacaatggagggtaaacttcatgatccagaaggcatgggaattattccaagaatagtgcaagatatttttaattatatttactccatggatgaaaatttggaatttcatattaaggtttcatattttgaaatatatttggataagataagggacctgttagatgtttcaaagaccaacctttcagttcatgaagacaaaaaccgagttccctatgtaaaggggtgcacagagcgttttgtatgtagtccagatgaagttatggataccatagatgaaggaaaatccaacagacatgtagcagttacaaatatgaatgaacatagctctaggagtcacagtatatttcttattaatgtcaaacaagagaacacacaaacggaacaaaagctgagtggaaaactttatctggttgatttagctggtagtgaaaaggttagtaaaactggagctgaaggtgctgtgctggatgaagctaaaaacatcaacaagtcactttctgctcttggaaatgttatttctgctttggctgagggtagtacatatgttccatatcgagatagtaaaatgacaagaatccttcaagattcattaggtggcaactgtagaaccactattgtaatttgctgctctccatcatcatacaatgagtctgaaacaaaatctacactcttatttggccaaagggccaaaacaattaagaacacagtttgtgtcaatgtggagttaactgcagaacagtggaaaaagaagtatgaaaaagaaaaagaaaaaaataagatcctgcggaacactattcagtggcttgaaaatgagctcaacagatggcgtaatggggagacggtgcctattgatgaacagtttgacaaagagaaagccaacttggaagctttcacagtggataaagatattactcttaccaatgataaaccagcaaccgcaattggagttataggaaattttactgatgctgaaagaagaaagtgtgaagaagaaattgctaaattatacaaacagcttgatgacaaggatgaagaaattaaccagcaaagtcaactggtagagaaactgaagacgcaaatgttggatcaggaggagcttttggcatctaccagaagggatcaagacaatatgcaagctgagctgaatcgccttcaagcagaaaatgatgcctctaaagaagaagtgaaagaagttttacaggccctagaagaacttgctgtcaattatgatcagaagtctcaggaagttgaagacaaaactaaggaatatgaattgcttagtgatgaattgaatcagaaatcggcaactttagcgagtatagatgctgagcttcagaaacttaaggaaatgaccaaccaccagaaaaaacgagcagctgagatgatggcatctttactaaaagaccttgcagaaataggaattgctgtgggaaataatgatgtaaagcagcctgagggaactggcatgatagatgaagagttcactgttgcaagactctacattagcaaaatgaagtcagaagtaaaaaccatggtgaaacgttgcaagcagttagaaagcacacaaactgagagcaacaaaaaaatggaagaaaatgaaaaggagttagcagcatgtcagcttcgtatctctcaacatgaagccaaaatcaagtcattgactgaataccttcaaaatgtggaacaaaagaaaagacagttggaggaatctgtcgatgccctcagtgaagaactagtccagcttcgagcacaagagaaagtccatgaaatggaaaaggagcacttaaataaggttcagactgcaaatgaagttaagcaagctgttgaacagcagatccagagccatagagaaactcatcaaaaacagatcagtagtttgagagatgaagtagaagcaaaagcaaaacttattactgatcttcaagaccaaaaccagaaaatgatgttagagcaggaacgtctaagagtagaacatgagaagttgaaagccacagatcaggaaaagagcagaaaactacatgaacttacggttatgcaagatagacgagaacaagcaagacaagacttgaagggtttggaagagacagtggcaaaagaacttcagactttacacaacctgcgcaaactctttgttcaggacctggctacaagagttaaaaagagtgctgagattgattctgatgacaccggaggcagcgctgctcagaagcaaaaaatctcctttcttgaaaataatcttgaacagctcactaaagtgcacaaacagttggtacgtgataatgcagatctccgctgtgaacttcctaagttggaaaagcgacttcgagctacagctgagagagtgaaagctttggaatcagcactgaaagaagctaaagaaaatgcatctcgtgatcgcaaacgctatcagcaagaagtagatcgcataaaggaagcagtcaggtcaaagaatatggccagaagagggcattctgcacagattgctaaacctattcgtcccgggcaacatccagcagcttctccaactcacccaagtgcaattcgtggaggaggtgcatttgttcagaacagccagccagtggcagtgcgaggtggaggaggcaaacaagtgtaatcgtttatacatacccacaggtgttaaaaagtaatcgaagtacgaagaggaacatggtatcaagcagtcattcaatgactataacctctactcccttgggattgtagaattataacttttaaaaaaaatgtataaattatacctggcctgtacagctgtttcctacctactcttcttgtaaactctgctgcttcccaacacaactagagtgcaattttggcatcttaggagggaaaaaggacagtttacaactgtggccctatttattacacagtttgtctatcgtgtcttaaatttagtctttactgtgccaagctaactgtaccttataggactgtactttttgtattttttgtgtatgtttattttttaatctcagtttaaattacctagctgctactgcttcttgtttttcttttcctattaaaacgtcttcctttttttttcttaagagaaaatggaacatttaggttaaatgtctttaaattttaccacttaacaacactacatgcccataaaatatatccagtcagtactgtattttaaaatcccttgaaatgatgatatcagggttaaaattacttgtattgtttctgaagtttgctcctgaaaactactgtttgagcactgaaacgttacaaatgcctaataggcatttgagactgagcaaggctacttgttatctcatgaaatgcctgttgccgagttattttgaatagaaatattttaaagtatcaaaagcagatcttagtttaagggagtttggaaaaggaattatatttctctttttcctgattctgtactcaacaagtcttgatggaattaaaatactctgctttattctggtgagcctgctagctaatataagtattggacaggtaataatttgtcatctttaatattagtaaaatgaattaagatattataggattaaacataattttatacggttagtactttattggccgacctaaatttatagcgtgtggaaattgagaaaaatgaagaaacaggacagatatatgatgaattaaaaatatatataggtcaattttggtctgaaatccctgaggtgtttttaacctgctacactaatttgtacactaatttatttctttagtctagaaatagtaaattgtttgcaagtcactaataatcattagataaattattttcttggccatagccgataattttgtaatcagtactaagtgtatacgtatttttgccactttttcctcagatgattaaagtaagtcaacagcttattttaggaaactgtaaaagtaatagggaaagagatttcactatttgcttcatcagtggtaggggggcggtgactgcaactgtgttagcagaaattcacagagaatggggatttaaggttagcagagaaacttggaaagttctgtgttaggatcttgctggcagaattaactttttgcaaaagttttatacacagatatttgtattaaatttggagccatagtcagaagactcagatcataattggcttatttttctatttccgtaactattgtaatttccacttttgtaataattttgatttaaaatataaatttatttatttatttttttaatagtcaaaaatctttgctgttgtagtctgcaacctctaaaatgattgtgttgcttttaggattgatcagaagaaacactccaaaaattgagatgaaatgttggtgcagccagttataagtaatatagttaacaagcaaaaaaagtgctgccaccttttatgatgattttctaaatggagaaacatttggctgcatccacatagacctttatgttttgttttcagttgaaaacttgcctcctttggcaacattcgtaaatgaagcagaatttttttttctcttttttccaaatatgttagttttgttcttgtaagatgtatcatgggtattggtgctgtgtaatgaacaacgaattttaattagcatgtggttcagaatatacaatgttaggtttttaaaaagtatcttgatggttcttttctatttataatttcagactttcataaagtgtaccaagaatttcataaatttgttttcagtgaactgctttttgctatggtaggtcattaaacacagcacttactcttaaaaatgaaaatttctgatcatctaggatattgacacatttcaatttgcagtgtctttttgactggatatattaacgttcctctgaatggcattgatagatggttcagaagagaaactcaatgaaataaagagaatatttattcatggcaaaaacaaacaaacaaacaaaacaaaaaacaaaaaaaaaaacaaaaaaaaaaaaaaaaaaaaaacaaacaaaaaaagagagggggggcggcgcgcaaggagaatatatcccgagcatcaggagaagggagcacacaaaggtggaggcagcgaagcaccgcgatgatggagggaaaaagagagggtggcacccaatcagaaaggagagcgcgagtattaataaggaaaagagagagagggaggacgaagaggagaataacaaaggagagagagaaggaggggagaacaagagggaaacagagggaggaaccaactatgggagaaaaaagaccacacttatagcagggaggggggcagggagaacaaacaaaagggagagaacaaaaaacacaatacacaagagcagcaattacaaccctcctacagcggaggagaaaaaaaaaacaaagaataatagaggcgaggagtatatacacggagtggagaaaaaacaaaaagaggaaagaatggaggcacggcaggggagaaagacgaaaagctcggcgaaaacagggagaacaaaaaaataagcgagaaaaaaaaaataagaacacagcgggggacacgctcagacgagaaaaaaagaaaaagagaagaaagaagcagaagaaaaagaacaagaaaggagactaagacgagacagagagaaaagaagaagagagaagaaagcagacgagagaaatagacagagctagccatgacatactacgggaagatgaatagaagaagtgaacgatacgacataaacaaagcaacaacaagaagacacggggaaaggagccgtcagggactaagggccgacgagcggcgagagcagaagaccagaca

SEQ ID NO: 311353 - DNA, 5803 bp, Homo sapiens
agcggcctgtcgcccaacggcggcctcaggagtgatcgggcagcagtcggccggccagcggacggcagagcgggcggacgggtaggcccggcctgctcttcgcgaggaggaagaaggtggccactctcccggtccccagaacctccccagcccccgcagtccgcccagaccgtaaagggggacgctgaggagccgcggacgctctccccggtgccgccgccgctgccgccgccatggctgccatgatggatcggaagtgagcattagggttaacggctgccggcgccggctcttcaagtcccggctccccggccgcctccacccggggaagcgcagcgcggcgcagctgactgctgcctctcacggccctcgcgaccacaagccctcaggtccggcgcgttccctgcaagactgagcggcggggagtggctcccggccgccggccccggctgcgagaaagatggcggacctggccgagtgcaacatcaaagtgatgtgtcgcttcagacctctcaacgagtctgaagtgaaccgcggcgacaagtacatcgccaagtttcagggagaagacacggtcgtgatcgcgtccaagccttatgcatttgatcgggtgttccagtcaagcacatctcaagagcaagtgtataatgactgtgcaaagaagattgttaaagatgtacttgaaggatataatggaacaatatttgcatatggacaaacatcctctgggaagacacacacaatggagggtaaacttcatgatccagaaggcatgggaattattccaagaatagtgcaagatatttttaattatatttactccatggatgaaaatttggaatttcatattaaggtttcatattttgaaatatatttggataagataagggacctgttagatgtttcaaagaccaacctttcagttcatgaagacaaaaaccgagttccctatgtaaaggggtgcacagagcgttttgtatgtagtccagatgaagttatggataccatagatgaaggaaaatccaacagacatgtagcagttacaaatatgaatgaacatagctctaggagtcacagtatatttcttattaatgtcaaacaagagaacacacaaacggaacaaaagctgagtggaaaactttatctggttgatttagctggtagtgaaaaggttagtaaaactggagctgaaggtgctgtgctggatgaagctaaaaacatcaacaagtcactttctgctcttggaaatgttatttctgctttggctgagggtagtacatatgttccatatcgagatagtaaaatgacaagaatccttcaagattcattaggtggcaactgtagaaccactattgtaatttgctgctctccatcatcatacaatgagtctgaaacaaaatctacactcttatttggccaaagggccaaaacaattaagaacacagtttgtgtcaatgtggagttaactgcagaacagtggaaaaagaagtatgaaaaagaaaaagaaaaaaataagatcctgcggaacactattcagtggcttgaaaatgagctcaacagatggcgtaatggggagacggtgcctattgatgaacagtttgacaaagagaaagccaacttggaagctttcacagtggataaagatattactcttaccaatgataaaccagcaaccgcaattggagttataggaaattttactgatgctgaaagaagaaagtgtgaagaagaaattgctaaattatacaaacagcttgatgacaaggatgaagaaattaaccagcaaagtcaactggtagagaaactgaagacgcaaatgttggatcaggaggagcttttggcatctaccagaagggatcaagacaatatgcaagctgagctgaatcgccttcaagcagaaaatgatgcctctaaagaagaagtgaaagaagttttacaggccctagaagaacttgctgtcaattatgatcagaagtctcaggaagttgaagacaaaactaaggaatatgaattgcttagtgatgaattgaatcagaaatcggcaactttagcgagtatagatgctgagcttcagaaacttaaggaaatgaccaaccaccagaaaaaacgagcagctgagatgatggcatctttactaaaagaccttgcagaaataggaattgctgtgggaaataatgatgtaaagcagcctgagggaactggcatgatagatgaagagttcactgttgcaagactctacattagcaaaatgaagtcagaagtaaaaaccatggtgaaacgttgcaagcagttagaaagcacacaaactgagagcaacaaaaaaatggaagaaaatgaaaaggagttagcagcatgtcagcttcgtatctctcaacatgaagccaaaatcaagtcattgactgaataccttcaaaatgtggaacaaaagaaaagacagttggaggaatctgtcgatgccctcagtgaagaactagtccagcttcgagcacaagagaaagtccatgaaatggaaaaggagcacttaaataaggttcagactgcaaatgaagttaagcaagctgttgaacagcagatccagagccatagagaaactcatcaaaaacagatcagtagtttgagagatgaagtagaagcaaaagcaaaacttattactgatcttcaagaccaaaaccagaaaatgatgttagagcaggaacgtctaagagtagaacatgagaagttgaaagccacagatcaggaaaagagcagaaaactacatgaacttacggttatgcaagatagacgagaacaagcaagacaagacttgaagggtttggaagagacagtgagtgctgagattgattctgatgacaccggaggcagcgctgctcagaagcaaaaaatctcctttcttgaaaataatcttgaacagctcactaaagtgcacaaacagttggtacgtgataatgcagatctccgctgtgaacttcctaagttggaaaagcgacttcgagctacagctgagagagtgaaagctttggaatcagcactgaaagaagctaaagaaaatgcatctcgtgatcgcaaacgctatcagcaagaagtagatcgcataaaggaagcagtcaggtcaaagaatatggccagaagagggcattctgcacagattgctaaacctattcgtcccgggcaacatccagcagcttctccaactcacccaagtgcaattcgtggaggaggtgcatttgttcagaacagccagccagtggcagtgcgaggtggaggaggcaaacaagtgtaatcgtttatacatacccacaggtgttaaaaagtaatcgaagtacgaagaggaacatggtatcaagcagtcattcaatgactataacctctactcccttgggattgtagaattataacttttaaaaaaaatgtataaattatacctggcctgtacagctgtttcctacctactcttcttgtaaactctgctgcttcccaacacaactagagtgcaattttggcatcttaggagggaaaaaggacagtttacaactgtggccctatttattacacagtttgtctatcgtgtcttaaatttagtctttactgtgccaagctaactgtaccttataggactgtactttttgtattttttgtgtatgtttattttttaatctcagtttaaattacctagctgctactgcttcttgtttttcttttcctattaaaacgtcttcctttttttttcttaagagaaaatggaacatttaggttaaatgtctttaaattttaccacttaacaacactacatgcccataaaatatatccagtcagtactgtattttaaaatcccttgaaatgatgatatcagggttaaaattacttgtattgtttctgaagtttgctcctgaaaactactgtttgagcactgaaacgttacaaatgcctaataggcatttgagactgagcaaggctacttgttatctcatgaaatgcctgttgccgagttattttgaatagaaatattttaaagtatcaaaagcagatcttagtttaagggagtttggaaaaggaattatatttctctttttcctgattctgtactcaacaagtcttgatggaattaaaatactctgctttattctggtgagcctgctagctaatataagtattggacaggtaataatttgtcatctttaatattagtaaaatgaattaagatattataggattaaacataattttatacggttagtactttattggccgacctaaatttatagcgtgtggaaattgagaaaaatgaagaaacaggacagatatatgatgaattaaaaatatatataggtcaattttggtctgaaatccctgaggtgtttttaacctgctacactaatttgtacactaatttatttctttagtctagaaatagtaaattgtttgcaagtcactaataatcattagataaattattttcttggccatagccgataattttgtaatcagtactaagtgtatacgtatttttgccactttttcctcagatgattaaagtaagtcaacagcttattttaggaaactgtaaaagtaatagggaaagagatttcactatttgcttcatcagtggtaggggggcggtgactgcaactgtgttagcagaaattcacagagaatggggatttaaggttagcagagaaacttggaaagttctgtgttaggatcttgctggcagaattaactttttgcaaaagttttatacacagatatttgtattaaatttggagccatagtcagaagactcagatcataattggcttatttttctatttccgtaactattgtaatttccacttttgtaataattttgatttaaaatataaatttatttatttatttttttaatagtcaaaaatctttgctgttgtagtctgcaacctctaaaatgattgtgttgcttttaggattgatcagaagaaacactccaaaaattgagatgaaatgttggtgcagccagttataagtaatatagttaacaagcaaaaaaagtgctgccaccttttatgatgattttctaaatggagaaacatttggctgcatccacatagacctttatgttttgttttcagttgaaaacttgcctcctttggcaacattcgtaaatgaagcagaatttttttttctcttttttccaaatatgttagttttgttcttgtaagatgtatcatgggtattggtgctgtgtaatgaacaacgaattttaattagcatgtggttcagaatatacaatgttaggtttttaaaaagtatcttgatggttcttttctatttataatttcagactttcataaagtgtaccaagaatttcataaatttgttttcagtgaactgctttttgctatggtaggtcattaaacacagcacttactcttaaaaatgaaaatttctgatcatctaggatattgacacatttcaatttgcagtgtctttttgactggatatattaacgttcctctgaatggcattgatagatggttcagaagagaaactcaatgaaataaagagaatatttattcatggcgattaattaaattatttgcctaacttaagaaaactactgtgcgtaactctcagtttgtgcttaactccatttgacatgaggtgacagaagagagtctgagtctacctgtggaatatgttggtttattttcagtgcttgaagatacattcacaaatacttggtttgggaagacaccgtttaattttaagttaacttgcatgttgtaaatgcgttttatgtttaaataaagaggaaaattttttgaaa

SEQ ID NO: 311354 - DNA, 5672 bp, Homo sapiens
agcggcctgtcgcccaacggcggcctcaggagtgatcgggcagcagtcggccggccagcggacggcagagcgggcggacgggtaggcccggcctgctcttcgcgaggaggaagaaggtggccactctcccggtccccagaacctccccagcccccgcagtccgcccagaccgtaaagggggacgctgaggagccgcggacgctctccccggtgccgccgccgctgccgccgccatggctgccatgatggatcggaagtgagcattagggttaacggctgccggcgccggctcttcaagtcccggctccccggccgcctccacccggggaagcgcagcgcggcgcagctgactgctgcctctcacggccctcgcgaccacaagccctcaggtccggcgcgttccctgcaagactgagcggcggggagtggctcccggccgccggccccggctgcgagaaagatggcggacctggccgagtgcaacatcaaagtgatgtgtcgcttcagacctctcaacgagtctgaagtgaaccgcggcgacaagtacatcgccaagtttcagggagaagacacggtcgtgatcgcgtccaagccttatgcatttgatcgggtgttccagtcaagcacatctcaagagcaagtgtataatgactgtgcaaagaagattgttaaagatgtacttgaaggatataatggaacaatatttgcatatggacaaacatcctctgggaagacacacacaatggagggtaaacttcatgatccagaaggcatgggaattattccaagaatagtgcaagatatttttaattatatttactccatggatgaaaatttggaatttcatattaaggtttcatattttgaaatatatttggataagataagggacctgttagatgtttcaaagaccaacctttcagttcatgaagacaaaaaccgagttccctatgtaaaggggtgcacagagcgttttgtatgtagtccagatgaagttatggataccatagatgaaggaaaatccaacagacatgtagcagttacaaatatgaatgaacatagctctaggagtcacagtatatttcttattaatgtcaaacaagagaacacacaaacggaacaaaagctgagtggaaaactttatctggttgatttagctggtagtgaaaaggttagtaaaactggagctgaaggtgctgtgctggatgaagctaaaaacatcaacaagtcactttctgctcttggaaatgttatttctgctttggctgagggtagtacatatgttccatatcgagatagtaaaatgacaagaatccttcaagattcattaggtggcaactgtagaaccactattgtaatttgctgctctccatcatcatacaatgagtctgaaacaaaatctacactcttatttggccaaagggccaaaacaattaagaacacagtttgtgtcaatgtggagttaactgcagaacagtggaaaaagaagtatgaaaaagaaaaagaaaaaaataagatcctgcggaacactattcagtggcttgaaaatgagctcaacagatggcgtaatggggagacggtgcctattgatgaacagtttgacaaagagaaagccaacttggaagctttcacagtggataaagatattactcttaccaatgataaaccagcaaccgcaattggagttataggaaattttactgatgctgaaagaagaaagtgtgaagaagaaattgctaaattatacaaacagcttgatgacaaggatgaagaaattaaccagcaaagtcaactggtagagaaactgaagacgcaaatgttggatcaggaggagcttttggcatctaccagaagggatcaagacaatatgcaagctgagctgaatcgccttcaagcagaaaatgatgcctctaaagaagaagtgaaagaagttttacaggccctagaagaacttgctgtcaattatgatcagaagtctcaggaagttgaagacaaaactaaggaatatgaattgcttagtgatgaattgaatcagaaatcggcaactttagcgagtatagatgctgagcttcagaaacttaaggaaatgaccaaccaccagaaaaaacgagcagctgagatgatggcatctttactaaaagaccttgcagaaataggaattgctgtgggaaataatgatgtaaagcagcctgagggaactggcatgatagatgaagagttcactgttgcaagactctacattagcaaaatgaagtcagaagtaaaaaccatggtgaaacgttgcaagcagttagaaagcacacaaactgagagcaacaaaaaaatggaagaaaatgaaaaggagttagcagcatgtcagcttcgtatctctcaacatgaagccaaaatcaagtcattgactgaataccttcaaaatgtggaacaaaagaaaagacagttggaggaatctgtcgatgccctcagtgaagaactagtccagcttcgagcacaagagaaagtccatgaaatggaaaaggagcacttaaataaggttcagactgcaaatgaagttaagcaagctgttgaacagcagatccagagccatagagaaactcatcaaaaacagatcagtagtttgagagatgaagtagaagcaaaagcaaaacttattactgatcttcaagaccaaaaccagaaaatgatgttagagcaggaacgtctaagagtagaacatgagaagttgaaagccacagatcaggaaaagagcagaaaactacatgaacttacggttatgcaagatagacgagaacaagcaagacaagacttgaagggtttggaagagacagtggcaaaagaacttcagactttacacaacctgcgcaaactctttgttcaggacctggctacaagagttaaaaagagtgctgagattgattctgatgacaccggaggcagcgctgctcagaagcaaaaaatctcctttcttgaaaataatcttgaacagctcactaaagtgcacaaacagttggtacgtgataatgcagatctccgctgtgaacttcctaagttggaaaagcgacttcgagctacagctgagagagtgaaagctttggaatcagcactgaaagaagctaaagaaaatgcatctcgtgatcgcaaacgctatcagcaagaagtagatcgcataaaggaagcagtcaggtcaaagaatatggccagaagagggcattctgcacagattgctaaacctattcgtcccgggcaacatccagcagcttctccaactcacccaagtgcaattcgtggaggaggtgcatttgttcagaacagccagccagtggcagtgcgaggtggaggaggcaaacaagtgtaatcgtttatacatacccacaggtgttaaaaagtaatcgaagtacgaagaggaacatggtatcaagcagtcattcaatgactataacctctactcccttgggattgtagaattataacttttaaaaaaaatgtataaattatacctggcctgtacagctgtttcctacctactcttcttgtaaactctgctgcttcccaacacaactagagtgcaattttggcatcttaggagggaaaaaggacagtttacaactgtggccctatttattacacagtttgtctatcgtgtcttaaatttagtctttactgtgccaagctaactgtaccttataggactgtactttttgtattttttgtgtatgtttattttttaatctcagtttaaattacctagctgctactgcttcttgtttttcttttcctattaaaacgtcttcctttttttttcttaagagaaaatggaacatttaggttaaatgtctttaaattttaccacttaacaacactacatgcccataaaatatatccagtcagtactgtattttaaaatcccttgaaatgatgatatcagggttaaaattacttgtattgtttctgaagtttgctcctgaaaactactgtttgagcactgaaacgttacaaatgcctaataggcatttgagactgagcaaggctacttgttatctcatgaaatgcctgttgccgagttattttgaatagaaatattttaaagtatcaaaagcagatcttagtttaagggagtttggaaaaggaattatatttctctttttcctgattctgtactcaacaagtcttgatggaattaaaatactctgctttattctggtgagcctgctagctaatataagtattggacaggtaataatttgtcatctttaatattagtaaaatgaattaagatattataggattaaacataattttatacggttagtactttattggccgacctaaatttatagcgtgtggaaattgagaaaaatgaagaaacaggacagatatatgatgaattaaaaatatatataggtcaattttggtctgaaatccctgaggtgtttttaacctgctacactaatttgtacactaatttatttctttagtctagaaatagtaaattgtttgcaagtcactaataatcattagataaattattttcttggccatagccgataattttgtaatcagtactaagtgtatacgtatttttgccactttttcctcagatgattaaagtaagtcaacagcttattttaggaaactgtaaaagtaatagggaaagagatttcactatttgcttcatcagtggtaggggggcggtgactgcaactgtgttagcagaaattcacagagaatggggatttaaggttagcagagaaacttggaaagttctgtgttaggatcttgctggcagaattaactttttgcaaaagttttatacacagatatttgtattaaatttggagccatagtcagaagactcagatcataattggcttatttttctatttccgtaactattgtaatttccacttttgtaataattttgatttaaaatataaatttatttatttatttttttaatagtcaaaaatctttgctgttgtagtctgcaacctctaaaatgattgtgttgcttttaggattgatcagaagaaacactccaaaaattgagatgaaatgttggtgcagccagttataagtaatatagttaacaagcaaaaaaagtgctgccaccttttatgatgattttctaaatggagaaacatttggctgcatccacatagacctttatgttttgttttcagttgaaaacttgcctcctttggcaacattcgtaaatgaagcagaatttttttttctcttttttccaaatatgttagttttgttcttgtaagatgtatcatgggtattggtgctgtgtaatgaacaacgaattttaattagcatgtggtttatggtaggtcattaaacacagcacttactcttaaaaatgaaaatttctgatcatctaggatattgacacatttcaatttgcagtgtctttttgactggatatattaacgttcctctgaatggcattgatagatggttcagaagagaaactcaatgaaataaagagaatatttattcatggcggtattattattgggtataaaaaaaaaaaagaaaaaaattgggggggggcggaatttaaattgggggggcaggaaagaaggaagtcaaaagggaggggtgtccaaaggggggggataaggtggtgtagagctctctggcagggggagaagaaagaagggagagag

SEQ ID NO: 311355 - DNA, 5454 bp, Homo sapiens
agcggcctgtcgcccaacggcggcctcaggagtgatcgggcagcagtcggccggccagcggacggcagagcgggcggacgggtaggcccggcctgctcttcgcgaggaggaagaaggtggccactctcccggtccccagaacctccccagcccccgcagtccgcccagaccgtaaagggggacgctgaggagccgcggacgctctccccggtgccgccgccgctgccgccgccatggctgccatgatggatcggaagtgagcattagggttaacggctgccggcgccggctcttcaagtcccggctccccggccgcctccacccggggaagcgcagcgcggcgcagctgactgctgcctctcacggccctcgcgaccacaagccctcaggtccggcgcgttccctgcaagactgagcggcggggagtggctcccggccgccggccccggctgcgagaaagatggcggacctggccgagtgcaacatcaaagtgatgtgtcgcttcagacctctcaacgagtctgaagtgaaccgcggcgacaagtacatcgccaagtttcagggagaagacacggtcgtgatcgcgtccaagccttatgcatttgatcgggtgttccagtcaagcacatctcaagagcaagtgtataatgactgtgcaaagaagattgttaaagatgtacttgaaggatataatggaacaatatttgcatatggacaaacatcctctgggaagacacacacaatggagggtaaacttcatgatccagaaggcatgggaattattccaagaatagtgcaagatatttttaattatatttactccatggatgaaaatttggaatttcatattaaggtttcatattttgaaatatatttggataagataagggacctgttagatgtttcaaagaccaacctttcagttcatgaagacaaaaaccgagttccctatgtaaaggggtgcacagagcgttttgtatgtagtccagatgaagttatggataccatagatgaaggaaaatccaacagacatgtagcagttacaaatatgaatgaacatagctctaggagtcacagtatatttcttattaatgtcaaacaagagaacacacaaacggaacaaaagctgagtggaaaactttatctggttgatttagctggtagtgaaaaggttagtaaaactggagctgaaggtgctgtgctggatgaagctaaaaacatcaacaagtcactttctgctcttggaaatgttatttctgctttggctgagggtagtacatatgttccatatcgagatagtaaaatgacaagaatccttcaagattcattaggtggcaactgtagaaccactattgtaatttgctgctctccatcatcatacaatgagtctgaaacaaaatctacactcttatttggccaaagggccaaaacaattaagaacacagtttgtgtcaatgtggagttaactgcagaacagtggaaaaagaagtatgaaaaagaaaaagaaaaaaataagatcctgcggaacactattcagtggcttgaaaatgagctcaacagatggcgtaatggggagacggtgcctattgatgaacagtttgacaaagagaaagccaacttggaagctttcacagtggataaagatattactcttaccaatgataaaccagcaaccgcaattggagttataggaaattttactgatgctgaaagaagaaagtgtgaagaagaaattgctaaattatacaaacagcttgatgacaaggatgaagaaattaaccagcaaagtcaactggtagagaaactgaagacgcaaatgttggatcaggaggagcttttggcatctaccagaagggatcaagacaatatgcaagctgagctgaatcgccttcaagcagaaaatgatgcctctaaagaagaagtgaaagaagttttacaggccctagaagaacttgctgtcaattatgatcagaagtctcaggaagttgaagacaaaactaaggaatatgaattgcttagtgatgaattgaatcagaaatcggcaactttagcgagtatagatgctgagcttcagaaacttaaggaaatgaccaaccaccagaaaaaacgagcagctgagatgatggcatctttactaaaagaccttgcagaaataggaattgctgtgggaaataatgatgtaaagcagcctgagggaactggcatgatagatgaagagttcactgttgcaagactctacattagcaaaatgaagtcagaagtaaaaaccatggtgaaacgttgcaagcagttagaaagcacacaaactgagagcaacaaaaaaatggaagaaaatgaaaaggagttagcagcatgtcagcttcgtatctctcaacatgaagccaaaatcaagtcattgactgaataccttcaaaatgtggaacaaaagaaaagacagttggaggaatctgtcgatgccctcagtgaagaactagtccagcttcgagcacaagagaaagtccatgaaatggaaaaggagcacttaaataaggttcagactgcaaatgaagttaagcaagctgttgaacagcagatccagagccatagagaaactcatcaaaaacagatcagtagtttgagagatgaagtagaagcaaaagcaaaacttattactgatcttcaagaccaaaaccagaaaatgatgttagagcaggaacgtctaagagtagaacatgagaagttgaaagccacagatcaggaaaagagcagaaaactacatgaacttacggttatgcaagatagacgagaacaagcaagacaagacttgaagggtttggaagagacagtggcaaaagaacttcagactttacacaacctgcgcaaactctttgttcaggacctggctacaagagttaaaaagagtgctgagattgattctgatgacaccggaggcagcgctgctcagaagcaaaaaatctcctttcttgaaaataatcttgaacagctcactaaagtgcacaaacagttggtacgtgataatgcagatctccgctgtgaacttcctaagttggaaaagcgacttcgagctacagctgagagagtgaaagctttggaatcagcactgaaagaagctaaagaaaatgcatctcgtgatcgcaaacgctatcagcaagaagtagatcgcataaaggaagcagtcaggtcaaagaatatggccagaagagggcattctgcacagattgctaaacctattcgtcccgggcaacatccagcagcttctccaactcacccaagtgcaattcgtggaggaggtgcatttgttcagaacagccagccagtggcagtgcgaggtggaggaggcaaacaagtgtaatcgtttatacatacccacaggtgttaaaaagtaatcgaagtacgaagaggaacatggtatcaagcagtcattcaatgactataacctctactcccttgggattgtagaattataacttttaaaaaaaatgtataaattatacctggcctgtacagctgtttcctacctactcttcttgtaaactctgctgcttcccaacacaactagagtgcaattttggcatcttaggagggaaaaaggacagtttacaactgtggccctatttattacacagtttgtctatcgtgtcttaaatttagtctttactgtgccaagctaactgtaccttataggactgtactttttgtattttttgtgtatgtttattttttaatctcagtttaaattacctagctgctactgcttcttgtttttcttttcctattaaaacgtcttcctttttttttcttaagagaaaatggaacatttaggttaaatgtctttaaattttaccacttaacaacactacatgcccataaaatatatccagtcagtactgtattttaaaatcccttgaaatgatgatatcagggttaaaattacttgtattgtttctgaagtttgctcctgaaaactactgtttgagcactgaaacgttacaaatgcctaataggcatttgagactgagcaaggctacttgttatctcatgaaatgcctgttgccgagttattttgaatagaaatattttaaagtatcaaaagcagatcttagtttaagggagtttggaaaaggaattatatttctctttttcctgattctgtactcaacaagtcttgatggaattaaaatactctgctttattctggtgagcctgctagctaatataagtattggacaggtaataatttgtcatctttaatattagtaaaatgaattaagatattataggattaaacataattttatacggttagtactttattggccgacctaaatttatagcgtgtggaaattgagaaaaatgaagaaacaggacagatatatgatgaattaaaaatatatataggtcaattttggtctgaaatccctgaggtgtttttaacctgctacactaatttgtacactaatttatttctttagtctagaaatagtaaattgtttgcaagtcactaataatcattagataaattattttcttggccatagccgataattttgtaatcagtactaagtgtatacgtatttttgccactttttcctcagatgattaaagtaagtcaacagcttattttaggaaactgtaaaagtaatagggaaagagatttcactatttgcttcatcagtggtaggggggcggtgactgcaactgtgttagcagaaattcacagagaatggggatttaaggttagcagagaaacttggaaagttctgtgttaggatcttgctggcagaattaactttttgcaaaagttttatacacagatatttgtattaaatttggagccatagtcagaagactcagatcataattggcttatttttctatttccgtaactattgtaatttccacttttgtaataattttgatttaaaatataaatttatttatttatttttttaatagtcaaaaatctttgctgttgtagtctgcaacctctaaaatgattgtgttgcttttaggattgatcagaagaaacactccaaaaattgagatgaaatgttggtgcagccagttataagtaatatagttaacaagcaaaaaaagtgctgccaccttttatgatgattttctaaatggagaaacatttggctgcatccacatagacctttatgttttgttttcagttgaaaacttgcctcctttggcaacattcgtaaatgaagcagaatttttttttctcttttttccaaatatgttagttttgttcttgaaaaaaaaaaaaaattaaaattaggggaaacccttttaattggaaatcccgggggtggaaaaaaaaaaaaaaccccgcttgggaaaaaacccccggggggaattcccccccaaaaaggttaaaagaaaaaaaaggggggtcctcttcccgctgcaaaaaaaacgggggggggtttttgggaaccccctttc

SEQ ID NO: 311356 - DNA, 4933 bp, Homo sapiens
tccttctggccacgcctacaaactacagataaaatttgatgtctctctaatcaaactcttaagagtagtactcaagaaatggtggtatgcttggcaaataagatcatgaagcttttcatgttcttttttcttttttactggttattgatgacatatgaacattttagaaaatgtaaagaaaattataaacttgtaattttgtttcattcttttgaaatcttatgtataggttagtaaaactggagctgaaggtgctgtgctggatgaagctaaaaacatcaacaagtcactttctgctcttggaaatgttatttctgctttggctgagggtagtacatatgttccatatcgagatagtaaaatgacaagaatccttcaagattcattaggtggcaactgtagaaccactattgtaatttgctgctctccatcatcatacaatgagtctgaaacaaaatctacactcttatttggccaaagggccaaaacaattaagaacacagtttgtgtcaatgtggagttaactgcagaacagtggaaaaagaagtatgaaaaagaaaaagaaaaaaataagatcctgcggaacactattcagtggcttgaaaatgagctcaacagatggcgtaatggggagacggtgcctattgatgaacagtttgacaaagagaaagccaacttggaagctttcacagtggataaagatattactcttaccaatgataaaccagcaaccgcaattggagttataggaaattttactgatgctgaaagaagaaagtgtgaagaagaaattgctaaattatacaaacagcttgatgacaaggatgaagaaattaaccagcaaagtcaactggtagagaaactgaagacgcaaatgttggatcaggaggagcttttggcatctaccagaagggatcaagacaatatgcaagctgagctgaatcgccttcaagcagaaaatgatgcctctaaagaagaagtgaaagaagttttacaggccctagaagaacttgctgtcaattatgatcagaagtctcaggaagttgaagacaaaactaaggaatatgaattgcttagtgatgaattgaatcagaaatcggcaactttagcgagtatagatgctgagcttcagaaacttaaggaaatgaccaaccaccagaaaaaacgagcagctgagatgatggcatctttactaaaagaccttgcagaaataggaattgctgtgggaaataatgatgtaaagcagcctgagggaactggcatgatagatgaagagttcactgttgcaagactctacattagcaaaatgaagtcagaagtaaaaaccatggtgaaacgttgcaagcagttagaaagcacacaaactgagagcaacaaaaaaatggaagaaaatgaaaaggagttagcagcatgtcagcttcgtatctctcaacatgaagccaaaatcaagtcattgactgaataccttcaaaatgtggaacaaaagaaaagacagttggaggaatctgtcgatgccctcagtgaagaactagtccagcttcgagcacaagagaaagtccatgaaatggaaaaggagcacttaaataaggttcagactgcaaatgaagttaagcaagctgttgaacagcagatccagagccatagagaaactcatcaaaaacagatcagtagtttgagagatgaagtagaagcaaaagcaaaacttattactgatcttcaagaccaaaaccagaaaatgatgttagagcaggaacgtctaagagtagaacatgagaagttgaaagccacagatcaggaaaagagcagaaaactacatgaacttacggttatgcaagatagacgagaacaagcaagacaagacttgaagggtttggaagagacagtggcaaaagaacttcagactttacacaacctgcgcaaactctttgttcaggacctggctacaagagttaaaaagagtgctgagattgattctgatgacaccggaggcagcgctgctcagaagcaaaaaatctcctttcttgaaaataatcttgaacagctcactaaagtgcacaaacagttggtacgtgataatgcagatctccgctgtgaacttcctaagttggaaaagcgacttcgagctacagctgagagagtgaaagctttggaatcagcactgaaagaagctaaagaaaatgcatctcgtgatcgcaaacgctatcagcaagaagtagatcgcataaaggaagcagtcaggtcaaagaatatggccagaagagggcattctgcacagattgctaaacctattcgtcccgggcaacatccagcagcttctccaactcacccaagtgcaattcgtggaggaggtgcatttgttcagaacagccagccagtggcagtgcgaggtggaggaggcaaacaagtgtaatcgtttatacatacccacaggtgttaaaaagtaatcgaagtacgaagaggaacatggtatcaagcagtcattcaatgactataacctctactcccttgggattgtagaattataacttttaaaaaaaatgtataaattatacctggcctgtacagctgtttcctacctactcttcttgtaaactctgctgcttcccaacacaactagagtgcaattttggcatcttaggagggaaaaaggacagtttacaactgtggccctatttattacacagtttgtctatcgtgtcttaaatttagtctttactgtgccaagctaactgtaccttataggactgtactttttgtattttttgtgtatgtttattttttaatctcagtttaaattacctagctgctactgcttcttgtttttcttttcctattaaaacgtcttcctttttttttcttaagagaaaatggaacatttaggttaaatgtctttaaattttaccacttaacaacactacatgcccataaaatatatccagtcagtactgtattttaaaatcccttgaaatgatgatatcagggttaaaattacttgtattgtttctgaagtttgctcctgaaaactactgtttgagcactgaaacgttacaaatgcctaataggcatttgagactgagcaaggctacttgttatctcatgaaatgcctgttgccgagttattttgaatagaaatattttaaagtatcaaaagcagatcttagtttaagggagtttggaaaaggaattatatttctctttttcctgattctgtactcaacaagtcttgatggaattaaaatactctgctttattctggtgagcctgctagctaatataagtattggacaggtaataatttgtcatctttaatattagtaaaatgaattaagatattataggattaaacataattttatacggttagtactttattggccgacctaaatttatagcgtgtggaaattgagaaaaatgaagaaacaggacagatatatgatgaattaaaaatatatataggtcaattttggtctgaaatccctgaggtgtttttaacctgctacactaatttgtacactaatttatttctttagtctagaaatagtaaattgtttgcaagtcactaataatcattagataaattattttcttggccatagccgataattttgtaatcagtactaagtgtatacgtatttttgccactttttcctcagatgattaaagtaagtcaacagcttattttaggaaactgtaaaagtaatagggaaagagatttcactatttgcttcatcagtggtaggggggcggtgactgcaactgtgttagcagaaattcacagagaatggggatttaaggttagcagagaaacttggaaagttctgtgttaggatcttgctggcagaattaactttttgcaaaagttttatacacagatatttgtattaaatttggagccatagtcagaagactcagatcataattggcttatttttctatttccgtaactattgtaatttccacttttgtaataattttgatttaaaatataaatttatttatttatttttttaatagtcaaaaatctttgctgttgtagtctgcaacctctaaaatgattgtgttgcttttaggattgatcagaagaaacactccaaaaattgagatgaaatgttggtgcagccagttataagtaatatagttaacaagcaaaaaaagtgctgccaccttttatgatgattttctaaatggagaaacatttggctgcatccacatagacctttatgttttgttttcagttgaaaacttgcctcctttggcaacattcgtaaatgaagcagaatttttttttctcttttttccaaatatgttagttttgttcttgtaagatgtatcatgggtattggtgctgtgtaatgaacaacgaattttaattagcatgtggttcagaatatacaatgttaggtttttaaaaagtatcttgatggttcttttctatttataatttcagactttcataaagtgtaccaagaatttcataaatttgttttcagtgaactgctttttgctatggtaggtcattaaacacagcacttactcttaaaaatgaaaatttctgatcatctaggatattgacacatttcaatttgcagtgtctttttgactggatatattaacgttcctctgaatggcattgatagatggttcagaagagaaactcaatgaaataaagagaatatttattcatggcgattaattaaattatttgcctaacttaagaaaactactgtgcgtaactctcagtttgtgcttaactccatttgacatgaggtgacagaagagagtctgagtctacctgtggaatatgttggtttattttcagtgcttgaagatacattcacaaatacttggtttgggaagacaccgtttaattttaagttaacttgcatgttgtaaatgcgttttatgtttaaataaagaggaaaattttttgaaa

SEQ ID NO: 311357 - DNA, 4170 bp, Homo sapiens
  misc_feature (20)..(20): n is a, c, g, or t
  misc_feature (26)..(26): n is a, c, g, or t
ttttttttgtgtgtgaatangaaatngcttaaattattccaaaccagcttgatgaccaaggatgaagaaattaaccagcaaagtcaactggtagagaaactgaagacgcaaatgttggatcaggaggagcttttggcatctaccagaagggatcaagacaatatgcaagctgagctgaatcgccttcaagcagaaaatgatgcctctaaagaagaagtgaaagaagttttacaggccctagaagaacttgctgtcaattatgatcagaagtctcaggaagttgaagacaaaactaaggaatatgaattgcttagtgatgaattgaatcagaaatcggcaactttagcgagtatagatgctgagcttcagaaacttaaggaaatgaccaaccaccagaaaaaacgagcagctgagatgatggcatctttactaaaagaccttgcagaaataggaattgctgtgggaaataatgatgtaaagcagcctgagggaactggcatgatagatgaagagttcactgttgcaagactctacattagcaaaatgaagtcagaagtaaaaaccatggtgaaacgttgcaagcagttagaaagcacacaaactgagagcaacaaaaaaatggaagaaaatgaaaaggagttagcagcatgtcagcttcgtatctctcaacatgaagccaaaatcaagtcattgactgaataccttcaaaatgtggaacaaaagaaaagacagttggaggaatctgtcgatgccctcagtgaagaactagtccagcttcgagcacaagagaaagtccatgaaatggaaaaggagcacttaaataaggttcagactgcaaatgaagttaagcaagctgttgaacagcagatccagagccatagagaaactcatcaaaaacagatcagtagtttgagagatgaagtagaagcaaaagcaaaacttattactgatcttcaagaccaaaaccagaaaatgatgttagagcaggaacgtctaagagtagaacatgagaagttgaaagccacagatcaggaaaagagcagaaaactacatgaacttacggttatgcaagatagacgagaacaagcaagacaagacttgaagggtttggaagagacagtggcaaaagaacttcagactttacacaacctgcgcaaactctttgttcaggacctggctacaagagttaaaaagagtgctgagattgattctgatgacaccggaggcagcgctgctcagaagcaaaaaatctcctttcttgaaaataatcttgaacagctcactaaagtgcacaaacagttggtacgtgataatgcagatctccgctgtgaacttcctaagttggaaaagcgacttcgagctacagctgagagagtgaaagctttggaatcagcactgaaagaagctaaagaaaatgcatctcgtgatcgcaaacgctatcagcaagaagtagatcgcataaaggaagcagtcaggtcaaagaatatggccagaagagggcattctgcacagattgctaaacctattcgtcccgggcaacatccagcagcttctccaactcacccaagtgcaattcgtggaggaggtgcatttgttcagaacagccagccagtggcagtgcgaggtggaggaggcaaacaagtgtaatcgtttatacatacccacaggtgttaaaaagtaatcgaagtacgaagaggaacatggtatcaagcagtcattcaatgactataacctctactcccttgggattgtagaattataacttttaaaaaaaatgtataaattatacctggcctgtacagctgtttcctacctactcttcttgtaaactctgctgcttcccaacacaactagagtgcaattttggcatcttaggagggaaaaaggacagtttacaactgtggccctatttattacacagtttgtctatcgtgtcttaaatttagtctttactgtgccaagctaactgtaccttataggactgtactttttgtattttttgtgtatgtttattttttaatctcagtttaaattacctagctgctactgcttcttgtttttcttttcctattaaaacgtcttcctttttttttcttaagagaaaatggaacatttaggttaaatgtctttaaattttaccacttaacaacactacatgcccataaaatatatccagtcagtactgtattttaaaatcccttgaaatgatgatatcagggttaaaattacttgtattgtttctgaagtttgctcctgaaaactactgtttgagcactgaaacgttacaaatgcctaataggcatttgagactgagcaaggctacttgttatctcatgaaatgcctgttgccgagttattttgaatagaaatattttaaagtatcaaaagcagatcttagtttaagggagtttggaaaaggaattatatttctctttttcctgattctgtactcaacaagtcttgatggaattaaaatactctgctttattctggtgagcctgctagctaatataagtattggacaggtaataatttgtcatctttaatattagtaaaatgaattaagatattataggattaaacataattttatacggttagtactttattggccgacctaaatttatagcgtgtggaaattgagaaaaatgaagaaacaggacagatatatgatgaattaaaaatatatataggtcaattttggtctgaaatccctgaggtgtttttaacctgctacactaatttgtacactaatttatttctttagtctagaaatagtaaattgtttgcaagtcactaataatcattagataaattattttcttggccatagccgataattttgtaatcagtactaagtgtatacgtatttttgccactttttcctcagatgattaaagtaagtcaacagcttattttaggaaactgtaaaagtaatagggaaagagatttcactatttgcttcatcagtggtaggggggcggtgactgcaactgtgttagcagaaattcacagagaatggggatttaaggttagcagagaaacttggaaagttctgtgttaggatcttgctggcagaattaactttttgcaaaagttttatacacagatatttgtattaaatttggagccatagtcagaagactcagatcataattggcttatttttctatttccgtaactattgtaatttccacttttgtaataattttgatttaaaatataaatttatttatttatttttttaatagtcaaaaatctttgctgttgtagtctgcaacctctaaaatgattgtgttgcttttaggattgatcagaagaaacactccaaaaattgagatgaaatgttggtgcagccagttataagtaatatagttaacaagcaaaaaaagtgctgccaccttttatgatgattttctaaatggagaaacatttggctgcatccacatagacctttatgttttgttttcagttgaaaacttgcctcctttggcaacattcgtaaatgaagcagaatttttttttctcttttttccaaatatgttagttttgttcttgtaagatgtatcatgggtattggtgctgtgtaatgaacaacgaattttaattagcatgtggttcagaatatacaatgttaggtttttaaaaagtatcttgatggttcttttctatttataatttcagactttcataaagtgtaccaagaatttcataaatttgttttcagtgaactgctttttgctatggtaggtcattaaacacagcacttactcttaaaaatgaaaatttctgatcatctaggatattgacacatttcaatttgcagtgtctttttgactggatatattaacgttcctctgaatggcattgatagatggttcagaagagaaactcaatgaaataaagagaatatttattcatggcgattaattaaattatttgcctaacttaagaaaactactgtgcgtaactctcagtttgtgcttaactccatttgacatgaggtgacagaagagagtctgagtctacctgtggaatatgttggtttattttcagtgcttgaagatacattcacaaatacttggtttgggaagacaccgtttaattttaagttaacttgcatgttgtaaatgcgttttatgtttaaataaagaggaaaattttttgaaa

SEQ ID NO: 311358 - DNA, 3304 bp, Homo sapiens
gagtgaaatgataaatttaagggagaatatttccctaagtattcatcacagggcgaagtataaagcgttgagctcaacgctttatacttcatctcatcaaaaacagatcagtagtttgagagatgaagtagaagcaaaagcaaaacttattactgatcttcaagaccaaaaccagaaaatgatgttagagcaggaacgtctaagagtagaacatgagaagttgaaagccacagatcaggaaaagagcagaaaactacatgaacttacggttatgcaagatagacgagaacaagcaagacaagacttgaagggtttggaagagacagtgagtgctgagattgattctgatgacaccggaggcagcgctgctcagaagcaaaaaatctcctttcttgaaaataatcttgaacagctcactaaagtgcacaaacagttggtacgtgataatgcagatctccgctgtgaacttcctaagttggaaaagcgacttcgagctacagctgagagagtgaaagctttggaatcagcactgaaagaagctaaagaaaatgcatctcgtgatcgcaaacgctatcagcaagaagtagatcgcataaaggaagcagtcaggtcaaagaatatggccagaagagggcattctgcacagattgctaaacctattcgtcccgggcaacatccagcagcttctccaactcacccaagtgcaattcgtggaggaggtgcatttgttcagaacagccagccagtggcagtgcgaggtggaggaggcaaacaagtgtaatcgtttatacatacccacaggtgttaaaaagtaatcgaagtacgaagaggaacatggtatcaagcagtcattcaatgactataacctctactcccttgggattgtagaattataacttttaaaaaaaatgtataaattatacctggcctgtacagctgtttcctacctactcttcttgtaaactctgctgcttcccaacacaactagagtgcaattttggcatcttaggagggaaaaaggacagtttacaactgtggccctatttattacacagtttgtctatcgtgtcttaaatttagtctttactgtgccaagctaactgtaccttataggactgtactttttgtattttttgtgtatgtttattttttaatctcagtttaaattacctagctgctactgcttcttgtttttcttttcctattaaaacgtcttcctttttttttcttaagagaaaatggaacatttaggttaaatgtctttaaattttaccacttaacaacactacatgcccataaaatatatccagtcagtactgtattttaaaatcccttgaaatgatgatatcagggttaaaattacttgtattgtttctgaagtttgctcctgaaaactactgtttgagcactgaaacgttacaaatgcctaataggcatttgagactgagcaaggctacttgttatctcatgaaatgcctgttgccgagttattttgaatagaaatattttaaagtatcaaaagcagatcttagtttaagggagtttggaaaaggaattatatttctctttttcctgattctgtactcaacaagtcttgatggaattaaaatactctgctttattctggtgagcctgctagctaatataagtattggacaggtaataatttgtcatctttaatattagtaaaatgaattaagatattataggattaaacataattttatacggttagtactttattggccgacctaaatttatagcgtgtggaaattgagaaaaatgaagaaacaggacagatatatgatgaattaaaaatatatataggtcaattttggtctgaaatccctgaggtgtttttaacctgctacactaatttgtacactaatttatttctttagtctagaaatagtaaattgtttgcaagtcactaataatcattagataaattattttcttggccatagccgataattttgtaatcagtactaagtgtatacgtatttttgccactttttcctcagatgattaaagtaagtcaacagcttattttaggaaactgtaaaagtaatagggaaagagatttcactatttgcttcatcagtggtaggggggcggtgactgcaactgtgttagcagaaattcacagagaatggggatttaaggttagcagagaaacttggaaagttctgtgttaggatcttgctggcagaattaactttttgcaaaagttttatacacagatatttgtattaaatttggagccatagtcagaagactcagatcataattggcttatttttctatttccgtaactattgtaatttccacttttgtaataattttgatttaaaatataaatttatttatttatttttttaatagtcaaaaatctttgctgttgtagtctgcaacctctaaaatgattgtgttgcttttaggattgatcagaagaaacactccaaaaattgagatgaaatgttggtgcagccagttataagtaatatagttaacaagcaaaaaaagtgctgccaccttttatgatgattttctaaatggagaaacatttggctgcatccacatagacctttatgttttgttttcagttgaaaacttgcctcctttggcaacattcgtaaatgaagcagaatttttttttctcttttttccaaatatgttagttttgttcttgtaagatgtatcatgggtattggtgctgtgtaatgaacaacgaattttaattagcatgtggttcagaatatacaatgttaggtttttaaaaagtatcttgatggttcttttctatttataatttcagactttcataaagtgtaccaagaatttcataaatttgttttcagtgaactgctttttgctatggtaggtcattaaacacagcacttactcttaaaaatgaaaatttctgatcatctaggatattgacacatttcaatttgcagtgtctttttgactggatatattaacgttcctctgaatggcattgatagatggttcagaagagaaactcaatgaaataaagagaatatttattcatggcgattaattaaattatttgcctaacttaagaaaactactgtgcgtaactctcagtttgtgcttaactccatttgacatgaggtgacagaagagagtctgagtctacctgtggaatatgttggtttattttcagtgcttgaagatacattcacaaatacttggtttgggaagacaccgtttaattttaagttaacttgcatgttgtaaatgcgttttatgtttaaataaagaggaaaattttttgaaa

SEQ ID NO: 311359 - DNA, 3076 bp, Homo sapiens
aatcgctggtggtcactagaacttcagactctcgactcctgagtcggacgtcttagtatcattggaccgcggctgttaactaggtcgtcggagtagagagagtgctgagattgattctgatgacaccggaggcagcgctgctcagaagcaaaaaatctcctttcttgaaaataatcttgaacagctcactaaagtgcacaaacagttggtacgtgataatgcagatctccgctgtgaacttcctaagttggaaaagcgacttcgagctacagctgagagagtgaaagctttggaatcagcactgaaagaagctaaagaaaatgcatctcgtgatcgcaaacgctatcagcaagaagtagatcgcataaaggaagcagtcaggtcaaagaatatggccagaagagggcattctgcacagattgctaaacctattcgtcccgggcaacatccagcagcttctccaactcacccaagtgcaattcgtggaggaggtgcatttgttcagaacagccagccagtggcagtgcgaggtggaggaggcaaacaagtgtaatcgtttatacatacccacaggtgttaaaaagtaatcgaagtacgaagaggaacatggtatcaagcagtcattcaatgactataacctctactcccttgggattgtagaattataacttttaaaaaaaatgtataaattatacctggcctgtacagctgtttcctacctactcttcttgtaaactctgctgcttcccaacacaactagagtgcaattttggcatcttaggagggaaaaaggacagtttacaactgtggccctatttattacacagtttgtctatcgtgtcttaaatttagtctttactgtgccaagctaactgtaccttataggactgtactttttgtattttttgtgtatgtttattttttaatctcagtttaaattacctagctgctactgcttcttgtttttcttttcctattaaaacgtcttcctttttttttcttaagagaaaatggaacatttaggttaaatgtctttaaattttaccacttaacaacactacatgcccataaaatatatccagtcagtactgtattttaaaatcccttgaaatgatgatatcagggttaaaattacttgtattgtttctgaagtttgctcctgaaaactactgtttgagcactgaaacgttacaaatgcctaataggcatttgagactgagcaaggctacttgttatctcatgaaatgcctgttgccgagttattttgaatagaaatattttaaagtatcaaaagcagatcttagtttaagggagtttggaaaaggaattatatttctctttttcctgattctgtactcaacaagtcttgatggaattaaaatactctgctttattctggtgagcctgctagctaatataagtattggacaggtaataatttgtcatctttaatattagtaaaatgaattaagatattataggattaaacataattttatacggttagtactttattggccgacctaaatttatagcgtgtggaaattgagaaaaatgaagaaacaggacagatatatgatgaattaaaaatatatataggtcaattttggtctgaaatccctgaggtgtttttaacctgctacactaatttgtacactaatttatttctttagtctagaaatagtaaattgtttgcaagtcactaataatcattagataaattattttcttggccatagccgataattttgtaatcagtactaagtgtatacgtatttttgccactttttcctcagatgattaaagtaagtcaacagcttattttaggaaactgtaaaagtaatagggaaagagatttcactatttgcttcatcagtggtaggggggcggtgactgcaactgtgttagcagaaattcacagagaatggggatttaaggttagcagagaaacttggaaagttctgtgttaggatcttgctggcagaattaactttttgcaaaagttttatacacagatatttgtattaaatttggagccatagtcagaagactcagatcataattggcttatttttctatttccgtaactattgtaatttccacttttgtaataattttgatttaaaatataaatttatttatttatttttttaatagtcaaaaatctttgctgttgtagtctgcaacctctaaaatgattgtgttgcttttaggattgatcagaagaaacactccaaaaattgagatgaaatgttggtgcagccagttataagtaatatagttaacaagcaaaaaaagtgctgccaccttttatgatgattttctaaatggagaaacatttggctgcatccacatagacctttatgttttgttttcagttgaaaacttgcctcctttggcaacattcgtaaatgaagcagaatttttttttctcttttttccaaatatgttagttttgttcttgtaagatgtatcatgggtattggtgctgtgtaatgaacaacgaattttaattagcatgtggttcagaatatacaatgttaggtttttaaaaagtatcttgatggttcttttctatttataatttcagactttcataaagtgtaccaagaatttcataaatttgttttcagtgaactgctttttgctatggtaggtcattaaacacagcacttactcttaaaaatgaaaatttctgatcatctaggatattgacacatttcaatttgcagtgtctttttgactggatatattaacgttcctctgaatggcattgatagatggttcagaagagaaactcaatgaaataaagagaatatttattcatggcgattaattaaattatttgcctaacttaagaaaactactgtgcgtaactctcagtttgtgcttaactccatttgacatgaggtgacagaagagagtctgagtctacctgtggaatatgttggtttattttcagtgcttgaagatacattcacaaatacttggtttgggaagacaccgtttaattttaagttaacttgcatgttgtaaatgcgttttatgtttaaataaagaggaaaattttttgaaa

SEQ ID NO: 311360 - DNA, 2352 bp, Homo sapiens
ccgcgatctagaactaggaaacagctgtacaggccaggtataatttatacatcttaggagggaaaaaggacagtttacaactgtggccctatttattacacagtttgtctatcgtgtcttaaatttagtctttactgtgccaagctaactgtaccttataggactgtactttttgtattttttgtgtatgtttattttttaatctcagtttaaattacctagctgctactgcttcttgtttttcttttcctattaaaacgtcttcctttttttttcttaagagaaaatggaacatttaggttaaatgtctttaaattttaccacttaacaacactacatgcccataaaatatatccagtcagtactgtattttaaaatcccttgaaatgatgatatcagggttaaaattacttgtattgtttctgaagtttgctcctgaaaactactgtttgagcactgaaacgttacaaatgcctaataggcatttgagactgagcaaggctacttgttatctcatgaaatgcctgttgccgagttattttgaatagaaatattttaaagtatcaaaagcagatcttagtttaagggagtttggaaaaggaattatatttctctttttcctgattctgtactcaacaagtcttgatggaattaaaatactctgctttattctggtgagcctgctagctaatataagtattggacaggtaataatttgtcatctttaatattagtaaaatgaattaagatattataggattaaacataattttatacggttagtactttattggccgacctaaatttatagcgtgtggaaattgagaaaaatgaagaaacaggacagatatatgatgaattaaaaatatatataggtcaattttggtctgaaatccctgaggtgtttttaacctgctacactaatttgtacactaatttatttctttagtctagaaatagtaaattgtttgcaagtcactaataatcattagataaattattttcttggccatagccgataattttgtaatcagtactaagtgtatacgtatttttgccactttttcctcagatgattaaagtaagtcaacagcttattttaggaaactgtaaaagtaatagggaaagagatttcactatttgcttcatcagtggtaggggggcggtgactgcaactgtgttagcagaaattcacagagaatggggatttaaggttagcagagaaacttggaaagttctgtgttaggatcttgctggcagaattaactttttgcaaaagttttatacacagatatttgtattaaatttggagccatagtcagaagactcagatcataattggcttatttttctatttccgtaactattgtaatttccacttttgtaataattttgatttaaaatataaatttatttatttatttttttaatagtcaaaaatctttgctgttgtagtctgcaacctctaaaatgattgtgttgcttttaggattgatcagaagaaacactccaaaaattgagatgaaatgttggtgcagccagttataagtaatatagttaacaagcaaaaaaagtgctgccaccttttatgatgattttctaaatggagaaacatttggctgcatccacatagacctttatgttttgttttcagttgaaaacttgcctcctttggcaacattcgtaaatgaagcagaatttttttttctcttttttccaaatatgttagttttgttcttgtaagatgtatcatgggtattggtgctgtgtaatgaacaacgaattttaattagcatgtggttcagaatatacaatgttaggtttttaaaaagtatcttgatggttcttttctatttataatttcagactttcataaagtgtaccaagaatttcataaatttgttttcagtgaactgctttttgctatggtaggtcattaaacacagcacttactcttaaaaatgaaaatttctgatcatctaggatattgacacatttcaatttgcagtgtctttttgactggatatattaacgttcctctgaatggcattgatagatggttcagaagagaaactcaatgaaataaagagaatatttattcatggcgattaattaaattatttgcctaacttaagaaaactactgtgcgtaactctcagtttgtgcttaactccatttgacatgaggtgacagaagagagtctgagtctacctgtggaatatgttggtttattttcagtgcttgaagatacattcacaaatacttggtttgggaagacaccgtttaattttaagttaacttgcatgttgtaaatgcgttttatgtttaaataaagaggaaaattttttgaaa

SEQ ID NO: 311361 - DNA, 2040 bp, Homo sapiens
agcggcctgtcgcccaacggcggcctcaggagtgatcgggcagcagtcggccggccagcggacggcagagcgggcggacgggtaggcccggcctgctcttcgcgaggaggaagaaggtggccactctcccggtccccagaacctccccagcccccgcagtccgcccagaccgtaaagggggacgctgaggagccgcggacgctctccccggtgccgccgccgctgccgccgccatggctgccatgatggatcggaagtgagcattagggttaacggctgccggcgccggctcttcaagtcccggctccccggccgcctccacccggggaagcgcagcgcggcgcagctgactgctgcctctcacggccctcgcgaccacaagccctcaggtccggcgcgttccctgcaagactgagcggcggggagtggctcccggccgccggccccggctgcgagaaagatggcggacctggccgagtgcaacatcaaagtgatgtgtcgcttcagacctctcaacgagtctgaagtgaaccgcggcgacaagtacatcgccaagtttcagggagaagacacggtcgtgatcgcgtccaagccttatgcatttgatcgggtgttccagtcaagcacatctcaagagcaagtgtataatgactgtgcaaagaagattgttaaagatgtacttgaaggatataatggaacaatatttgcatatggacaaacatcctctgggaagacacacacaatggagggtaaacttcatgatccagaaggcatgggaattattccaagaatagtgcaagatatttttaattatatttactccatggatgaaaatttggaatttcatattaaggtttcatattttgaaatatatttggataagataagggacctgttagatgtttcaaagaccaacctttcagttcatgaagacaaaaaccgagttccctatgtaaaggggtgcacagagcgttttgtatgtagtccagatgaagttatggataccatagatgaaggaaaatccaacagacatgtagcagttacaaatatgaatgaacatagctctaggagtcacagtatatttcttattaatgtcaaacaagagaacacacaaacggaacaaaagctgagtggaaaactttatctggttgatttagctggtagtgaaaaggttagtaaaactggagctgaaggtgctgtgctggatgaagctaaaaacatcaacaagtcactttctgctcttggaaatgttatttctgctttggctgagggtagtacatatgttccatatcgagatagtaaaatgacaagaatccttcaagattcattaggtggcaactgtagaaccactattgtaatttgctgctctccatcatcatacaatgagtctgaaacaaaatctacactcttatttggccaaagggccaaaacaattaagaacacagtttgtgtcaatgtggagttaactgcagaacagtggaaaaagaagtatgaaaaagaaaaagaaaaaaataagatcctgcggaacactattcagtggcttgaaaatgagctcaacagatggcgtaatggggagacggtgcctattgatgaacagtttgacaaagagaaagccaacttggaagctttcacagtggataaagatattactcttaccaatgataaaccagcaaccgcaattggagttataggaaattttactgatgctgaaagaagaaagtgtgaagaagaaattgctaaattatacaaacagcttgatgacaaggatgaagaaattaaccagccaagtcaacacaacttctctaggatattctgtccattgcaccattttacccccaattcttaggtgtactaaagttttgttccagcttggattgtgcacagtaactccaatactatcttcaccactattcccatgcctcacccccactaaacctgctgggctgggcctgtactgaatctccgcaccaccctctacccactccaccctacctaaccatcttggctggatcagcggatcgagtaagtacctggaacagc

SEQ ID NO: 311362 - DNA, 3378 bp, Homo sapiens
agcggcctgtcgcccaacggcggcctcaggagtgatcgggcagcagtcggccggccagcggacggcagagcgggcggacgggtaggcccggcctgctcttcgcgaggaggaagaaggtggccactctcccggtccccagaacctccccagcccccgcagtccgcccagaccgtaaagggggacgctgaggagccgcggacgctctccccggtgccgccgccgctgccgccgccatggctgccatgatggatcggaagtgagcattagggttaacggctgccggcgccggctcttcaagtcccggctccccggccgcctccacccggggaagcgcagcgcggcgcagctgactgctgcctctcacggccctcgcgaccacaagccctcaggtccggcgcgttccctgcaagactgagcggcggggagtggctcccggccgccggccccggctgcgagaaagatggcggacctggccgagtgcaacatcaaagtgatgtgtcgcttcagacctctcaacgagtctgaagtgaaccgcggcgacaagtacatcgccaagtttcagggagaagacacggtcgtgatcgcgtccaagccttatgcatttgatcgggtgttccagtcaagcacatctcaagagcaagtgtataatgactgtgcaaagaagattgttaaagatgtacttgaaggatataatggaacaatatttgcatatggacaaacatcctctgggaagacacacacaatggagggtaaacttcatgatccagaaggcatgggaattattccaagaatagtgcaagatatttttaattatatttactccatggatgaaaatttggaatttcatattaaggtttcatattttgaaatatatttggataagataagggacctgttagatgtttcaaagaccaacctttcagttcatgaagacaaaaaccgagttccctatgtaaaggggtgcacagagcgttttgtatgtagtccagatgaagttatggataccatagatgaaggaaaatccaacagacatgtagcagttacaaatatgaatgaacatagctctaggagtcacagtatatttcttattaatgtcaaacaagagaacacacaaacggaacaaaagctgagtggaaaactttatctggttgatttagctggtagtgaaaaggttagtaaaactggagctgaaggtgctgtgctggatgaagctaaaaacatcaacaagtcactttctgctcttggaaatgttatttctgctttggctgagggtagtacatatgttccatatcgagatagtaaaatgacaagaatccttcaagattcattaggtggcaactgtagaaccactattgtaatttgctgctctccatcatcatacaatgagtctgaaacaaaatctacactcttatttggccaaagggccaaaacaattaagaacacagtttgtgtcaatgtggagttaactgcagaacagtggaaaaagaagtatgaaaaagaaaaagaaaaaaactcgagtttttttttttttttttttttttactcaaatggtttttattttcctatctgacatttctaacaaaacgccaggtagacggagttaaaaagaatccaccgcacgaaaggtaaacaaagcagaccctcagaaactccctggcaaggatgttcccctccccagattggcccagtttcaccagcaactggtctcagctcagccttatgcctttccactgacaccccccacccctccacattctcgtgattcagaccaggaacttctcggctgattgtgtccgtgtgtctgagggaggggcacgctggaacctgggaacctactgggcacctctaatgcagatgagaaaaacttgagaatgtgaaagtagatcagtccccgctcccacccgaaggtgcagagacgcgggacattaaccagcagcacgcgggggtgaagtaactcaggccactctcctccccactgcccagggcgggtgcacgccccaggacctcctcccaggccccacacccacgcaaggcgacaggaagctccccacgcctgccccatgacgcaacgatgaccgcttatacaagtatgtcagcggagggggaaggggagtgcctggaattctccgaggttggaaacgcaaaaccaactcttgaaaaaccttgaaagggccagcacagcccacagtacaaaatgaagtccgaccctgaggagatctttaaaaacaaacaaacaaacaaaacaaaaaacacaacacccaagcctcccttctcccagtccagaaggagagcgaaaggttcacgtcccagtccactaagacagcacctgtgggcgcaggtctctgcggaaggcgcccgcgcccccggctcagactcctcggtgccgtccctgcacactgaaggcgatggctccccggggacagagtccctctccgggcctctcagcagcccgggcggcggcttctctccacggttttcgcgggcgcttcccccaggatggaggggggtggcctcgcctcaggtctgcgccctcgggccgacggttcgacgcgcgctctgggctccggcagcgccgctcggggtcctcagaaggccaccacggcccgcacgagcacgttgagcatgctgtccgccgggcggcaagcgggctttgcctcgcacgcgggcggcgccgtcggaggggccgcggggctgcagttcaggaggccggagaagcgcctctgcaggacgcgggccaggttgggaaaggcgccctccgcttgcgccggagggggctgcaggcgatcggcgacttcggatgacgctccctcctcttcttccttttcttccagacgggctttcttgctcgggaccagtccagcgtccccgccgtcgctcaggctgctgctgcgtcgtttgcggctgactttggcggggcgcggggcacagcaggcggaggtctcctcggctgtcggcgcctcctgcgtgtccattggctccggaaacgggtgctcaccgtcgggggtcgctgtctcggccgtggactcggcttctcggggcgggtgcaggcgagggtcagaggggagggcggccggcaacgacacctcgggctcgagggcctccaccttggccgagaggtagagctcccgggcgctgcgcatgaccagcgacagctgcagactccggtgcagccgcaggccaccgcgctgcatgcgggagtgatacatcttccacaccgacagggtcatgatgcgctgtgcctctttctgcacttccatggcgactcgacggcgacagcggcgggggctcccgggagggacagaacaggcagcaggtgcactccggacaacgggctcgctcacgcctctctacacaaaccaacccacgcagtgacactgc

SEQ ID NO: 311363 - DNA, 174 bp, Homo sapiens
ccgccggtgccccccccatcgtgccccgtcatacctctcagtatggcattatagaacggggaacacccccaccctcccgaaatacttggtttgggaagacaccgtttaattttaagttaacttgcatgttgtaaatgcgttttatgtttaaataaagaggaaaattttttgaaa

SEQ ID NO: 311364 - DNA, 5817 bp, Homo sapiens
agcggcctgtcgcccaacggcggcctcaggagtgatcgggcagcagtcggccggccagcggacggcagagcgggcggacgggtaggcccggcctgctcttcgcgaggaggaagaaggtggccactctcccggtccccagaacctccccagcccccgcagtccgcccagaccgtaaagggggacgctgaggagccgcggacgctctccccggtgccgccgccgctgccgccgccatggctgccatgatggatcggaagtgagcattagggttaacggctgccggcgccggctcttcaagtcccggctccccggccgcctccacccggggaagcgcagcgcggcgcagctgactgctgcctctcacggccctcgcgaccacaagccctcaggtccggcgcgttccctgcaagactgagcggcggggagtggctcccggccgccggccccggctgcgagaaagatggcggacctggccgagtgcaacatcaaagtgatgtgtcgcttcagacctctcaacgagtctgaagtgaaccgcggcgacaagtacatcgccaagtttcagggagaagacacggtcgtgatcgcgtccaagccttatgcatttgatcgggtgttccagtcaagcacatctcaagagcaagtgtataatgactgtgcaaagaagattgttaaagatgtacttgaaggatataatggaacaatatttgcatatggacaaacatcctctgggaagacacacacaatggagggtaaacttcatgatccagaaggcatgggaattattccaagaatagtgcaagatatttttaattatatttactccatggatgaaaatttggaatttcatattaaggtttcatattttgaaatatatttggataagataagggacctgttagatgtttcaaagaccaacctttcagttcatgaagacaaaaaccgagttccctatgtaaaggggtgcacagagcgttttgtatgtagtccagatgaagttatggataccatagatgaaggaaaatccaacagacatgtagcagttacaaatatgaatgaacatagctctaggagtcacagtatatttcttattaatgtcaaacaagagaacacacaaacggaacaaaagctgagtggaaaactttatctggttgatttagctggtagtgaaaaggttagtaaaactggagctgaaggtgctgtgctggatgaagctaaaaacatcaacaagtcactttctgctcttggaaatgttatttctgctttggctgagggtagtacatatgttccatatcgagatagtaaaatgacaagaatccttcaagattcattaggtggcaactgtagaaccactattgtaatttgctgctctccatcatcatacaatgagtctgaaacaaaatctacactcttatttggccaaagggccaaaacaattaagaacacagtttgtgtcaatgtggagttaactgcagaacagtggaaaaagaagtatgaaaaagaaaaagaaaaaaataagatcctgcggaacactattcagtggcttgaaaatgagctcaacagatggcgtaatggggagacggtgcctattgatgaacagtttgacaaagagaaagccaacttggaagctttcacagtggataaagatattactcttaccaatgataaaccagcaaccgcaattggagttataggaaattttactgatgctgaaagaagaaagtgtgaagaagaaattgctaaattatacaaacagcttgatgacaaggatgaagaaattaaccagcaaagtcaactggtagagaaactgaagacgcaaatgttggatcaggaggagcttttggcatctaccagaagggatcaagacaatatgcaagctgagctgaatcgccttcaagcagaaaatgatgcctctaaagaagaagtgaaagaagttttacaggccctagaagaacttgctgtcaattatgatcagaagtctcaggaagttgaagacaaaactaaggaatatgaattgcttagtgatgaattgaatcagaaatcggcaactttagcgagtatagatgctgagcttcagaaacttaaggaaatgaccaaccaccagaaaaaacgagcagctgagatgatggccagcctgagggaactggcatgatagatgaagagttcactgttgcaagactctacattagcaaaatgaagtcagaagtaaaaaccatggtgaaacgttgcaagcagttagaaagcacacaaactgagagcaacaaaaaaatggaagaaaatgaaaaggagttagcagcatgtcagcttcgtatctctcaacatgaagccaaaatcaagtcattgactgaataccttcaaaatgtggaacaaaagaaaagacagttggaggaatctgtcgatgccctcagtgaagaactagtccagcttcgagcacaagagaaagtccatgaaatggaaaaggagcacttaaataaggttcagactgcaaatgaagttaagcaagctgttgaacagcagatccagagccatagagaaactcatcaaaaacagatcagtagtttgagagatgaagtagaagcaaaagcaaaacttattactgatcttcaagaccaaaaccagaaaatgatgttagagcaggaacgtctaagagtagaacatgagaagttgaaagccacagatcaggaaaagagcagaaaactacatgaacttacggttatgcaagatagacgagaacaagcaagacaagacttgaagggtttggaagagacagtggcaaaagaacttcagactttacacaacctgcgcaaactctttgttcaggacctggctacaagagttaaaaagagtgctgagattgattctgatgacaccggaggcagcgctgctcagaagcaaaaaatctcctttcttgaaaataatcttgaacagctcactaaagtgcacaaacagttggtacgtgataatgcagatctccgctgtgaacttcctaagttggaaaagcgacttcgagctacagctgagagagtgaaagctttggaatcagcactgaaagaagctaaagaaaatgcatctcgtgatcgcaaacgctatcagcaagaagtagatcgcataaaggaagcagtcaggtcaaagaatatggccagaagagggcattctgcacagattgctaaacctattcgtcccgggcaacatccagcagcttctccaactcacccaagtgcaattcgtggaggaggtgcatttgttcagaacagccagccagtggcagtgcgaggtggaggaggcaaacaagtgtaatcgtttatacatacccacaggtgttaaaaagtaatcgaagtacgaagaggaacatggtatcaagcagtcattcaatgactataacctctactcccttgggattgtagaattataacttttaaaaaaaatgtataaattatacctggcctgtacagctgtttcctacctactcttcttgtaaactctgctgcttcccaacacaactagagtgcaattttggcatcttaggagggaaaaaggacagtttacaactgtggccctatttattacacagtttgtctatcgtgtcttaaatttagtctttactgtgccaagctaactgtaccttataggactgtactttttgtattttttgtgtatgtttattttttaatctcagtttaaattacctagctgctactgcttcttgtttttcttttcctattaaaacgtcttcctttttttttcttaagagaaaatggaacatttaggttaaatgtctttaaattttaccacttaacaacactacatgcccataaaatatatccagtcagtactgtattttaaaatcccttgaaatgatgatatcagggttaaaattacttgtattgtttctgaagtttgctcctgaaaactactgtttgagcactgaaacgttacaaatgcctaataggcatttgagactgagcaaggctacttgttatctcatgaaatgcctgttgccgagttattttgaatagaaatattttaaagtatcaaaagcagatcttagtttaagggagtttggaaaaggaattatatttctctttttcctgattctgtactcaacaagtcttgatggaattaaaatactctgctttattctggtgagcctgctagctaatataagtattggacaggtaataatttgtcatctttaatattagtaaaatgaattaagatattataggattaaacataattttatacggttagtactttattggccgacctaaatttatagcgtgtggaaattgagaaaaatgaagaaacaggacagatatatgatgaattaaaaatatatataggtcaattttggtctgaaatccctgaggtgtttttaacctgctacactaatttgtacactaatttatttctttagtctagaaatagtaaattgtttgcaagtcactaataatcattagataaattattttcttggccatagccgataattttgtaatcagtactaagtgtatacgtatttttgccactttttcctcagatgattaaagtaagtcaacagcttattttaggaaactgtaaaagtaatagggaaagagatttcactatttgcttcatcagtggtaggggggcggtgactgcaactgtgttagcagaaattcacagagaatggggatttaaggttagcagagaaacttggaaagttctgtgttaggatcttgctggcagaattaactttttgcaaaagttttatacacagatatttgtattaaatttggagccatagtcagaagactcagatcataattggcttatttttctatttccgtaactattgtaatttccacttttgtaataattttgatttaaaatataaatttatttatttatttttttaatagtcaaaaatctttgctgttgtagtctgcaacctctaaaatgattgtgttgcttttaggattgatcagaagaaacactccaaaaattgagatgaaatgttggtgcagccagttataagtaatatagttaacaagcaaaaaaagtgctgccaccttttatgatgattttctaaatggagaaacatttggctgcatccacatagacctttatgttttgttttcagttgaaaacttgcctcctttggcaacattcgtaaatgaagcagaatttttttttctcttttttccaaatatgttagttttgttcttgtaagatgtatcatgggtattggtgctgtgtaatgaacaacgaattttaattagcatgtggttcagaatatacaatgttaggtttttaaaaagtatcttgatggttcttttctatttataatttcagactttcataaagtgtaccaagaatttcataaatttgttttcagtgaactgctttttgctatggtaggtcattaaacacagcacttactcttaaaaatgaaaatttctgatcatctaggatattgacacatttcaatttgcagtgtctttttgactggatatattaacgttcctctgaatggcattgatagatggttcagaagagaaactcaatgaaataaagagaatatttattcatggcgattaattaaattatttgcctaacttaagaaaactactgtgcgtaactctcagtttgtgcttaactccatttgacatgaggtgacagaagagagtctgagtctacctgtggaatatgttggtttattttcagtgcttgaagatacattcacaaatacttggtttgggaagacaccgtttaattttaagttaacttgcatgttgtaaatgcgttttatgtttaaataaagaggaaaattttttgaaa

SEQ ID NO: 311365 - DNA, 5821 bp, Homo sapiens
agcggcctgtcgcccaacggcggcctcaggagtgatcgggcagcagtcggccggccagcggacggcagagcgggcggacgggtaggcccggcctgctcttcgcgaggaggaagaaggtggccactctcccggtccccagaacctccccagcccccgcagtccgcccagaccgtaaagggggacgctgaggagccgcggacgctctccccggtgccgccgccgctgccgccgccatggctgccatgatggatcggaagtgagcattagggttaacggctgccggcgccggctcttcaagtcccggctccccggccgcctccacccggggaagcgcagcgcggcgcagctgactgctgcctctcacggccctcgcgaccacaagccctcaggtccggcgcgttccctgcaagactgagcggcggggagtggctcccggccgccggccccggctgcgagaaagatggcggacctggccgagtgcaacatcaaagtgatgtgtcgcttcagacctctcaacgagtctgaagtgaaccgcggcgacaagtacatcgccaagtttcagggagaagacacggtcgtgatcgcgtccaagccttatgcatttgatcgggtgttccagtcaagcacatctcaagagcaagtgtataatgactgtgcaaagaagattgttaaagatgtacttgaaggatataatggaacaatatttgcatatggacaaacatcctctgggaagacacacacaatggagggtaaacttcatgatccagaaggcatgggaattattccaagaatagtgcaagatatttttaattatatttactccatggatgaaaatttggaatttcatattaaggtttcatattttgaaatatatttggataagataagggacctgttagatgtttcaaagaccaacctttcagttcatgaagacaaaaaccgagttccctatgtaaaggggtgcacagagcgttttgtatgtagtccagatgaagttatggataccatagatgaaggaaaatccaacagacatgtagcagttacaaatatgaatgaacatagctctaggagtcacagtatatttcttattaatgtcaaacaagagaacacacaaacggaacaaaagctgagtggaaaactttatctggttgatttagctggtagtgaaaaggttagtaaaactggagctgaaggtgctgtgctggatgaagctaaaaacatcaacaagtcactttctgctcttggaaatgttatttctgctttggctgagggtagtacatatgttccatatcgagatagtaaaatgacaagaatccttcaagattcattaggtggcaactgtagaaccactattgtaatttgctgctctccatcatcatacaatgagtctgaaacaaaatctacactcttatttggccaaagggccaaaacaattaagaacacagtttgtgtcaatgtggagttaactgcagaacagtggaaaaagaagtatgaaaaagaaaaagaaaaaaataagatcctgcggaacactattcagtggcttgaaaatgagctcaacagatggcgtaatggggagacggtgcctattgatgaacagtttgacaaagagaaagccaacttggaagctttcacagtggataaagatattactcttaccaatgataaaccagcaaccgcaattggagttataggaaattttactgatgctgaaagaagaaagtgtgaagaagaaattgctaaattatacaaacagcttgatgacaaggatgaagaaattaaccagcaaagtcaactggtagagaaactgaagacgcaaatgttggatcaggaggagcttttggcatctaccagaagggatcaagacaatatgcaagctgagctgaatcgccttcaagcagaaaatgatgcctctaaagaagaagtgaaagaagttttacaggccctagaagaacttgctgtcaattatgatcagaagtctcaggaagttgaagacaaaactaaggaatatgaattgcttagtgatgaattgaatcagaaatcggcaactttagcgagtatagatgctgagcttcagaaacttaaggaaatgaccaaccaccagaaaaaacgagcagctgagatgatggcatctttactaaaagaccttgcagaaataggaattgctgtgggaaataatgatgtaaagcagcctgagggaactggcatgatagatgaagagttcactgttgcaagactctacattagcaaaatgaagtcagaagtaaaaaccatggtgaaacgttgcaagcagttagaaagcacacaaactgagagcaacaaaaaaatggaagaaaatgaaaaggagttagcagcatgtcagcttcgtatctctcaacatgaagccaaaatcaagtcattgactgaataccttcaaaatgtggaacaaaagaaaagacagttggaggaatctgtcgatgccctcagtgaagaactagtccagcttcgagcacaagagaaagtccatgaaatggaaaaggagcacttaaataaggttcagactgcaaatgaagttaagcaagctgttgaacagcagatccagagccatagagaaactcatcaaaaacagatcagtagtttgagagatgaagtagaagcaaaagcaaaacttattactgatcttcaagaccaaaaccagaaaatgatgttagagcaggaacgtctaagagtagaacatgagaagttgaaagccacagatcaggaaaagagcagaaaactacatgaacttacggttatgcaagatagacgagaacaagcaagacaagacttgaagggtttggaagagacagtggcaaaagaacttcagactttacacaacctgcgcaaactctttgttcaggacctggctacaagagttaaaaagagtgctgagattgattctgatgacaccggaggcagcgctgctcagaagcaaaaaatctcctttcttgaaaataatcttgaacagctcactaaagtgcacaaacagttggtacgtgataatgcagatctccgctgtgaacttcctaagttggaaaagcgacttcgagctacagctgagagagtgaaagctttggaatcagcactgaaagaagctaaagaaaatgcatctcgtgatcgcaaacgctatcagcaagaagtagatcgcataaaggaagcagtcaggtcaaagaatatggccagaagagggcattctgcacagattgctaaacctattcgtcccgggcaacatccagcagcttctccaactcacccaagtgcaattcgtggaggaggtgcatttgttcagaacagccagccagtggcagtgcgaggtggaggaggcaaacaagtgtaatcgtttatacatacccacaggtgttaaaaagtaatcgaagtacgaagaggaacatggtatcaagcagtcattcaatgactataacctctactcccttgggattgtagaattataacttttaaaaaaaatgtataaattatacctggcctgtacagctgtttcctacctactcttcttgtaaactctgctgcttcccaacacaactagagtgcaattttggcatcttaggagggacttaaatttagtctttactgtgccaagctaactgtaccttataggactgtactttttgtattttttgtgtatgtttattttttaatctcagtttaaattacctagctgctactgcttcttgtttttcttttcctattaaaacgtcttcctttttttttcttaagagaaaatggaacatttaggttaaatgtctttaaattttaccacttaacaacactacatgcccataaaatatatccagtcagtactgtattttaaaatcccttgaaatgatgatatcagggttaaaattacttgtattgtttctgaagtttgctcctgaaaactactgtttgagcactgaaacgttacaaatgcctaataggcatttgagactgagcaaggctacttgttatctcatgaaatgcctgttgccgagttattttgaatagaaatattttaaagtatcaaaagcagatcttagtttaagggagtttggaaaaggaattatatttctctttttcctgattctgtactcaacaagtcttgatggaattaaaatactctgctttattctggtgagcctgctagctaatataagtattggacaggtaataatttgtcatctttaatattagtaaaatgaattaagatattataggattaaacataattttatacggttagtactttattggccgacctaaatttatagcgtgtggaaattgagaaaaatgaagaaacaggacagatatatgatgaattaaaaatatatataggtcaattttggtctgaaatccctgaggtgtttttaacctgctacactaatttgtacactaatttatttctttagtctagaaatagtaaattgtttgcaagtcactaataatcattagataaattattttcttggccatagccgataattttgtaatcagtactaagtgtatacgtatttttgccactttttcctcagatgattaaagtaagtcaacagcttattttaggaaactgtaaaagtaatagggaaagagatttcactatttgcttcatcagtggtaggggggcggtgactgcaactgtgttagcagaaattcacagagaatggggatttaaggttagcagagaaacttggaaagttctgtgttaggatcttgctggcagaattaactttttgcaaaagttttatacacagatatttgtattaaatttggagccatagtcagaagactcagatcataattggcttatttttctatttccgtaactattgtaatttccacttttgtaataattttgatttaaaatataaatttatttatttatttttttaatagtcaaaaatctttgctgttgtagtctgcaacctctaaaatgattgtgttgcttttaggattgatcagaagaaacactccaaaaattgagatgaaatgttggtgcagccagttataagtaatatagttaacaagcaaaaaaagtgctgccaccttttatgatgattttctaaatggagaaacatttggctgcatccacatagacctttatgttttgttttcagttgaaaacttgcctcctttggcaacattcgtaaatgaagcagaatttttttttctcttttttccaaatatgttagttttgttcttgtaagatgtatcatgggtattggtgctgtgtaatgaacaacgaattttaattagcatgtggttcagaatatacaatgttaggtttttaaaaagtatcttgatggttcttttctatttataatttcagactttcataaagtgtaccaagaatttcataaatttgttttcagtgaactgctttttgctatggtaggtcattaaacacagcacttactcttaaaaatgaaaatttctgatcatctaggatattgacacatttcaatttgcagtgtctttttgactggatatattaacgttcctctgaatggcattgatagatggttcagaagagaaactcaatgaaataaagagaatatttattcatggcgattaattaaattatttgcctaacttaagaaaactactgtgcgtaactctcagtttgtgcttaactccatttgacatgaggtgacagaagagagtctgagtctacctgtggaatatgttggtttattttcagtgcttgaagatacattcacaaatacttggtttgggaagacaccgtttaattttaagttaacttgcatgttgtaaatgcgttttatgtttaaataaagaggaaaattttttgaaa

SEQ ID NO: 311366 - DNA, 5192 bp, Homo sapiens
cgagcggccgcccgggcaggtacgcgggtggacaaacatcctctgggaagacacacacaatggagggtaaacttcatgatccagaaggcatgggaattattccaagaatagtgcaagatatttttaattatatttactccatggatgaaaatttggaatttcatattaaggtttcatattttgaaatatatttggataagataagggacctgttagatgtttcaaagaccaacctttcagttcatgaagacaaaaaccgagttccctatgtaaaggggtgcacagagcgttttgtatgtagtccagatgaagttatggataccatagatgaaggaaaatccaacagacatgtagcagttacaaatatgaatgaacatagctctaggagtcacagtatatttcttattaatgtcaaacaagagaacacacaaacggaacaaaagctgagtggaaaactttatctggttgatttagctggtagtgaaaaggttagtaaaactggagctgaaggtgctgtgctggatgaagctaaaaacatcaacaagtcactttctgctcttggaaatgttatttctgctttggctgagggtagtacatatgttccatatcgagatagtaaaatgacaagaatccttcaagattcattaggtggcaactgtagaaccactattgtaatttgctgctctccatcatcatacaatgagtctgaaacaaaatctacactcttatttggccaaagggccaaaacaattaagaacacagtttgtgtcaatgtggagttaactgcagaacagtggaaaaagaagtatgaaaaagaaaaagaaaaaaataagatcctgcggaacactattcagtggcttgaaaatgagctcaacagatggcgtaatggggagacggtgcctattgatgaacagtttgacaaagagaaagccaacttggaagctttcacagtggataaagatattactcttaccaatgataaaccagcaaccgcaattggagttataggaaattttactgatgctgaaagaagaaagtgtgaagaagaaattgctaaattatacaaacagcttgatgacaaggatgaagaaattaaccagcaaagtcaactggtagagaaactgaagacgcaaatgttggatcaggaggagcttttggcatctaccagaagggatcaagacaatatgcaagctgagctgaatcgccttcaagcagaaaatgatgcctctaaagaagaagtgaaagaagttttacaggccctagaagaacttgctgtcaattatgatcagaagtctcaggaagttgaagacaaaactaaggaatatgaattgcttagtgatgaattgaatcagaaatcggcaactttagcgagtatagatgctgagcttcagaaacttaaggaaatgaccaaccaccagaaaaaacgagcagctgagatgatggcatctttactaaaagaccttgcagaaataggaattgctgtgggaaataatgatgtaaagcagcctgagggaactggcatgatagatgaagagttcactgttgcaagactctacattagcaaaatgaagtcagaagtaaaaaccatggtgaaacgttgcaagcagttagaaagcacacaaactgagagcaacaaaaaaatggaagaaaatgaaaaggagttagcagcatgtcagcttcgtatctctcaacatgaagccaaaatcaagtcattgactgaataccttcaaaatgtggaacaaaagaaaagacagttggaggaatctgtcgatgccctcagtgaagaactagtccagcttcgagcacaagagaaagtccatgaaatggaaaaggagcacttaaataaggttcagactgcaaatgaagttaagcaagctgttgaacagcagatccagagccatagagaaactcatcaaaaacagatcagtagtttgagagatgaagtagaagcaaaagcaaaacttattactgatcttcaagaccaaaaccagaaaatgatgttagagcaggaacgtctaagagtagaacatgagaagttgaaagccacagatcaggaaaagagcagaaaactacatgaacttacggttatgcaagatagacgagaacaagcaagacaagacttgaagggtttggaagagacagtggcaaaagaacttcagactttacacaacctgcgcaaactctttgttcaggacctggctacaagagttaaaaagagtgctgagattgattctgatgacaccggaggcagcgctgctcagaagcaaaaaatctcctttcttgaaaataatcttgaacagctcactaaagtgcacaaacagttggtacgtgataatgcagatctccgctgtgaacttcctaagttggaaaagcgacttcgagctacagctgagagagtgaaagctttggaatcagcactgaaagaagctaaagaaaatgcatctcgtgatcgcaaacgctatcagcaagaagtagatcgcataaaggaagcagtcaggtcaaagaatatggccagaagagggcattctgcacagattgctaaacctattcgtcccgggcaacatccagcagcttctccaactcacccaagtgcaattcgtggaggaggtgcatttgttcagaacagccagccagtggcagtgcgaggtggaggaggcaaacaagtgtaatcgtttatacatacccacaggtgttaaaaagtaatcgaagtacgaagaggaacatggtatcaagcagtcattcaatgactataacctctactcccttgggattgtagaattataacttttaaaaaaaatgtataaattatacctggcctgtacagctgtttcctacctactcttcttgtaaactctgctgcttcccaacacaactagagtgcaattttggcatcttaggagggaaaaaggacagtttacaactgtggccctatttattacacagtttgtctatcgtgtcttaaatttagtctttactgtgccaagctaactgtaccttataggactgtactttttgtattttttgtgtatgtttattttttaatctcagtttaaattacctagctgctactgcttcttgtttttcttttcctattaaaacgtcttcctttttttttcttaagagaaaatggaacatttaggttaaatgtctttaaattttaccacttaacaacactacatgcccataaaatatatccagtcagtactgtattttaaaatcccttgaaatgatgatatcagggttaaaattacttgtattgtttctgaagtttgctcctgaaaactactgtttgagcactgaaacgttacaaatgcctaataggcatttgagactgagcaaggctacttgttatctcatgaaatgcctgttgccgagttattttgaatagaaatattttaaagtatcaaaagcagatcttagtttaagggagtttggaaaaggaattatatttctctttttcctgattctgtactcaacaagtcttgatggaattaaaatactctgctttattctggtgagcctgctagctaatataagtattggacaggtaataatttgtcatctttaatattagtaaaatgaattaagatattataggattaaacataattttatacggttagtactttattggccgacctaaatttatagcgtgtggaaattgagaaaaatgaagaaacaggacagatatatgatgaattaaaaatatatataggtcaattttggtctgaaatccctgaggtgtttttaacctgctacactaatttgtacactaatttatttctttagtctagaaatagtaaattgtttgcaagtcactaataatcattagataaattattttcttggccatagccgataattttgtaatcagtactaagtgtatacgtatttttgccactttttcctcagatgattaaagtaagtcaacagcttattttaggaaactgtaaaagtaatagggaaagagatttcactatttgcttcatcagtggtaggggggcggtgactgcaactgtgttagcagaaattcacagagaatggggatttaaggttagcagagaaacttggaaagttctgtgttaggatcttgctggcagaattaactttttgcaaaagttttatacacagatatttgtattaaatttggagccatagtcagaagactcagatcataattggcttatttttctatttccgtaactattgtaatttccacttttgtaataattttgatttaaaatataaatttatttatttatttttttaatagtcaaaaatctttgctgttgtagtctgcaacctctaaaatgattgtgttgcttttaggattgatcagaagaaacactccaaaaattgagatgaaatgttggtgcagccagttataagtaatatagttaacaagcaaaaaaagtgctgccaccttttatgatgattttctaaatggagaaacatttggctgcatccacatagacctttatgttttgttttcagttgaaaacttgcctcctttggcaacattcgtaaatgaagcagaatttttttttctcttttttccaaatatgttagttttgttcttgtaagatgtatcatgggtattggtgctgtgtaatgaacaacgaattttaattagcatgtggttcagaatatacaatgttaggtttttaaaaagtatcttgatggttcttttctatttataatttcagactttcataaagtgtaccaagaatttcataaatttgttttcagtgaactgctttttgctatggtaggtcattaaacacagcacttactcttaaaaatgaaaatttctgatcatctaggatattgacacatttcaatttgcagtgtctttttgactggatatattaacgttcctctgaatggcattgatagatggttcagaagagaaactcaatgaaataaagagaatatttattcatggcgattaattaaattatttgcctaacttaagaaaactactgtgcgtaactctcagtttgtgcttaactccatttgacatgaggtgacagaagagagtctgagtctacctgtggaatatgttggtttattttcagtgcttgaagatacattcacaaatacttggtttgggaagacaccgtttaattttaagttaacttgcatgttgtaaatgcgttttatgtttaaataaagaggaaaattttttgaaa

SEQ ID NO: 311367 - DNA, 4910 bp, Homo sapiens
agctgtaatttggtattaaagaaaataagcatttgaatcaaataatgaggtcaaagcctggcaaacataatcctctgttaagcctgtagacatgcatgacaggttaatataatctgtatgagatgattaggaaaatcagtaatgatgattccgtctttgactttcaacagtaatttcttaattcagccttgcaaacaaattggaaaaatataggcctttgtcttttatttttagtggtttgttgatttttttttttttaaagctattcacagattttggagcagactcaaatttagttgagttgtaaataacgtcatatgttgcggcttttagtatttagtctaagagattactggacaagcataagtttcttagccatatatacatatattccatatagataaaattaaaaataatttcagtctcatcctttttttcctccaattacatctcttagggccaaaacaattaagaacacagtttgtgtcaatgtggagttaactgcagaacagtggaaaaagaagtatgaaaaagaaaaagaaaaaaataagatcctgcggaacactattcagtggcttgaaaatgagctcaacagatggcgtaatggggagacggtgcctattgatgaacagtttgacaaagagaaagccaacttggaagctttcacagtggataaagatattactcttaccaatgataaaccagcaaccgcaattggagttataggaaattttactgatgctgaaagaagaaagtgtgaagaagaaattgctaaattatacaaacagcttgatgacaaggatgaagaaattaaccagcaaagtcaactggtagagaaactgaagacgcaaatgttggatcaggaggagcttttggcatctaccagaagggatcaagacaatatgcaagctgagctgaatcgccttcaagcagaaaatgatgcctctaaagaagaagtgaaagaagttttacaggccctagaagaacttgctgtcaattatgatcagaagtctcaggaagttgaagacaaaactaaggaatatgaattgcttagtgatgaattgaatcagaaatcggcaactttagcgagtatagatgctgagcttcagaaacttaaggaaatgaccaaccaccagaaaaaacgagcagctgagatgatggcatctttactaaaagaccttgcagaaataggaattgctgtgggaaataatgatgtaaagcagcctgagggaactggcatgatagatgaagagttcactgttgcaagactctacattagcaaaatgaagtcagaagtaaaaaccatggtgaaacgttgcaagcagttagaaagcacacaaactgagagcaacaaaaaaatggaagaaaatgaaaaggagttagcagcatgtcagcttcgtatctctcaacatgaagccaaaatcaagtcattgactgaataccttcaaaatgtggaacaaaagaaaagacagttggaggaatctgtcgatgccctcagtgaagaactagtccagcttcgagcacaagagaaagtccatgaaatggaaaaggagcacttaaataaggttcagactgcaaatgaagttaagcaagctgttgaacagcagatccagagccatagagaaactcatcaaaaacagatcagtagtttgagagatgaagtagaagcaaaagcaaaacttattactgatcttcaagaccaaaaccagaaaatgatgttagagcaggaacgtctaagagtagaacatgagaagttgaaagccacagatcaggaaaagagcagaaaactacatgaacttacggttatgcaagatagacgagaacaagcaagacaagacttgaagggtttggaagagacagtggcaaaagaacttcagactttacacaacctgcgcaaactctttgttcaggacctggctacaagagttaaaaagagtgctgagattgattctgatgacaccggaggcagcgctgctcagaagcaaaaaatctcctttcttgaaaataatcttgaacagctcactaaagtgcacaaacagttggtacgtgataatgcagatctccgctgtgaacttcctaagttggaaaagcgacttcgagctacagctgagagagtgaaagctttggaatcagcactgaaagaagctaaagaaaatgcatctcgtgatcgcaaacgctatcagcaagaagtagatcgcataaaggaagcagtcaggtcaaagaatatggccagaagagggcattctgcacagattgctaaacctattcgtcccgggcaacatccagcagcttctccaactcacccaagtgcaattcgtggaggaggtgcatttgttcagaacagccagccagtggcagtgcgaggtggaggaggcaaacaagtgtaatcgtttatacatacccacaggtgttaaaaagtaatcgaagtacgaagaggaacatggtatcaagcagtcattcaatgactataacctctactcccttgggattgtagaattataacttttaaaaaaaatgtataaattatacctggcctgtacagctgtttcctacctactcttcttgtaaactctgctgcttcccaacacaactagagtgcaattttggcatcttaggagggaaaaaggacagtttacaactgtggccctatttattacacagtttgtctatcgtgtcttaaatttagtctttactgtgccaagctaactgtaccttataggactgtactttttgtattttttgtgtatgtttattttttaatctcagtttaaattacctagctgctactgcttcttgtttttcttttcctattaaaacgtcttcctttttttttcttaagagaaaatggaacatttaggttaaatgtctttaaattttaccacttaacaacactacatgcccataaaatatatccagtcagtactgtattttaaaatcccttgaaatgatgatatcagggttaaaattacttgtattgtttctgaagtttgctcctgaaaactactgtttgagcactgaaacgttacaaatgcctaataggcatttgagactgagcaaggctacttgttatctcatgaaatgcctgttgccgagttattttgaatagaaatattttaaagtatcaaaagcagatcttagtttaagggagtttggaaaaggaattatatttctctttttcctgattctgtactcaacaagtcttgatggaattaaaatactctgctttattctggtgagcctgctagctaatataagtattggacaggtaataatttgtcatctttaatattagtaaaatgaattaagatattataggattaaacataattttatacggttagtactttattggccgacctaaatttatagcgtgtggaaattgagaaaaatgaagaaacaggacagatatatgatgaattaaaaatatatataggtcaattttggtctgaaatccctgaggtgtttttaacctgctacactaatttgtacactaatttatttctttagtctagaaatagtaaattgtttgcaagtcactaataatcattagataaattattttcttggccatagccgataattttgtaatcagtactaagtgtatacgtatttttgccactttttcctcagatgattaaagtaagtcaacagcttattttaggaaactgtaaaagtaatagggaaagagatttcactatttgcttcatcagtggtaggggggcggtgactgcaactgtgttagcagaaattcacagagaatggggatttaaggttagcagagaaacttggaaagttctgtgttaggatcttgctggcagaattaactttttgcaaaagttttatacacagatatttgtattaaatttggagccatagtcagaagactcagatcataattggcttatttttctatttccgtaactattgtaatttccacttttgtaataattttgatttaaaatataaatttatttatttatttttttaatagtcaaaaatctttgctgttgtagtctgcaacctctaaaatgattgtgttgcttttaggattgatcagaagaaacactccaaaaattgagatgaaatgttggtgcagccagttataagtaatatagttaacaagcaaaaaaagtgctgccaccttttatgatgattttctaaatggagaaacatttggctgcatccacatagacctttatgttttgttttcagttgaaaacttgcctcctttggcaacattcgtaaatgaagcagaatttttttttctcttttttccaaatatgttagttttgttcttgtaagatgtatcatgggtattggtgctgtgtaatgaacaacgaattttaattagcatgtggttcagaatatacaatgttaggtttttaaaaagtatcttgatggttcttttctatttataatttcagactttcataaagtgtaccaagaatttcataaatttgttttcagtgaactgctttttgctatggtaggtcattaaacacagcacttactcttaaaaatgaaaatttctgatcatctaggatattgacacatttcaatttgcagtgtctttttgactggatatattaacgttcctctgaatggcattgatagatggttcagaagagaaactcaatgaaataaagagaatatttattcatggcgattaattaaattatttgcctaacttaagaaaactactgtgcgtaactctcagtttgtgcttaactccatttgacatgaggtgacagaagagagtctgagtctacctgtggaatatgttggtttattttcagtgcttgaagatacattcacaaatacttggtttgggaagacaccgtttaattttaagttaacttgcatgttgtaaatgcgttttatgtttaaataaagaggaaaattttttgaaa

SEQ ID NO: 311368 - DNA, 4081 bp, Homo sapiens
tagaggatccctgctctgactatagttggatcaggaggagcttttggcatctaccagaagggatcaagacaatatgcaagctgagctgaatcgccttcaagcagaaaatgatgcctctaaagaagaagtgaaagaagttttacaggccctagaagaacttgctgtcaattatgatcagaagtctcaggaagttgaagacaaaactaaggaatatgaattgcttagtgatgaattgaatcagaaatcggcaactttagcgagtatagatgctgagcttcagaaacttaaggaaatgaccaaccaccagaaaaaacgagcagctgagatgatggcatctttactaaaagaccttgcagaaataggaattgctgtgggaaataatgatgtaaagcagcctgagggaactggcatgatagatgaagagttcactgttgcaagactctacattagcaaaatgaagtcagaagtaaaaaccatggtgaaacgttgcaagcagttagaaagcacacaaactgagagcaacaaaaaaatggaagaaaatgaaaaggagttagcagcatgtcagcttcgtatctctcaacatgaagccaaaatcaagtcattgactgaataccttcaaaatgtggaacaaaagaaaagacagttggaggaatctgtcgatgccctcagtgaagaactagtccagcttcgagcacaagagaaagtccatgaaatggaaaaggagcacttaaataaggttcagactgcaaatgaagttaagcaagctgttgaacagcagatccagagccatagagaaactcatcaaaaacagatcagtagtttgagagatgaagtagaagcaaaagcaaaacttattactgatcttcaagaccaaaaccagaaaatgatgttagagcaggaacgtctaagagtagaacatgagaagttgaaagccacagatcaggaaaagagcagaaaactacatgaacttacggttatgcaagatagacgagaacaagcaagacaagacttgaagggtttggaagagacagtggcaaaagaacttcagactttacacaacctgcgcaaactctttgttcaggacctggctacaagagttaaaaagagtgctgagattgattctgatgacaccggaggcagcgctgctcagaagcaaaaaatctcctttcttgaaaataatcttgaacagctcactaaagtgcacaaacagttggtacgtgataatgcagatctccgctgtgaacttcctaagttggaaaagcgacttcgagctacagctgagagagtgaaagctttggaatcagcactgaaagaagctaaagaaaatgcatctcgtgatcgcaaacgctatcagcaagaagtagatcgcataaaggaagcagtcaggtcaaagaatatggccagaagagggcattctgcacagattgctaaacctattcgtcccgggcaacatccagcagcttctccaactcacccaagtgcaattcgtggaggaggtgcatttgttcagaacagccagccagtggcagtgcgaggtggaggaggcaaacaagtgtaatcgtttatacatacccacaggtgttaaaaagtaatcgaagtacgaagaggaacatggtatcaagcagtcattcaatgactataacctctactcccttgggattgtagaattataacttttaaaaaaaatgtataaattatacctggcctgtacagctgtttcctacctactcttcttgtaaactctgctgcttcccaacacaactagagtgcaattttggcatcttaggagggaaaaaggacagtttacaactgtggccctatttattacacagtttgtctatcgtgtcttaaatttagtctttactgtgccaagctaactgtaccttataggactgtactttttgtattttttgtgtatgtttattttttaatctcagtttaaattacctagctgctactgcttcttgtttttcttttcctattaaaacgtcttcctttttttttcttaagagaaaatggaacatttaggttaaatgtctttaaattttaccacttaacaacactacatgcccataaaatatatccagtcagtactgtattttaaaatcccttgaaatgatgatatcagggttaaaattacttgtattgtttctgaagtttgctcctgaaaactactgtttgagcactgaaacgttacaaatgcctaataggcatttgagactgagcaaggctacttgttatctcatgaaatgcctgttgccgagttattttgaatagaaatattttaaagtatcaaaagcagatcttagtttaagggagtttggaaaaggaattatatttctctttttcctgattctgtactcaacaagtcttgatggaattaaaatactctgctttattctggtgagcctgctagctaatataagtattggacaggtaataatttgtcatctttaatattagtaaaatgaattaagatattataggattaaacataattttatacggttagtactttattggccgacctaaatttatagcgtgtggaaattgagaaaaatgaagaaacaggacagatatatgatgaattaaaaatatatataggtcaattttggtctgaaatccctgaggtgtttttaacctgctacactaatttgtacactaatttatttctttagtctagaaatagtaaattgtttgcaagtcactaataatcattagataaattattttcttggccatagccgataattttgtaatcagtactaagtgtatacgtatttttgccactttttcctcagatgattaaagtaagtcaacagcttattttaggaaactgtaaaagtaatagggaaagagatttcactatttgcttcatcagtggtaggggggcggtgactgcaactgtgttagcagaaattcacagagaatggggatttaaggttagcagagaaacttggaaagttctgtgttaggatcttgctggcagaattaactttttgcaaaagttttatacacagatatttgtattaaatttggagccatagtcagaagactcagatcataattggcttatttttctatttccgtaactattgtaatttccacttttgtaataattttgatttaaaatataaatttatttatttatttttttaatagtcaaaaatctttgctgttgtagtctgcaacctctaaaatgattgtgttgcttttaggattgatcagaagaaacactccaaaaattgagatgaaatgttggtgcagccagttataagtaatatagttaacaagcaaaaaaagtgctgccaccttttatgatgattttctaaatggagaaacatttggctgcatccacatagacctttatgttttgttttcagttgaaaacttgcctcctttggcaacattcgtaaatgaagcagaatttttttttctcttttttccaaatatgttagttttgttcttgtaagatgtatcatgggtattggtgctgtgtaatgaacaacgaattttaattagcatgtggttcagaatatacaatgttaggtttttaaaaagtatcttgatggttcttttctatttataatttcagactttcataaagtgtaccaagaatttcataaatttgttttcagtgaactgctttttgctatggtaggtcattaaacacagcacttactcttaaaaatgaaaatttctgatcatctaggatattgacacatttcaatttgcagtgtctttttgactggatatattaacgttcctctgaatggcattgatagatggttcagaagagaaactcaatgaaataaagagaatatttattcatggcgattaattaaattatttgcctaacttaagaaaactactgtgcgtaactctcagtttgtgcttaactccatttgacatgaggtgacagaagagagtctgagtctacctgtggaatatgttggtttattttcagtgcttgaagatacattcacaaatacttggtttgggaagacaccgtttaattttaagttaacttgcatgttgtaaatgcgttttatgtttaaataaagaggaaaattttttgaaa

SEQ ID NO: 311369 - DNA, 3169 bp, Homo sapiens
  misc_feature (6)..(6): n is a, c, g, or t
  misc_feature (8)..(8): n is a, c, g, or t
  misc_feature (10)..(10): n is a, c, g, or t
  misc_feature (32)..(32): n is a, c, g, or t
ctcgtncncntcgtgccgaattcggcagaggnaaaagagcagaaaactacatgaacttacggttatgcaagatagacgagaacaagcaagacaagacttgaagggtttggaagagacagtggcaaaagaacttcagactttacacaacctgcgcaaactctttgttcaggacctggctacaagagttaaaaagagtgctgagattgattctgatgacaccggaggcagcgctgctcagaagcaaaaaatctcctttcttgaaaataatcttgaacagctcactaaagtgcacaaacagttggtacgtgataatgcagatctccgctgtgaacttcctaagttggaaaagcgacttcgagctacagctgagagagtgaaagctttggaatcagcactgaaagaagctaaagaaaatgcatctcgtgatcgcaaacgctatcagcaagaagtagatcgcataaaggaagcagtcaggtcaaagaatatggccagaagagggcattctgcacagattgctaaacctattcgtcccgggcaacatccagcagcttctccaactcacccaagtgcaattcgtggaggaggtgcatttgttcagaacagccagccagtggcagtgcgaggtggaggaggcaaacaagtgtaatcgtttatacatacccacaggtgttaaaaagtaatcgaagtacgaagaggaacatggtatcaagcagtcattcaatgactataacctctactcccttgggattgtagaattataacttttaaaaaaaatgtataaattatacctggcctgtacagctgtttcctacctactcttcttgtaaactctgctgcttcccaacacaactagagtgcaattttggcatcttaggagggaaaaaggacagtttacaactgtggccctatttattacacagtttgtctatcgtgtcttaaatttagtctttactgtgccaagctaactgtaccttataggactgtactttttgtattttttgtgtatgtttattttttaatctcagtttaaattacctagctgctactgcttcttgtttttcttttcctattaaaacgtcttcctttttttttcttaagagaaaatggaacatttaggttaaatgtctttaaattttaccacttaacaacactacatgcccataaaatatatccagtcagtactgtattttaaaatcccttgaaatgatgatatcagggttaaaattacttgtattgtttctgaagtttgctcctgaaaactactgtttgagcactgaaacgttacaaatgcctaataggcatttgagactgagcaaggctacttgttatctcatgaaatgcctgttgccgagttattttgaatagaaatattttaaagtatcaaaagcagatcttagtttaagggagtttggaaaaggaattatatttctctttttcctgattctgtactcaacaagtcttgatggaattaaaatactctgctttattctggtgagcctgctagctaatataagtattggacaggtaataatttgtcatctttaatattagtaaaatgaattaagatattataggattaaacataattttatacggttagtactttattggccgacctaaatttatagcgtgtggaaattgagaaaaatgaagaaacaggacagatatatgatgaattaaaaatatatataggtcaattttggtctgaaatccctgaggtgtttttaacctgctacactaatttgtacactaatttatttctttagtctagaaatagtaaattgtttgcaagtcactaataatcattagataaattattttcttggccatagccgataattttgtaatcagtactaagtgtatacgtatttttgccactttttcctcagatgattaaagtaagtcaacagcttattttaggaaactgtaaaagtaatagggaaagagatttcactatttgcttcatcagtggtaggggggcggtgactgcaactgtgttagcagaaattcacagagaatggggatttaaggttagcagagaaacttggaaagttctgtgttaggatcttgctggcagaattaactttttgcaaaagttttatacacagatatttgtattaaatttggagccatagtcagaagactcagatcataattggcttatttttctatttccgtaactattgtaatttccacttttgtaataattttgatttaaaatataaatttatttatttatttttttaatagtcaaaaatctttgctgttgtagtctgcaacctctaaaatgattgtgttgcttttaggattgatcagaagaaacactccaaaaattgagatgaaatgttggtgcagccagttataagtaatatagttaacaagcaaaaaaagtgctgccaccttttatgatgattttctaaatggagaaacatttggctgcatccacatagacctttatgttttgttttcagttgaaaacttgcctcctttggcaacattcgtaaatgaagcagaatttttttttctcttttttccaaatatgttagttttgttcttgtaagatgtatcatgggtattggtgctgtgtaatgaacaacgaattttaattagcatgtggttcagaatatacaatgttaggtttttaaaaagtatcttgatggttcttttctatttataatttcagactttcataaagtgtaccaagaatttcataaatttgttttcagtgaactgctttttgctatggtaggtcattaaacacagcacttactcttaaaaatgaaaatttctgatcatctaggatattgacacatttcaatttgcagtgtctttttgactggatatattaacgttcctctgaatggcattgatagatggttcagaagagaaactcaatgaaataaagagaatatttattcatggcgattaattaaattatttgcctaacttaagaaaactactgtgcgtaactctcagtttgtgcttaactccatttgacatgaggtgacagaagagagtctgagtctacctgtggaatatgttggtttattttcagtgcttgaagatacattcacaaatacttggtttgggaagacaccgtttaattttaagttaacttgcatgttgtaaatgcgttttatgtttaaataaagaggaaaattttttgaaa

SEQ ID NO: 311370 - DNA, 5875 bp, Homo sapiens
agcggcctgtcgcccaacggcggcctcaggagtgatcgggcagcagtcggccggccagcggacggcagagcgggcggacgggtaggcccggcctgctcttcgcgaggaggaagaaggtggccactctcccggtccccagaacctccccagcccccgcagtccgcccagaccgtaaagggggacgctgaggagccgcggacgctctccccggtgccgccgccgctgccgccgccatggctgccatgatggatcggaagtgagcattagggttaacggctgccggcgccggctcttcaagtcccggctccccggccgcctccacccggggaagcgcagcgcggcgcagctgactgctgcctctcacggccctcgcgaccacaagccctcaggtccggcgcgttccctgcaagactgagcggcggggagtggctcccggccgccggccccggctgcgagaaagatggcggacctggccgagtgcaacatcaaagtgatgtgtcgcttcagacctctcaacgagtctgaagtgaaccgcggcgacaagtacatcgccaagtttcagggagaagacacggtcgtgatcgcgtccaagccttatgcatttgatcgggtgttccagtcaagcacatctcaagagcaagtgtataatgactgtgcaaagaagattgttaaagatgtacttgaaggatataatggaacaatatttgcatatggacaaacatcctctgggaagacacacacaatggagggtaaacttcatgatccagaaggcatgggaattattccaagaatagtgcaagatatttttaattatatttactccatggatgaaaatttggaatttcatattaaggtttcatattttgaaatatatttggataagataagggacctgttagatgtttcaaagaccaacctttcagttcatgaagacaaaaaccgagttccctatgtaaaggggtgcacagagcgttttgtatgtagtccagatgaagttatggataccatagatgaaggaaaatccaacagacatgtagcagttacaaatatgaatgaacatagctctaggagtcacagtatatttcttattaatgtcaaacaagagaacacacaaacggaacaaaagctgagtggaaaactttatctggttgatttagctggtagtgaaaaggttagtaaaactggagctgaaggtgctgtgctggatgaagctaaaaacatcaacaagtcactttctgctcttggaaatgttatttctgctttggctgagggtagtacatatgttccatatcgagatagtaaaatgacaagaatccttcaagattcattaggtggcaactgtagaaccactattgtaatttgctgctctccatcatcatacaatgagtctgaaacaaaatctacactcttatttggccaaagggccaaaacaattaagaacacagtttgtgtcaatgtggagttaactgcagaacagtggaaaaagaagtatgaaaaagaaaaagaaaaaaataagatcctgcggaacactattcagtggcttgaaaatgagctcaacagatggcgtaatggggagacggtgcctattgatgaacagtttgacaaagagaaagccaacttggaagctttcacagtggataaagatattactcttaccaatgataaaccagcaaccgcaattggagttataggaaattttactgatgctgaaagaagaaagtgtgaagaagaaattgctaaattatacaaacagcttgatgacaaggatgaagaaattaaccagcaaagtcaactggtagagaaactgaagacgcaaatgttggatcaggaggagcttttggcatctaccagaagggatcaagacaatatgcaagctgagctgaatcgccttcaagcagaaaatgatgcctctaaagaagaagtgaaagaagttttacaggccctagaagaacttgctgtcaattatgatcagaagtctcaggaagttgaagacaaaactaaggaatatgaattgcttagtgatgaattgaatcagaaatcggcaactttagcgagtatagatgctgagcttcagaaacttaaggaaatgaccaaccaccagaaaaaacgagcagctgagatgatggcatctttactaaaagaccttgcagaaataggaattgctgtgggaaataatgatgtaaagcagcctgagggaactggcatgatagatgaagagttcactgttgcaagactctacattagcaaaatgaagtcagaagtaaaaaccatggtgaaacgttgcaagcagttagaaagcacacaaactgagagcaacaaaaaaatggaagaaaatgaaaaggagttagcagcatgtcagcttcgtatctctcaacatgaagccaaaatcaagtcattgactgaataccttcaaaatgtggaacaaaagaaaagacagttggaggaatctgtcgatgccctcagtgaagaactagtccagcttcgagcacaagagaaagtccatgaaatggaaaaggagcacttaaataaggttcagactgcaaatgaagttaagcaagctgttgaacagcagatccagagccatagagaaactcatcaaaaacagatcagtagtttgagagatgaagtagaagcaaaagcaaaacttattactgatcttcaagaccaaaaccagaaaatgatgttagagcaggaacgtctaagagtagaacatgagaagttgaaagccacagatcaggaaaagagcagaaaactacatgaacttacggttatgcaagatagacgagaacaagcaagacaagacttgaagggtttggaagagacagtggcaaaagaacttcagactttacacaacctgcgcaaactctttgttcaggacctggctacaagagttaaaaagagtgctgagattgattctgatgacaccggaggcagcgctgctcagaagcaaaaaatctcctttcttgaaaataatcttgaacagctcactaaagtgcacaaacagttggtacgtgataatgcagatctccgctgtgaacttcctaagttggaaaagcgacttcgagctacagctgagagagtgaaagctttggaatcagcactgaaagaagctaaagaaaatgcatctcgtgatcgcaaacgctatcagcaagaagtagatcgcataaaggaagcagtcaggtcaaagaatatggccagaagagggcattctgcacagattgctaaacctattcgtcccgggcaacatccagcagcttctccaactcacccaagtgcaattcgtggaggaggtgcatttgttcagaacagccagccagtggcagtgcgaggtggaggaggcaaacaagtgtaatcgtttatacatacccacaggtgttaaaaagtaatcgaagtacgaagaggaacatggtatcaagcagtcattcaatgactataacctctactcccttgggattgtagaattataacttttaaaaaaaatgtataaattatacctggcctgtacagctgtttcctacctactcttcttgtaaactctgctgcttcccaacacaactagagtgcaattttggcatcttaggagggaaaaaggacagtttacaactgtggccctatttattacacagtttgtctatcgtgtcttaaatttagtctttactgtgccaagctaactgtaccttataggactgtactttttgtattttttgtgtatgtttattttttaatctcagtttaaattacctagctgctactgcttcttgtttttcttttcctattaaaacgtcttcctttttttttcttaagagaaaatggaacatttaggttaaatgtctttaaattttaccacttaacaacactacatgcccataaaatatatccagtcagtactgtattttaaaatcccttgaaatgatgatatcagggttaaaattacttgtattgtttctgaagtttgctcctgaaaactactgtttgagcactgaaacgttacaaatgcctaataggcatttgagactgagcaaggctacttgttatctcatgaaatgcctgttgccgagttattttgaatagaaatattttaaagtatcaaaagcagatcttagtttaagggagtttggaaaaggaattatatttctctttttcctgattctgtactcaacaagtcttgatggaattaaaatactctgctttattctggtgagcctgctagctaatataagtattggacaggtaataatttgtcatctttaatattagtaaaatgaattaagatattataggattaaacataattttatacggttagtactttattggccgacctaaatttatagcgtgtggaaattgagaaaaatgaagaaacaggacagatatatgatgaattaaaaatatatataggtcaattttggtctgaaatccctgaggtgtttttaacctgctacactaatttgtacactaatttatttctttagtctagaaatagtaaattgtttgcaagtcactaataatcattagataaattattttcttggccatagccgataattttgtaatcagtactaagtgtatacgtatttttgccactttttcctcagatgattaaagtaagtcaacagcttattttaggaaactgtaaaagtaatagggaaagagatttcactatttgcttcatcagtggtaggggggcggtgactgcaactgtgttagcagaaattcacagagaatggggatttaaggttagcagagaaacttggaaagttctgtgttaggatcttgctggcagaattaactttttgcaaaagttttatacacagatatttgtattaaatttggagccatagtcagaagactcagatcataattggcttatttttctatttccgtaactattgtaatttccacttttgtaataattttgatttaaaatataaatttatttatttatttttttaatagtcaaaaatctttgctgttgtagtctgcaacctctaaaatgattgtgttgcttttaggattgatcagaagaaacactccaaaaattgagatgaaatgttggtgcagccagttataagtaatatagttaacaagcaaaaaaagtgctgccaccttttatgatgattttctaaatggagaaacatttggctgcatccacatagacctttatgttttgttttcagttgaaaacttgcctcctttggcaacattcgtaaatgaagcagaatttttttttctcttttttccaaatatgttagttttgttcttgtaagatgtatcatgggtattggtgctgtgtaatgaacaacgaattttaattagcatgtggttcagaatatacaatgttaggtttttaaaaagtatcttgatggttcttttctatttataatttcagactttcataaagtgtaccaagaatttcataaatttgttttcagtgaactgctttttgctatggtaggtcattaaacacagcacttactcttaaaaatgaaaatttctgatcatctaggatattgacacatttcaatttgcagtgtctttttgactggatatattaacgttcctctgaatggcattgatagatggttcagaagagaaactcaatgaaataaagagaatatttattcatggcgattaattaaattatttgcctaacttaagaaaactactgtgcgtaactctcagtttgtgcttaactccatttgacatgaggtgacagaagagagtctgagtctacctgtggaatatgttggtttattttcagtgcttgaagatacattcacaaatacttggtttgggaagacaccgtttaattttaagttaacttgcatgttgtaaatgcgttttatgtttaaataaagaggaaaattttttgaaa

SEQ ID NO: 311371 - DNA, 5995 bp, Homo sapiens
agcggcctgtcgcccaacggcggcctcaggagtgatcgggcagcagtcggccggccagcggacggcagagcgggcggacgggtaggcccggcctgctcttcgcgaggaggaagaaggtggccactctcccggtccccagaacctccccagcccccgcagtccgcccagaccgtaaagggggacgctgaggagccgcggacgctctccccggtgccgccgccgctgccgccgccatggctgccatgatggatcggaagtgagcattagggttaacggctgccggcgccggctcttcaagtcccggctccccggccgcctccacccggggaagcgcagcgcggcgcagctgactgctgcctctcacggccctcgcgaccacaagccctcaggtccggcgcgttccctgcaagactgagcggcggggagtggctcccggccgccggccccggctgcgagaaagatggcggacctggccgagtgcaacatcaaagtgatgtgtcgcttcagacctctcaacgagtctgaagtgaaccgcggcgacaagtacatcgccaagtttcagggagaagacacggtcgtgatcgcgtccaagccttatgcatttgatcgggtgttccagtcaagcacatctcaagagcaagtgtataatgactgtgcaaagaagattgttaaagatgtacttgaaggatataatggaacaatatttgcatatggacaaacatcctctgggaagacacacacaatggagggtaaacttcatgatccagaaggcatgggaattattccaagaatagtgcaagatatttttaattatatttactccatggatgaaaatttggaatttcatattaaggtttcatattttgaaatatatttggataagataagggacctgttagatgtttcaaagaccaacctttcagttcatgaagacaaaaaccgagttccctatgtaaaggggtgcacagagcgttttgtatgtagtccagatgaagttatggataccatagatgaaggaaaatccaacagacatgtagcagttacaaatatgaatgaacatagctctaggagtcacagtatatttcttattaatgtcaaacaagagaacacacaaacggaacaaaagctgagtggaaaactttatctggttgatttagctggtagtgaaaaggttagtaaaactggagctgaaggtgctgtgctggatgaagctaaaaacatcaacaagtcactttctgctcttggaaatgttatttctgctttggctgagggtagtacatatgttccatatcgagatagtaaaatgacaagaatccttcaagattcattaggtggcaactgtagaaccactattgtaatttgctgctctccatcatcatacaatgagtctgaaacaaaatctacactcttatttggccaaagggccaaaacaattaagaacacagtttgtgtcaatgtggagttaactgcagaacagtggaaaaagaagtatgaaaaagaaaaagaaaaaaataagatcctgcggaacactattcagtggcttgaaaatgagctcaacagatggcgtaatggggagacggtgcctattgatgaacagtttgacaaagagaaagccaacttggaagctttcacagtggataaagatattactcttaccaatgataaaccagcaaccgcaattggagttataggaaattttactgatgctgaaagaagaaagtgtgaagaagaaattgctaaattatacaaacagcttgatgacaaggatgaagaaattaaccagcaaagtcaactggtagagaaactgaagacgcaaatgttggatcaggaggagcttttggcatctaccagaagggatcaagacaatatgcaagctgagctgaatcgccttcaagcagaaaatgatgcctctaaagaagaagtgaaagaagttttacaggccctagaagaacttgctgtcaattatgatcagaagtctcaggaagttgaagacaaaactaaggaatatgaattgcttagtgatgaattgaatcagaaatcggcaactttagcgagtatagatgctgagcttcagaaacttaaggaaatgaccaaccaccagaaaaaacgagcagctgagatgatggcatctttactaaaagaccttgcagaaataggaattgctgtgggaaataatgatgtaaagcagcctgagggaactggcatgatagatgaagagttcactgttgcaagactctacattagcaaaatgaagtcagaagtaaaaaccatggtgaaacgttgcaagcagttagaaagcacacaaactgagagcaacaaaaaaatggaagaaaatgaaaaggagttagcagcatgtcagcttcgtatctctcaacatgaagccaaaatcaagtcattgactgaataccttcaaaatgtggaacaaaagaaaagacagttggaggaatctgtcgatgccctcagtgaagaactagtccagcttcgagcacaagagaaagtccatgaaatggaaaaggagcacttaaataaggttcagactgcaaatgaagttaagcaagctgttgaacagcagatccagagccatagagaaactcatcaaaaacagatcagtagtttgagagatgaagtagaagcaaaagcaaaacttattactgatcttcaagaccaaaaccagaaaatgatgttagagcaggaacgtctaagagtagaacatgagaagttgaaagccacagatcaggaaaagagcagaaaactacatgaacttacggttatgcaagatagacgagaacaagcaagacaagacttgaagggtttggaagagacagtggcaaaagaacttcagactttacacaacctgcgcaaactctttgttcaggacctggctacaagagttaaaaagagtgctgagattgattctgatgacaccggaggcagcgctgctcagaagcaaaaaatctcctttcttgaaaataatcttgaacagctcactaaagtgcacaaacagttggtacgtgataatgcagatctccgctgtgaacttcctaagttggaaaagcgacttcgagctacagctgagagagtgaaagctttggaatcagcactgaaagaagctaaagaaaatgcatctcgtgatcgcaaacgctatcagcaagaagtagatcgcataaaggaagcagtcaggtcaaagaatatggccagaagagggcattctgcacagattgctaaacctattcgtcccgggcaacatccagcagcttctccaactcacccaagtgcaattcgtggaggaggtgcatttgttcagaacagccagccagtggcagtgcgaggtggaggaggcaaacaagtgtaatcgtttatacatacccacaggtgttaaaaagtaatcgaagtacgaagaggaacatggtatcaagcagtcattcaatgactataacctctactcccttgggattgtagaattataacttttaaaaaaaatgtataaattatacctggcctgtacagctgtttcctacctactcttcttgtaaactctgctgcttcccaacacaactagagtgcaattttggcatcttaggagggaaaaaggacagtttacaactgtggccctatttattacacagtttgtctatcgtgtcttaaatttagtctttactgtgccaagctaactgtaccttataggactgtactttttgtattttttgtgtatgtttattttttaatctcagtttaaattacctagctgctactgcttcttgtttttcttttcctattaaaacgtcttcctttttttttcttaagagaaaatggaacatttaggttaaatgtctttaaattttaccacttaacaacactacatgcccataaaatatatccagtcagtactgtattttaaaatcccttgaaatgatgatatcagggttaaaattacttgtattgtttctgaagtttgctcctgaaaactactgtttgagcactgaaacgttacaaatgcctaataggcatttgagactgagcaaggctacttgttatctcatgaaatgcctgttgccgagttattttgaatagaaatattttaaagtatcaaaagcagatcttagtttaagggagtttggaaaaggaattatatttctctttttcctgattctgtactcaacaagtcttgatggaattaaaatactctgctttattctggtgagcctgctagctaatataagtattggacaggtaataatttgtcatctttaatattagtaaaatgaattaagatattataggattaaacataattttatacggttagtactttattggccgacctaaatttatagcgtgtggaaattgagaaaaatgaagaaacaggacagatatatgatgaattaaaaatatatataggtcaattttggtctgaaatccctgaggtgtttttaacctgctacactaatttgtacactaatttatttctttagtctagaaatagtaaattgtttgcaagtcactaataatcattagataaattattttcttggccatagccgataattttgtaatcagtactaagtgtatacgtatttttgccactttttcctcagatgattaaagtaagtcaacagcttattttaggaaactgtaaaagtaatagggaaagagatttcactatttgcttcatcagtggtaggggggcggtgactgcaactgtgttagcagaaattcacagagaatggggatttaaggttagcagagaaacttggaaagttctgtgttaggatcttgctggcagaattaactttttgcaaaagttttatacacagatatttgtattaaatttggagccatagtcagaagactcagatcataattggcttatttttctatttccgtaactattgtaatttccacttttgtaataattttgatttaaaatataaatttatttatttatttttttaatagtcaaaaatctttgctgttgtagtctgcaacctctaaaatgattgtgttgcttttaggattgatcagaagaaacactccaaaaattgagatgaaatgttggtgcagccagttataagtaatatagttaacaagcaaaaaaagtgctgccaccttttatgatgattttctaaatggagaaacatttggctgcatccacatagacctttatgttttgttttcagttgaaaacttgcctcctttggcaacattcgtaaatgaagcagaatttttttttctcttttttccaaatatgttagttttgttcttgtaagatgtatcatgggtattggtgctgtgtaatgaacaacgaattttaattagcatgtggttcagaatatacaatgttaggtttttaaaaagtatcttgatggttcttttctatttataatttcagactttcataaagtgtaccaagaatttcataaatttgttttcagtgaactgctttttgctatggtaggtcattaaacacagcacttactcttaaaaatgaaaatttctgatcatctaggatattgacacatttcaatttgcagtgtctttttgactggatatattaacgttcctctgaatggcattgatagatggttcagaagagaaactcaatgaaataaagagaatatttattcatggcgattaattaaattatttgcctaacttaagaaaactactgtgcgtaactctcagtttgtgcttaactccatttgacatgaggtgacagaagagagtctgagtctacctgtggaatatgttggtttattttcagtgcttgaagatacattcacaaatacttggtttgggaagacaccgtttaattttaagttaacttgcatgttgtaaatgcgttttatgtttaaataaagaggaaaattttttgaaaaaaaagggggggttaaaatccgagggcatttggtccgttttggaagggcctaagggtataaaaggggggttaaactgtgaaaggtggtttggaccttgtggttgacctgcggaatgtggg

SEQ ID NO: 311372 - DNA, 5519 bp, Homo sapiens
gccccccaaccccgcaggaaaacacaggcccctccggctttcgctctcgctctgggaactggaaggacccccgactcccgcgcagggtctggggttgtgcgcgtcgggttgcgtctccaggccgggggcgtcagggagccgggggcggggacgggcgcgggcgcagcggaccgggcggggccgagccgggaagctggtcggtgcgtcagcctcacgcggcgggaaggaaccggtccgaggccccgggctgccggcgcgggcgccgcggcacgtccacaggctgggtcgcgaggtggcgatcgctgagaggcaggagggccgaggcgggcctgggaggcggcccggaggtggggcgccgctggggccggcccgcacgggcttcatctgagggcgcacggcccgcgaccgagcgtgcggactggcctcccaagcgtggggcgacaagctgccggagctgcaatgggccgcggctggggattcttgtttggcctcctgggcgccgtgtggctgctcagctcgggccacggagaggagcagcccccggagacagcggcacagaggtgcttctgccaggttagtggttacttggatgattgtacctgtgatgttgaaaccattgatagatttaataactacaggcttttcccaagactacaaaaacttcttgaaagtgactactttaggtattacaaggtaaacctgaagaggccgtgtcctttctggaatgacatcagccagtgtggaagaagggactgtgctgtcaaaccatgtcaatctgatgaagttcctgatggaattaaatctgcgagctacaagtattctgaagaagccaataatctcattgaagaatgtgaacaagctgaacgacttggagcagtggatgaatctctgagtgaggaaacacagaaggctgttcttcagtggaccaagcatgatgattcttcagataacttctgtgaagctgatgacattcagtcccctgaagctgaatatgtagatttgcttcttaatcctgagcgctacactggttacaagggaccagatgcttggaaaatatggaatgtcatctacgaagaaaactgttttaagccacagacaattaaaagacctttaaatcctttggcttctggtcaagggacaagtgaagagaacactttttacagttggctagaaggtctctgtgtagaaaaaagagcattctacagacttatatctggcctacatgcaagcattaatgtgcatttgagtgcaagatatcttttacaagagacctggttagaaaagaaatggggacacaacattacagaatttcaacagcgatttgatggaattttgactgaaggagaaggtccaagaaggcttaagaacttgtattttctctacttaatagaactaagggctttatccaaagtgttaccattcttcgagcgcccagattttcaactctttactggaaataaaattcaggatgaggaaaacaaaatgttacttctggaaatacttcatgaaatcaagtcatttcctttgcattttgatgagaattcattttttgctggggataaaaaagaagcacacaaactaaaggaggactttcgactgcattttagaaatatttcaagaattatggattgtgttggttgttttaaatgtcgtctgtggggaaagcttcagactcagggtttgggcactgctctgaagatcttattttctgagaaattgatagcaaatatgccagaaagtggacctagttatgaattccatctaaccagacaagaaatagtatcattattcaacgcatttggaagaatttctacaagtgtgaaagaattagaaaacttcaggaacttgttacagaatattcattaaagaaaacaagctgatatgtgcctgtttctggacaatggaggcgaaagagtggaatttcattcaaaggcataatagcaatgacagtcttaagccaaacattttatataaagttgcttttgtaaaggagaattatattgttttaagtaaacacatttttaaaaattgtgttaagtctatgtataatactactgtgagtaaaagtaatactttaataatgtggtacaaattttaaagtttaatattgaataaaaggaggattatcaaattcatatatgataaaagtgaatgttctaagtctctcaaactagcgttttatgtaataatatgtaatataaataaaactatggtaaatgtgacaagcatttaataggaaaatgctaaggaggcctcataaatgacccataattaccaacgtagaatttttcagtacatttagggttgctggatttagcaaataaaaataaagattgcccagttagatttgaatttcagataaacaattagttttttaatattttacatggaatatttggaaaatacttatactaaaaaattatttgtttgaaattcacatttaactgggagtcttgtattttatctggcaatcctaaaatacattggtatgaaacaaatcacttttagaagtatattgctattttgattgggttgtttttgtgtgtagaaacgtacaataacaactcaaaggcacaggagatttctaaacattgtgaaaagttgaatagattatatatttattctcataatactttcactaatactaaataaaatttggggaacactttttatttttatataatttccaatttacagaaaagtttcaaaaatagtacaaagagctctcttacccagattcactaattgttcatacgtgctttatctttcatgctttctctgtacacacacacacacacacaaatttttcctcaatcatttgaaagtcagttataggcatcatgccccttaaaccctaaatacttcagtgtgtaatactgaataattactaaaaatgattttctcagaaaaaaaaactcccacaattctggaactataatactgtaagccttagaataaataatactttcaagttccaatctaaagttctttttgagttttgttgcccgttttatgcttgatgtgtatagtaatagggtaggctatttattttattaaaattttttttagagacaaggttttgctgtgttgcccaagctggaacttgaacgactgggctgaagtgatcttcccacctcagcctcccaagtagctgggaatacaggtgtctgccaccatacccagtttcatttttgttttttatacccgaagttcatttcctttgtctccctaaaactgaactgtaattttgggaggttttcattagtggaagctcttcatttataaagctatttgaaggggtttaggaatttatatcacatggtaattgtagagaaaaagaagctatatacctcaaaatcgtgccctctttacatatgtcttatcaggtataacatgttgaaatgtcacattagtagtaaagtggggtttatttatatagtggttaagaaatgtcagtttacactgctgtatacttcttcttctgtgtccctaaggcctggtacagtgccaagcacatacttggtatccaataaatatttgttggatgaatgtatgcatatgtattcagtatattttaaatgaataatcacagaagtaagtttaataatttgtcctatttttctctgtcacttcctttttctctaaggcaggaaaggaaagacattaaaccattaattaagtcaatcctcttggagactcaaaagactatgaagtgatcactctatataaaatataaatacagtgtgggttcaaatggccattttttgtgtgtccctctctctcatcttatgcttcccttcctttttttatttttattttttggagacggagtcttgctgtgtcgcccaggttggagtgcagtggcgtgatcttagctcactgcaagctctgccttccaggttcacgccattcttctgcctcagccccctgagtagctgggactacaggcgcccgccaccacgcccggctaattttttttttttttttttgtatttttagtagaggcagtgtttcaccgtgttagccaggatggtctcgatctcctgacctcgtgatccacccacctcgacctcccaaagtgctgggattacaggcgtgagccaccacgcccggcctcttttttttttagctgccaatctttttgaaggaatattcttacctctactttgtcaccttctactggctccttaactaaaatctgccatttggctctctggttaacagtcccttcctgtaaagtctaaaatcttaattctaaatccacagtttaattcacaagctagtacttgactttttttctgtatttgacatttttgacaacccctactttaaagatttattcccttgacttcttacattttgctcactcctgaaccaccccccaccttttggcctcttcatttattccttaaatgttattcctcagacctccattttttttttctctcttaatcacaacaccacttctcacgcttgggtaattttaattcagcagttcctaaatccttatctttagccagactcctcaatccatctgcctgttgcacttttcttggttgtcccagagacacctgtgtgtgtcttaaaacattcattctctgcaaaacctactctaatgcctgtgtcccttactttggttaattttagaaccattatattctaagttttctaggctcattcctctcctccaccttcccctatcatttagtgtctaagttttactgattttatctccacctctctgatacatcactctttcatcttcattgctattattaataaatacctacagtactaacctgcctcctatacctagctggtctcctctctgttgctcaatgttaccacagcaggctttctagaagcactctgacagtgttactccctaatatccttcagtgacttcaggaactttcaggagaaagccaaactcctctgtttggtgtacaaggtcttctgatgtgtttcctccaccgaatgttctggtgaaacagacttacacttcttcagaagccacatttggccaggcctcccgccttggtaaatgctgtactctttgcatcaagtgtgctagtcatccttccccacttggaaaattcctatgcatcttgcaggcctgacataagcatttcctctgtgaaacctcctttgctccactcaaggagagtcatctaacttccactttcgtgtcaccactgtaattacaacctacctctattgtatgtcacttaaatcgtactgtattgttttatttttcaaaagtctttactagaatgtgagctccttaagggcaggaaaaggaacctttttattttttgcatctccatagcatagtttttggcatatgaatgtttaataaatgtttgttgaataaattgattttaaagtgacatctttattatattagaggtcctacctatattccaaatactttcactcccttcactttacagcaagggtcagtagagtcccaaggatttgtagactttagggggtcaataaagctgaaattgtattca

SEQ ID NO: 311373 - DNA, 5379 bp, Homo sapiens
gccccccaaccccgcaggaaaacacaggcccctccggctttcgctctcgctctgggaactggaaggacccccgactcccgcgcagggtctggggttgtgcgcgtcgggttgcgtctccaggccgggggcgtcagggagccgggggcggggacgggcgcgggcgcagcggaccgggcggggccgagccgggaagctggtcggtgcgtcagcctcacgcggcgggaaggaaccggtccgaggccccgggctgccggcgcgggcgccgcggcacgtccacaggctgggtcgcgaggtggcgatcgctgagaggcaggagggccgaggcgggcctgggaggcggcccggaggtggggcgccgctggggccggcccgcacgggcttcatctgagggcgcacggcccgcgaccgagcgtgcggactggcctcccaagcgtggggcgacaagctgccggagctgcaatgggccgcggctggggattcttgtttggcctcctgggcgccgtgtggctgctcagctcgggccacggagaggagcagcccccggagacagcggcacagaggtgcttctgccaggttagtggttacttggatgattgtacctgtgatgttgaaaccattgatagatttaataactacaggcttttcccaagactacaaaaacttcttgaaagtgactactttaggtattacaaggtaaacctgaagaggccgtgtcctttctggaatgacatcagccagtgtggaagaagggactgtgctgtcaaaccatgtcaatctgatgaagttcctgatggaattaaatctgcgagctacaagtattctgaagaagccaataatctcattgaagaatgtgaacaagctgaacgacttggagcagtggatgaatctctgagtgaggaaacacagaaggctgttcttcagtggaccaagcatgatgattcttcagataacttctgtgaagctgatgacattcagtcccctgaagctgaatatgtagatttgcttcttaatcctgagcgctacactggttacaagggaccagatgcttggaaaatatggaatgtcatctacgaagaaaactgttttaagccacagacaattaaaagacctttaaatcctttggcttctggtcaagggacaagtgaagagaacactttttacagttggctagaaggtctctgtgtagaaaaaagagcattctacagacttatatctggcctacatgcaagcattaatgtgcatttgagtgcaagatatcttttacaagagacctggttagaaaagaaatggggacacaacattacagaatttcaacagcgatttgatggaattttgactgaaggagaaggtccaagaaggcttaagaacttgtattttctctacttaatagaactaagggctttatccaaagtgttaccattcttcgagcgcccagattttcaactctttactggaaataaaattcaggatgaggaaaacaaaatgttacttctggaaatacttcatgaaatcaagtcatttcctttgcattttgatgagaattcattttttgctggggataaaaaagaagcacacaaactaaaggaggactttcgactgcattttagaaatatttcaagaattatggattgtgttggttgttttaaatgtcgtctgtggggaaagcttcagactcagggtttgggcactgctctgaagatcttattttctgagaaattgatagcaaatatgccagaaagtggacctagttatgaattccatctaaccagacaagaaatagtatcattattcaacgcatttggaagaatttctacaagtgtgaaagaattagaaaacttcaggaacttgttacagaatattcattaaagaaaacaagctgatatgtgcctgtttctggacaatggaggcgaaagagtggaatttcattcaaaggcataatagcaatgacagtcttaagccaaacattttatataaagttgcttttgtaaaggagaattatattgttttaagtaaacacatttttaaaaattgtgttaagtctatgtataatactactgtgagtaaaagtaatactttaataatgtggtacaaattttaaagtttaatattgaataaaaggaggattatcaaattcatatatgataaaagtgaatgttctaagtctctcaaactagcgttttatgtaataatatgtaatataaataaaactatggtaaatgtgacaagcatttaataggaaaatgctaaggaggcctcataaatgacccataattaccaacgtagaatttttcagtacatttagggttgctggatttagcaaataaaaataaagattgcccagttagatttgaatttcagataaacaattagttttttaatattttacatggaatatttggaaaatacttatactaaaaaattatttgtttgaaattcacatttaactgggagtcttgtattttatctggcaatcctaaaatacattggtatgaaacaaatcacttttagaagtatattgctattttgattgggttgtttttgtgtgtagaaacgtacaataacaactcaaaggcacaggagatttctaaacattgtgaaaagttgaatagattatatatttattctcataatactttcactaatactaaataaaatttggggaacactttttatttttatataatttccaatttacagaaaagtttcaaaaatagtacaaagagctctcttacccagattcactaattgttcatacgtgctttatctttcatgctttctctgtacacacacacacacacacaaatttttcctcaatcatttgaaagtcagttataggcatcatgccccttaaaccctaaatacttcagtgtgtaatactgaataattactaaaaatgattttctcagaaaaaaaaactcccacaattctggaactataatactgtaagccttagaataaataatactttcaagttccaatctaaagttctttttgagttttgttgcccgttttatgcttgatgtgtatagtaatagggtaggctatttattttattaaaattttttttagagacaaggttttgctgtgttgcccaagctggaacttgaacgactgggctgaagtgatcttcccacctcagcctcccaagtagctgggaatacaggtgtctgccaccatacccagtttcatttttgttttttatacccgaagttcatttcctttgtctccctaaaactgaactgtaattttgggaggttttcattagtggaagctcttcatttataaagctatttgaaggggtttaggaatttatatcacatggtaattgtagagaaaaagaagctatatacctcaaaatcgtgccctctttacatatgtcttatcaggtataacatgttgaaatgtcacattagtagtaaagtggggtttatttatatagtggttaagaaatgtcagtttacactgctgtatacttcttcttctgtgtccctaaggcctggtacagtgccaagcacatacttggtatccaataaatatttgttggatgaatgtatgcatatgtattcagtatattttaaatgaataatcacagaagtaagtttaataatttgtcctatttttctctgtcacttcctttttctctaaggcaggaaaggaaagacattaaaccattaattaagtcaatcctcttggagactcaaaagactatgaagtgatcactctatataaaatataaatacagtgtgggttcaaatggccattttttgtgtgtccctctctctcatcttatgcttcccttcctttttttatttttattttttggagacggagtcttgctgtgtcgcccaggttggagtgcagtggcgtgatcttagctcactgcaagctctgccttccaggttcacgccattcttctgcctcagccccctgagtagctgggactacaggcgcccgccaccacgcccggctaattttttttttttttttttgtatttttagtagaggcagtgtttcaccgtgttagccaggatggtctcgatctcctgacctcgtgatccacccacctcgacctcccaaagtgctgggattacaggcgtgagccaccacgcccggcctcttttttttttagctgccaatctttttgaaggaatattcttacctctactttgtcaccttctactggctccttaactaaaatctgccatttggctctctggttaacagtcccttcctgtaaagtctaaaatcttaattctaaatccacagtttaattcacaagctagtacttgactttttttctgtatttgacatttttgacaacccctactttaaagatttattcccttgacttcttacattttgctcactcctgaaccaccccccaccttttggcctcttcatttattccttaaatgttattcctcagacctccattttttttttctctcttaatcacaacaccacttctcacgcttgggtaattttaattcagcagttcctaaatccttatctttagccagactcctcaatccatctgcctgttgcacttttcttggttgtcccagagacacctgtgtgtgtcttaaaacattcattctctgcaaaacctactctaatgcctgtgtcccttactttggttaattttagaaccattatattctaagttttctaggctcattcctctcctccaccttcccctatcatttagtgtctaagttttactgattttatctccacctctctgatacatcactctttcatcttcattgctattattaataaatacctacagtactaacctgcctcctatacctagctggtctcctctctgttgctcaatgttaccacagcaggctttctagaagcactctgacagtgttactccctaatatccttcagtgacttcaggaactttcaggagaaagccaaactcctctgtttggtgtacaaggtcttctgatgtgtttcctccaccgaatgttctggtgaaacagacttacacttcttcagaagccacatttggccaggcctcccgccttggtaaatgctgtactctttgcatcaagtgtgctagtcatccttccccacttggaaaattcctatgcatcttgcaggcctgacataagcatttcctctgtgaaacctcctttgctccactcaaggagagtcatctaacttccactttcgtgtcaccactgtaattacaacctacctctattgtatgtcacttaaatcgtactgtattgttttatttttcaaaagtctttactagaatgtgagctccttaagggcaggaaaaggaacctttttattttttgcatctccatagcatagtttttggcatatgaatgtttaataaatgtttgttgaataaattga

SEQ ID NO: 311374 - DNA, 5325 bp, Homo sapiens
gccccccaaccccgcaggaaaacacaggcccctccggctttcgctctcgctctgggaactggaaggacccccgactcccgcgcagggtctggggttgtgcgcgtcgggttgcgtctccaggccgggggcgtcagggagccgggggcggggacgggcgcgggcgcagcggaccgggcggggccgagccgggaagctggtcggtgcgtcagcctcacgcggcgggaaggaaccggtccgaggccccgggctgccggcgcgggcgccgcggcacgtccacaggctgggtcgcgaggtggcgatcgctgagaggcaggagggccgaggcgggcctgggaggcggcccggaggtggggcgccgctggggccggcccgcacgggcttcatctgagggcgcacggcccgcgaccgagcgtgcggactggcctcccaagcgtggggcgacaagctgccggagctgcaatgggccgcggctggggattcttgtttggcctcctgggcgccgtgtggctgctcagctcgggccacggagaggagcagcccccggagacagcggcacagaggtgcttctgccaggttagtggttacttggatgattgtacctgtgatgttgaaaccattgatagatttaataactacaggcttttcccaagactacaaaaacttcttgaaagtgactactttaggtattacaaggtaaacctgaagaggccgtgtcctttctggaatgacatcagccagtgtggaagaagggactgtgctgtcaaaccatgtcaatctgatgaagttcctgatggaattaaatctgcgagctacaagtattctgaagaagccaataatctcattgaagaatgtgaacaagctgaacgacttggagcagtggatgaatctctgagtgaggaaacacagaaggctgttcttcagtggaccaagcatgatgattcttcagataacttctgtgaagctgatgacattcagtcccctgaagctgaatatgtagatttgcttcttaatcctgagcgctacactggttacaagggaccagatgcttggaaaatatggaatgtcatctacgaagaaaactgttttaagccacagacaattaaaagacctttaaatcctttggcttctggtcaagggacaagtgaagagaacactttttacagttggctagaaggtctctgtgtagaaaaaagagcattctacagacttatatctggcctacatgcaagcattaatgtgcatttgagtgcaagatatcttttacaagagacctggttagaaaagaaatggggacacaacattacagaatttcaacagcgatttgatggaattttgactgaaggagaaggtccaagaaggcttaagaacttgtattttctctacttaatagaactaagggctttatccaaagtgttaccattcttcgagcgcccagattttcaactctttactggaaataaaattcaggatgaggaaaacaaaatgttacttctggaaatacttcatgaaatcaagtcatttcctttgcattttgatgagaattcattttttgctggggataaaaaagaagcacacaaactaaaggaggactttcgactgcattttagaaatatttcaagaattatggattgtgttggttgttttaaatgtcgtctgtggggaaagcttcagactcagggtttgggcactgctctgaagatcttattttctgagaaattgatagcaaatatgccagaaagtggacctagttatgaattccatctaaccagacaagaaatagtatcattattcaacgcatttggaagaatttctacaagtgtgaaagaattagaaaacttcaggaacttgttacagaatattcattaaagaaaacaagctgatatgtgcctgtttctggacaatggaggcgaaagagtggaatttcattcaaaggcataatagcaatgacagtcttaagccaaacattttatataaagttgcttttgtaaaggagaattatattgttttaagtaaacacatttttaaaaattgtgttaagtctatgtataatactactgtgagtaaaagtaatactttaataatgtggtacaaattttaaagtttaatattgaataaaaggaggattatcaaattcatatatgataaaagtgaatgttctaagtctctcaaactagcgttttatgtaataatatgtaatataaataaaactatggtaaatgtgacaagcatttaataggaaaatgctaaggaggcctcataaatgacccataattaccaacgtagaatttttcagtacatttagggttgctggatttagcaaataaaaataaagattgcccagttagatttgaatttcagataaacaattagttttttaatattttacatggaatatttggaaaatacttatactaaaaaattatttgtttgaaattcacatttaactgggagtcttgtattttatctggcaatcctaaaatacattggtatgaaacaaatcacttttagaagtatattgctattttgattgggttgtttttgtgtgtagaaacgtacaataacaactcaaaggcacaggagatttctaaacattgtgaaaagttgaatagattatatatttattctcataatactttcactaatactaaataaaatttggggaacactttttatttttatataatttccaatttacagaaaagtttcaaaaatagtacaaagagctctcttacccagattcactaattgttcatacgtgctttatctttcatgctttctctgtacacacacacacacacacaaatttttcctcaatcatttgaaagtcagttataggcatcatgccccttaaaccctaaatacttcagtgtgtaatactgaataattactaaaaatgattttctcagaaaaaaaaactcccacaattctggaactataatactgtaagccttagaataaataatactttcaagttccaatctaaagttctttttgagttttgttgcccgttttatgcttgatgtgtatagtaatagggtaggctatttattttattaaaattttttttagagacaaggttttgctgtgttgcccaagctggaacttgaacgactgggctgaagtgatcttcccacctcagcctcccaagtagctgggaatacaggtgtctgccaccatacccagtttcatttttgttttttatacccgaagttcatttcctttgtctccctaaaactgaactgtaattttgggaggttttcattagtggaagctcttcatttataaagctatttgaaggggtttaggaatttatatcacatggtaattgtagagaaaaagaagctatatacctcaaaatcgtgccctctttacatatgtcttatcaggtataacatgttgaaatgtcacattagtagtaaagtggggtttatttatatagtggttaagaaatgtcagtttacactgctgtatacttcttcttctgtgtccctaaggcctggtacagtgccaagcacatacttggtatccaataaatatttgttggatgaatgtatgcatatgtattcagtatattttaaatgaataatcacagaagtaagtttaataatttgtcctatttttctctgtcacttcctttttctctaaggcaggaaaggaaagacattaaaccattaattaagtcaatcctcttggagactcaaaagactatgaagtgatcactctatataaaatataaatacagtgtgggttcaaatggccattttttgtgtgtccctctctctcatcttatgcttcccttcctttttttatttttattttttggagacggagtcttgctgtgtcgcccaggttggagtgcagtggcgtgatcttagctcactgcaagctctgccttccaggttcacgccattcttctgcctcagccccctgagtagctgggactacaggcgcccgccaccacgcccggctaattttttttttttttttttgtatttttagtagaggcagtgtttcaccgtgttagccaggatggtctcgatctcctgacctcgtgatccacccacctcgacctcccaaagtgctgggattacaggcgtgagccaccacgcccggcctcttttttttttagctgccaatctttttgaaggaatattcttacctctactttgtcaccttctactggctccttaactaaaatctgccatttggctctctggttaacagtcccttcctgtaaagtttttctgtatttgacatttttgacaacccctactttaaagatttattcccttgacttcttacattttgctcactcctgaaccaccccccaccttttggcctcttcatttattccttaaatgttattcctcagacctccattttttttttctctcttaatcacaacaccacttctcacgcttgggtaattttaattcagcagttcctaaatccttatctttagccagactcctcaatccatctgcctgttgcacttttcttggttgtcccagagacacctgtgtgtgtcttaaaacattcattctctgcaaaacctactctaatgcctgtgtcccttactttggttaattttagaaccattatattctaagttttctaggctcattcctctcctccaccttcccctatcatttagtgtctaagttttactgattttatctccacctctctgatacatcactctttcatcttcattgctattattaataaatacctacagtactaacctgcctcctatacctagctggtctcctctctgttgctcaatgttaccacagcaggctttctagaagcactctgacagtgttactccctaatatccttcagtgacttcaggaactttcaggagaaagccaaactcctctgtttggtgtacaaggtcttctgatgtgtttcctccaccgaatgttctggtgaaacagacttacacttcttcagaagccacatttggccaggcctcccgccttggtaaatgctgtactctttgcatcaagtgtgctagtcatccttccccacttggaaaattcctatgcatcttgcaggcctgacataagcatttcctctgtgaaacctcctttgctccactcaaggagagtcatctaacttccactttcgtgtcaccactgtaattacaacctacctctattgtatgtcacttaaatcgtactgtattgttttatttttcaaaagtctttactagaatgtgagctccttaagggcaggaaaaggaacctttttattttttgcatctccatagcatagtttttggcatatgaatgtttaataaatgtttgttgaataaattga

SEQ ID NO: 311375 - DNA, 5232 bp, Homo sapiens
gccccccaaccccgcaggaaaacacaggcccctccggctttcgctctcgctctgggaactggaaggacccccgactcccgcgcagggtctggggttgtgcgcgtcgggttgcgtctccaggccgggggcgtcagggagccgggggcggggacgggcgcgggcgcagcggaccgggcggggccgagccgggaagctggtcggtgcgtcagcctcacgcggcgggaaggaaccggtccgaggccccgggctgccggcgcgggcgccgcggcacgtccacaggctgggtcgcgaggtggcgatcgctgagaggcaggagggccgaggcgggcctgggaggcggcccggaggtggggcgccgctggggccggcccgcacgggcttcatctgagggcgcacggcccgcgaccgagcgtgcggactggcctcccaagcgtggggcgacaagctgccggagctgcaatgggccgcggctggggattcttgtttggcctcctgggcgccgtgtggctgctcagctcgggccacggagaggagcagcccccggagacagcggcacagaggtgcttctgccaggttagtggttacttggatgattgtacctgtgatgttgaaaccattgatagatttaataactacaggcttttcccaagactacaaaaacttcttgaaagtgactactttaggtattacaaggtaaacctgaagaggccgtgtcctttctggaatgacatcagccagtgtggaagaagggactgtgctgtcaaaccatgtcaatctgatgaagttcctgatggaattaaatctgcgagctacaagtattctgaagaagccaataatctcattgaagaatgtgaacaagctgaacgacttggagcagtggatgaatctctgagtgaggaaacacagaaggctgttcttcagtggaccaagcatgatgattcttcagataacttctgtgaagctgatgacattcagtcccctgaagctgaatatgtagatttgcttcttaatcctgagcgctacactggttacaagggaccagatgcttggaaaatatggaatgtcatctacgaagaaaactgttttaagccacagacaattaaaagacctttaaatcctttggcttctggtcaagggacaagtgaagagaacactttttacagttggctagaaggtctctgtgtagaaaaaagagcattctacagacttatatctggcctacatgcaagcattaatgtgcatttgagtgcaagatatcttttacaagagacctggttagaaaagaaatggggacacaacattacagaatttcaacagcgatttgatggaattttgactgaaggagaaggtccaagaaggcttaagaacttgtattttctctacttaatagaactaagggctttatccaaagtgttaccattcttcgagcgcccagattttcaactctttactggaaataaaattcaggatgaggaaaacaaaatgttacttctggaaatacttcatgaaatcaagtcatttcctttgcattttgatgagaattcattttttgctggggataaaaaagaagcacacaaactaaaggaggactttcgactgcattttagaaatatttcaagaattatggattgtgttggttgttttaaatgtcgtctgtggggaaagcttcagactcagggtttgggcactgctctgaagatcttattttctgagaaattgatagcaaatatgccagaaagtggacctagttatgaattccatctaaccagacaagaaatagtatcattattcaacgcatttggaagaatttctacaagtgtgaaagaattagaaaacttcaggaacttgttacagaatattcattaaagaaaacaagctgatatgtgcctgtttctggacaatggaggcgaaagagtggaatttcattcaaaggcataatagcaatgacagtcttaagccaaacattttatataaagttgcttttgtaaaggagaattatattgttttaagtaaacacatttttaaaaattgtgttaagtctatgtataatactactgtgagtaaaagtaatactttaataatgtggtacaaattttaaagtttaatattgaataaaaggaggattatcaaattcatatatgataaaagtgaatgttctaagtctctcaaactagcgttttatgtaataatatgtaatataaataaaactatggtaaatgtgacaagcatttaataggaaaatgctaaggaggcctcataaatgacccataattaccaacgtagaatttttcagtacatttagggttgctggatttagcaaataaaaataaagattgcccagttagatttgaatttcagataaacaattagttttttaatattttacatggaatatttggaaaatacttatactaaaaaattatttgtttgaaattcacatttaactgggagtcttgtattttatctggcaatcctaaaatacattggtatgaaacaaatcacttttagaagtatattgctattttgattgggttgtttttgtgtgtagaaacgtacaataacaactcaaaggcacaggagatttctaaacattgtgaaaagttgaatagattatatatttattctcataatactttcactaatactaaataaaatttggggaacactttttatttttatataatttccaatttacagaaaagtttcaaaaatagtacaaagagctctcttacccagattcactaattgttcatacgtgctttatctttcatgctttctctgtacacacacacacacacacaaatttttcctcaatcatttgaaagtcagttataggcatcatgccccttaaaccctaaatacttcagtgtgtaatactgaataattactaaaaatgattttctcagaaaaaaaaactcccacaattctggaactataatactgtaagccttagaataaataatactttcaagttccaatctaaagttctttttgagttttgttgcccgttttatgcttgatgtgtatagtaatagggtaggctatttattttattaaaattttttttagagacaaggttttgctgtgttgcccaagctggaacttgaacgactgggctgaagtgatcttcccacctcagcctcccaagtagctgggaatacaggtgtctgccaccatacccagtttcatttttgttttttatacccgaagttcatttcctttgtctccctaaaactgaactgtaattttgggaggttttcattagtggaagctcttcatttataaagctatttgaaggggtttaggaatttatatcacatggtaattgtagagaaaaagaagctatatacctcaaaatcgtgccctctttacatatgtcttatcaggtataacatgttgaaatgtcacattagtagtaaagtggggtttatttatatagtggttaagaaatgtcagtttacactgctgtatacttcttcttctgtgtccctaaggcctggtacagtgccaagcacatacttggtatccaataaatatttgttggatgaatgtatgcatatgtattcagtatattttaaatgaataatcacagaagtaagtttaataatttgtcctatttttctctgtcacttcctttttctctaaggcaggaaaggaaagacattaaaccattaattaagtcaatcctcttggagactcaaaagactatgaagtgatcactctatataaaatataaatacagtgtgggttcaaatggccattttttgtgtgtccctctctctcatcttatgcttcccttcctttttttatttttattttttggagacggagtcttgctgtgtcgcccaggttggagtgcagtggcgtgatcttagctcactgcaagctctgccttccaggttcacgccattcttctgcctcagccccctgagtagctgggactacaggcgcccgccacacgcccggcctcttttttttttagctgccaatctttttgaaggaatattcttacctctactttgtcaccttctactggctccttaactaaaatctgccatttggctctctggttaacagtcccttcctgtaaagtctaaaatcttaattctaaatccacagtttaattcacaagctagtacttgactttttttctgtatttgacatttttgacaacccctactttaaagatttattcccttgacttcttacattttgctcactcctgaaccaccccccaccttttggcctcttcatttattccttaaatgttattcctcagacctccattttttttttctctcttaatcacaacaccacttctcacgcttgggtaattttaattcagcagttcctaaatccttatctttagccagactcctcaatccatctgcctgttgcacttttcttggttgtcccagagacacctgtgtgtgtcttaaaacattcattctctgcaaaacctactctaatgcctgtgtcccttactttggttaattttagaaccattatattctaagttttctaggctcattcctctcctccaccttcccctatcatttagtgtctaagttttactgattttatctccacctctctgatacatcactctttcatcttcattgctattattaataaatacctacagtactaacctgcctcctatacctagctggtctcctctctgttgctcaatgttaccacagcaggctttctagaagcactctgacagtgttactccctaatatccttcagtgacttcaggaactttcaggagaaagccaaactcctctgtttggtgtacaaggtcttctgatgtgtttcctccaccgaatgttctggtgaaacagacttacacttcttcagaagccacatttggccaggcctcccgccttggtaaatgctgtactctttgcatcaagtgtgctagtcatccttccccacttggaaaattcctatgcatcttgcaggcctgacataagcatttcctctgtgaaacctcctttgctccactcaaggagagtcatctaacttccactttcgtgtcaccactgtaattacaacctacctctattgtatgtcacttaaatcgtactgtattgttttatttttcaaaagtctttactagaatgtgagctccttaagggcaggaaaaggaacctttttattttttgcatctccatagcatagtttttggcatatgaatgtttaataaatgtttgttgaataaattga

SEQ ID NO: 311376 - DNA, 4530 bp, Homo sapiens
cttcctttcgagaaattgcaattaagacttggaccgttaggttaaataatctttacattgttgtttggcacaaatttgctataatgctttaaaacttttgaaaaacttgtattttggcatttttctattcttatgacttatttttcttttgatttcagagaacactttttacagttggctagaaggtctctgtgtagaaaaaagagcattctacagacttatatctggcctacatgcaagcattaatgtgcatttgagtgcaagatatcttttacaagagacctggttagaaaagaaatggggacacaacattacagaatttcaacagcgatttgatggaattttgactgaaggagaaggtccaagaaggcttaagaacttgtattttctctacttaatagaactaagggctttatccaaagtgttaccattcttcgagcgcccagattttcaactctttactggaaataaaattcaggatgaggaaaacaaaatgttacttctggaaatacttcatgaaatcaagtcatttcctttgcattttgatgagaattcattttttgctggggataaaaaagaagcacacaaactaaaggaggactttcgactgcattttagaaatatttcaagaattatggattgtgttggttgttttaaatgtcgtctgtggggaaagcttcagactcagggtttgggcactgctctgaagatcttattttctgagaaattgatagcaaatatgccagaaagtggacctagttatgaattccatctaaccagacaagaaatagtatcattattcaacgcatttggaagaatttctacaagtgtgaaagaattagaaaacttcaggaacttgttacagaatattcattaaagaaaacaagctgatatgtgcctgtttctggacaatggaggcgaaagagtggaatttcattcaaaggcataatagcaatgacagtcttaagccaaacattttatataaagttgcttttgtaaaggagaattatattgttttaagtaaacacatttttaaaaattgtgttaagtctatgtataatactactgtgagtaaaagtaatactttaataatgtggtacaaattttaaagtttaatattgaataaaaggaggattatcaaattcatatatgataaaagtgaatgttctaagtctctcaaactagcgttttatgtaataatatgtaatataaataaaactatggtaaatgtgacaagcatttaataggaaaatgctaaggaggcctcataaatgacccataattaccaacgtagaatttttcagtacatttagggttgctggatttagcaaataaaaataaagattgcccagttagatttgaatttcagataaacaattagttttttaatattttacatggaatatttggaaaatacttatactaaaaaattatttgtttgaaattcacatttaactgggagtcttgtattttatctggcaatcctaaaatacattggtatgaaacaaatcacttttagaagtatattgctattttgattgggttgtttttgtgtgtagaaacgtacaataacaactcaaaggcacaggagatttctaaacattgtgaaaagttgaatagattatatatttattctcataatactttcactaatactaaataaaatttggggaacactttttatttttatataatttccaatttacagaaaagtttcaaaaatagtacaaagagctctcttacccagattcactaattgttcatacgtgctttatctttcatgctttctctgtacacacacacacacacacaaatttttcctcaatcatttgaaagtcagttataggcatcatgccccttaaaccctaaatacttcagtgtgtaatactgaataattactaaaaatgattttctcagaaaaaaaaactcccacaattctggaactataatactgtaagccttagaataaataatactttcaagttccaatctaaagttctttttgagttttgttgcccgttttatgcttgatgtgtatagtaatagggtaggctatttattttattaaaattttttttagagacaaggttttgctgtgttgcccaagctggaacttgaacgactgggctgaagtgatcttcccacctcagcctcccaagtagctgggaatacaggtgtctgccaccatacccagtttcatttttgttttttatacccgaagttcatttcctttgtctccctaaaactgaactgtaattttgggaggttttcattagtggaagctcttcatttataaagctatttgaaggggtttaggaatttatatcacatggtaattgtagagaaaaagaagctatatacctcaaaatcgtgccctctttacatatgtcttatcaggtataacatgttgaaatgtcacattagtagtaaagtggggtttatttatatagtggttaagaaatgtcagtttacactgctgtatacttcttcttctgtgtccctaaggcctggtacagtgccaagcacatacttggtatccaataaatatttgttggatgaatgtatgcatatgtattcagtatattttaaatgaataatcacagaagtaagtttaataatttgtcctatttttctctgtcacttcctttttctctaaggcaggaaaggaaagacattaaaccattaattaagtcaatcctcttggagactcaaaagactatgaagtgatcactctatataaaatataaatacagtgtgggttcaaatggccattttttgtgtgtccctctctctcatcttatgcttcccttcctttttttatttttattttttggagacggagtcttgctgtgtcgcccaggttggagtgcagtggcgtgatcttagctcactgcaagctctgccttccaggttcacgccattcttctgcctcagccccctgagtagctgggactacaggcgcccgccaccacgcccggctaattttttttttttttttttgtatttttagtagaggcagtgtttcaccgtgttagccaggatggtctcgatctcctgacctcgtgatccacccacctcgacctcccaaagtgctgggattacaggcgtgagccaccacgcccggcctcttttttttttagctgccaatctttttgaaggaatattcttacctctactttgtcaccttctactggctccttaactaaaatctgccatttggctctctggttaacagtcccttcctgtaaagtctaaaatcttaattctaaatccacagtttaattcacaagctagtacttgactttttttctgtatttgacatttttgacaacccctactttaaagatttattcccttgacttcttacattttgctcactcctgaaccaccccccaccttttggcctcttcatttattccttaaatgttattcctcagacctccattttttttttctctcttaatcacaacaccacttctcacgcttgggtaattttaattcagcagttcctaaatccttatctttagccagactcctcaatccatctgcctgttgcacttttcttggttgtcccagagacacctgtgtgtgtcttaaaacattcattctctgcaaaacctactctaatgcctgtgtcccttactttggttaattttagaaccattatattctaagttttctaggctcattcctctcctccaccttcccctatcatttagtgtctaagttttactgattttatctccacctctctgatacatcactctttcatcttcattgctattattaataaatacctacagtactaacctgcctcctatacctagctggtctcctctctgttgctcaatgttaccacagcaggctttctagaagcactctgacagtgttactccctaatatccttcagtgacttcaggaactttcaggagaaagccaaactcctctgtttggtgtacaaggtcttctgatgtgtttcctccaccgaatgttctggtgaaacagacttacacttcttcagaagccacatttggccaggcctcccgccttggtaaatgctgtactctttgcatcaagtgtgctagtcatccttccccacttggaaaattcctatgcatcttgcaggcctgacataagcatttcctctgtgaaacctcctttgctccactcaaggagagtcatctaacttccactttcgtgtcaccactgtaattacaacctacctctattgtatgtcacttaaatcgtactgtattgttttatttttcaaaagtctttactagaatgtgagctccttaagggcaggaaaaggaacctttttattttttgcatctccatagcatagtttttggcatatgaatgtttaataaatgtttgttgaataaattgattttaaagtgacatctttattatattagaggtcctacctatattccaaatactttcactcccttcactttacagcaagggtcagtagagtcccaaggatttgtagactttagggggtcaataaagctgaaattgtattca

SEQ ID NO: 311377 - DNA, 4446 bp, Homo sapiens
ggtctcgatctcctgacctcatgatccacccgcctcggcctccgaaagtgctgggatttcaggtgtgagccaagagaacactttttacagttggctagaaggtctctgtgtagaaaaaagagcattctacagacttatatctggcctacatgcaagcattaatgtgcatttgagtgcaagatatcttttacaagagacctggttagaaaagaaatggggacacaacattacagaatttcaacagcgatttgatggaattttgactgaaggagaaggtccaagaaggcttaagaacttgtattttctctacttaatagaactaagggctttatccaaagtgttaccattcttcgagcgcccagattttcaactctttactggaaataaaattcaggatgaggaaaacaaaatgttacttctggaaatacttcatgaaatcaagtcatttcctttgcattttgatgagaattcattttttgctggggataaaaaagaagcacacaaactaaaggaggactttcgactgcattttagaaatatttcaagaattatggattgtgttggttgttttaaatgtcgtctgtggggaaagcttcagactcagggtttgggcactgctctgaagatcttattttctgagaaattgatagcaaatatgccagaaagtggacctagttatgaattccatctaaccagacaagaaatagtatcattattcaacgcatttggaagaatttctacaagtgtgaaagaattagaaaacttcaggaacttgttacagaatattcattaaagaaaacaagctgatatgtgcctgtttctggacaatggaggcgaaagagtggaatttcattcaaaggcataatagcaatgacagtcttaagccaaacattttatataaagttgcttttgtaaaggagaattatattgttttaagtaaacacatttttaaaaattgtgttaagtctatgtataatactactgtgagtaaaagtaatactttaataatgtggtacaaattttaaagtttaatattgaataaaaggaggattatcaaattcatatatgataaaagtgaatgttctaagtctctcaaactagcgttttatgtaataatatgtaatataaataaaactatggtaaatgtgacaagcatttaataggaaaatgctaaggaggcctcataaatgacccataattaccaacgtagaatttttcagtacatttagggttgctggatttagcaaataaaaataaagattgcccagttagatttgaatttcagataaacaattagttttttaatattttacatggaatatttggaaaatacttatactaaaaaattatttgtttgaaattcacatttaactgggagtcttgtattttatctggcaatcctaaaatacattggtatgaaacaaatcacttttagaagtatattgctattttgattgggttgtttttgtgtgtagaaacgtacaataacaactcaaaggcacaggagatttctaaacattgtgaaaagttgaatagattatatatttattctcataatactttcactaatactaaataaaatttggggaacactttttatttttatataatttccaatttacagaaaagtttcaaaaatagtacaaagagctctcttacccagattcactaattgttcatacgtgctttatctttcatgctttctctgtacacacacacacacacacaaatttttcctcaatcatttgaaagtcagttataggcatcatgccccttaaaccctaaatacttcagtgtgtaatactgaataattactaaaaatgattttctcagaaaaaaaaactcccacaattctggaactataatactgtaagccttagaataaataatactttcaagttccaatctaaagttctttttgagttttgttgcccgttttatgcttgatgtgtatagtaatagggtaggctatttattttattaaaattttttttagagacaaggttttgctgtgttgcccaagctggaacttgaacgactgggctgaagtgatcttcccacctcagcctcccaagtagctgggaatacaggtgtctgccaccatacccagtttcatttttgttttttatacccgaagttcatttcctttgtctccctaaaactgaactgtaattttgggaggttttcattagtggaagctcttcatttataaagctatttgaaggggtttaggaatttatatcacatggtaattgtagagaaaaagaagctatatacctcaaaatcgtgccctctttacatatgtcttatcaggtataacatgttgaaatgtcacattagtagtaaagtggggtttatttatatagtggttaagaaatgtcagtttacactgctgtatacttcttcttctgtgtccctaaggcctggtacagtgccaagcacatacttggtatccaataaatatttgttggatgaatgtatgcatatgtattcagtatattttaaatgaataatcacagaagtaagtttaataatttgtcctatttttctctgtcacttcctttttctctaaggcaggaaaggaaagacattaaaccattaattaagtcaatcctcttggagactcaaaagactatgaagtgatcactctatataaaatataaatacagtgtgggttcaaatggccattttttgtgtgtccctctctctcatcttatgcttcccttcctttttttatttttattttttggagacggagtcttgctgtgtcgcccaggttggagtgcagtggcgtgatcttagctcactgcaagctctgccttccaggttcacgccattcttctgcctcagccccctgagtagctgggactacaggcgcccgccaccacgcccggctaattttttttttttttttttgtatttttagtagaggcagtgtttcaccgtgttagccaggatggtctcgatctcctgacctcgtgatccacccacctcgacctcccaaagtgctgggattacaggcgtgagccaccacgcccggcctcttttttttttagctgccaatctttttgaaggaatattcttacctctactttgtcaccttctactggctccttaactaaaatctgccatttggctctctggttaacagtcccttcctgtaaagtctaaaatcttaattctaaatccacagtttaattcacaagctagtacttgactttttttctgtatttgacatttttgacaacccctactttaaagatttattcccttgacttcttacattttgctcactcctgaaccaccccccaccttttggcctcttcatttattccttaaatgttattcctcagacctccattttttttttctctcttaatcacaacaccacttctcacgcttgggtaattttaattcagcagttcctaaatccttatctttagccagactcctcaatccatctgcctgttgcacttttcttggttgtcccagagacacctgtgtgtgtcttaaaacattcattctctgcaaaacctactctaatgcctgtgtcccttactttggttaattttagaaccattatattctaagttttctaggctcattcctctcctccaccttcccctatcatttagtgtctaagttttactgattttatctccacctctctgatacatcactctttcatcttcattgctattattaataaatacctacagtactaacctgcctcctatacctagctggtctcctctctgttgctcaatgttaccacagcaggctttctagaagcactctgacagtgttactccctaatatccttcagtgacttcaggaactttcaggagaaagccaaactcctctgtttggtgtacaaggtcttctgatgtgtttcctccaccgaatgttctggtgaaacagacttacacttcttcagaagccacatttggccaggcctcccgccttggtaaatgctgtactctttgcatcaagtgtgctagtcatccttccccacttggaaaattcctatgcatcttgcaggcctgacataagcatttcctctgtgaaacctcctttgctccactcaaggagagtcatctaacttccactttcgtgtcaccactgtaattacaacctacctctattgtatgtcacttaaatcgtactgtattgttttatttttcaaaagtctttactagaatgtgagctccttaagggcaggaaaaggaacctttttattttttgcatctccatagcatagtttttggcatatgaatgtttaataaatgtttgttgaataaattgattttaaagtgacatctttattatattagaggtcctacctatattccaaatactttcactcccttcactttacagcaagggtcagtagagtcccaaggatttgtagactttagggggtcaataaagctgaaattgtattca

SEQ ID NO: 311378 - DNA, 4578 bp, Homo sapiens
aagtgaactctcagtcaaaattgcaaaggaaatgacttgatttcatgaagtatttccagaagtaacattattgtatattcctacatcctgaatatatatttccagtaaagagttgaaaatctgggcgctcgaagaaaactgttttaagccacagacaattaaaagacctttaaatcctttggcttctggtcaagggacaagtgaagagaacactttttacagttggctagaaggtctctgtgtagaaaaaagagcattctacagacttatatctggcctacatgcaagcattaatgtgcatttgagtgcaagatatcttttacaagagacctggttagaaaagaaatggggacacaacattacagaatttcaacagcgatttgatggaattttgactgaaggagaaggtccaagaaggcttaagaacttgtattttctctacttaatagaactaagggctttatccaaagtgttaccattcttcgagcgcccagattttcaactctttactggaaataaaattcaggatgaggaaaacaaaatgttacttctggaaatacttcatgaaatcaagtcatttcctttgcattttgatgagaattcattttttgctggggataaaaaagaagcacacaaactaaaggaggactttcgactgcattttagaaatatttcaagaattatggattgtgttggttgttttaaatgtcgtctgtggggaaagcttcagactcagggtttgggcactgctctgaagatcttattttctgagaaattgatagcaaatatgccagaaagtggacctagttatgaattccatctaaccagacaagaaatagtatcattattcaacgcatttggaagaatttctacaagtgtgaaagaattagaaaacttcaggaacttgttacagaatattcattaaagaaaacaagctgatatgtgcctgtttctggacaatggaggcgaaagagtggaatttcattcaaaggcataatagcaatgacagtcttaagccaaacattttatataaagttgcttttgtaaaggagaattatattgttttaagtaaacacatttttaaaaattgtgttaagtctatgtataatactactgtgagtaaaagtaatactttaataatgtggtacaaattttaaagtttaatattgaataaaaggaggattatcaaattcatatatgataaaagtgaatgttctaagtctctcaaactagcgttttatgtaataatatgtaatataaataaaactatggtaaatgtgacaagcatttaataggaaaatgctaaggaggcctcataaatgacccataattaccaacgtagaatttttcagtacatttagggttgctggatttagcaaataaaaataaagattgcccagttagatttgaatttcagataaacaattagttttttaatattttacatggaatatttggaaaatacttatactaaaaaattatttgtttgaaattcacatttaactgggagtcttgtattttatctggcaatcctaaaatacattggtatgaaacaaatcacttttagaagtatattgctattttgattgggttgtttttgtgtgtagaaacgtacaataacaactcaaaggcacaggagatttctaaacattgtgaaaagttgaatagattatatatttattctcataatactttcactaatactaaataaaatttggggaacactttttatttttatataatttccaatttacagaaaagtttcaaaaatagtacaaagagctctcttacccagattcactaattgttcatacgtgctttatctttcatgctttctctgtacacacacacacacacacaaatttttcctcaatcatttgaaagtcagttataggcatcatgccccttaaaccctaaatacttcagtgtgtaatactgaataattactaaaaatgattttctcagaaaaaaaaactcccacaattctggaactataatactgtaagccttagaataaataatactttcaagttccaatctaaagttctttttgagttttgttgcccgttttatgcttgatgtgtatagtaatagggtaggctatttattttattaaaattttttttagagacaaggttttgctgtgttgcccaagctggaacttgaacgactgggctgaagtgatcttcccacctcagcctcccaagtagctgggaatacaggtgtctgccaccatacccagtttcatttttgttttttatacccgaagttcatttcctttgtctccctaaaactgaactgtaattttgggaggttttcattagtggaagctcttcatttataaagctatttgaaggggtttaggaatttatatcacatggtaattgtagagaaaaagaagctatatacctcaaaatcgtgccctctttacatatgtcttatcaggtataacatgttgaaatgtcacattagtagtaaagtggggtttatttatatagtggttaagaaatgtcagtttacactgctgtatacttcttcttctgtgtccctaaggcctggtacagtgccaagcacatacttggtatccaataaatatttgttggatgaatgtatgcatatgtattcagtatattttaaatgaataatcacagaagtaagtttaataatttgtcctatttttctctgtcacttcctttttctctaaggcaggaaaggaaagacattaaaccattaattaagtcaatcctcttggagactcaaaagactatgaagtgatcactctatataaaatataaatacagtgtgggttcaaatggccattttttgtgtgtccctctctctcatcttatgcttcccttcctttttttatttttattttttggagacggagtcttgctgtgtcgcccaggttggagtgcagtggcgtgatcttagctcactgcaagctctgccttccaggttcacgccattcttctgcctcagccccctgagtagctgggactacaggcgcccgccaccacgcccggctaattttttttttttttttttgtatttttagtagaggcagtgtttcaccgtgttagccaggatggtctcgatctcctgacctcgtgatccacccacctcgacctcccaaagtgctgggattacaggcgtgagccaccacgcccggcctcttttttttttagctgccaatctttttgaaggaatattcttacctctactttgtcaccttctactggctccttaactaaaatctgccatttggctctctggttaacagtcccttcctgtaaagtctaaaatcttaattctaaatccacagtttaattcacaagctagtacttgactttttttctgtatttgacatttttgacaacccctactttaaagatttattcccttgacttcttacattttgctcactcctgaaccaccccccaccttttggcctcttcatttattccttaaatgttattcctcagacctccattttttttttctctcttaatcacaacaccacttctcacgcttgggtaattttaattcagcagttcctaaatccttatctttagccagactcctcaatccatctgcctgttgcacttttcttggttgtcccagagacacctgtgtgtgtcttaaaacattcattctctgcaaaacctactctaatgcctgtgtcccttactttggttaattttagaaccattatattctaagttttctaggctcattcctctcctccaccttcccctatcatttagtgtctaagttttactgattttatctccacctctctgatacatcactctttcatcttcattgctattattaataaatacctacagtactaacctgcctcctatacctagctggtctcctctctgttgctcaatgttaccacagcaggctttctagaagcactctgacagtgttactccctaatatccttcagtgacttcaggaactttcaggagaaagccaaactcctctgtttggtgtacaaggtcttctgatgtgtttcctccaccgaatgttctggtgaaacagacttacacttcttcagaagccacatttggccaggcctcccgccttggtaaatgctgtactctttgcatcaagtgtgctagtcatccttccccacttggaaaattcctatgcatcttgcaggcctgacataagcatttcctctgtgaaacctcctttgctccactcaaggagagtcatctaacttccactttcgtgtcaccactgtaattacaacctacctctattgtatgtcacttaaatcgtactgtattgttttatttttcaaaagtctttactagaatgtgagctccttaagggcaggaaaaggaacctttttattttttgcatctccatagcatagtttttggcatatgaatgtttaataaatgtttgttgaataaattgattttaaagtgacatctttattatattagaggtcctacctatattccaaatactttcactcccttcactttacagcaagggtcagtagagtcccaaggatttgtagactttagggggtcaataaagctgaaattgtattca

SEQ ID NO: 311379 - DNA, 4324 bp, Homo sapiens
ctcaagtggtctgctcgccttggcctcccaaagcgctgggattacagacatgagctactgcacctggctattttatttatttaaaagaatttgattttttagagataggatctggctatgttgcccaggctggagtgcagtggcatgatcatagctcactgtaaccttgaacttctgggctcaagcagttctcctacctcgggtttccaagtagctacgactacatggcacacacagccatgcctggcaatttttaatttttttttgtagagaccaggtctccctgtgttgtccaggctgttctccaattcctggcctcaagtagttctcccgtcttggcctcaaaaaatactgggattacaggagtgaatcactgcacctggcatatgtatttaaatacttttaaaataactaatttctagacattaatatcttagttttaccttgtcgaattaagaactaaaatatattaaaatacattaaatggtttatgcaccttaaatttattgaaataaattactttaaaaatgttttaaaatgcaaagtgaataacttttacagataaaatttatctgagatggtttctgagtgaaatattttttggttacagaatttctacaagtgtgaaagaattagaaaacttcaggaacttgttacagaatattcattaaagaaaacaagctgatatgtgcctgtttctggacaatggaggcgaaagagtggaatttcattcaaaggcataatagcaatgacagtcttaagccaaacattttatataaagttgcttttgtaaaggagaattatattgttttaagtaaacacatttttaaaaattgtgttaagtctatgtataatactactgtgagtaaaagtaatactttaataatgtggtacaaattttaaagtttaatattgaataaaaggaggattatcaaattcatatatgataaaagtgaatgttctaagtctctcaaactagcgttttatgtaataatatgtaatataaataaaactatggtaaatgtgacaagcatttaataggaaaatgctaaggaggcctcataaatgacccataattaccaacgtagaatttttcagtacatttagggttgctggatttagcaaataaaaataaagattgcccagttagatttgaatttcagataaacaattagttttttaatattttacatggaatatttggaaaatacttatactaaaaaattatttgtttgaaattcacatttaactgggagtcttgtattttatctggcaatcctaaaatacattggtatgaaacaaatcacttttagaagtatattgctattttgattgggttgtttttgtgtgtagaaacgtacaataacaactcaaaggcacaggagatttctaaacattgtgaaaagttgaatagattatatatttattctcataatactttcactaatactaaataaaatttggggaacactttttatttttatataatttccaatttacagaaaagtttcaaaaatagtacaaagagctctcttacccagattcactaattgttcatacgtgctttatctttcatgctttctctgtacacacacacacacacacaaatttttcctcaatcatttgaaagtcagttataggcatcatgccccttaaaccctaaatacttcagtgtgtaatactgaataattactaaaaatgattttctcagaaaaaaaaactcccacaattctggaactataatactgtaagccttagaataaataatactttcaagttccaatctaaagttctttttgagttttgttgcccgttttatgcttgatgtgtatagtaatagggtaggctatttattttattaaaattttttttagagacaaggttttgctgtgttgcccaagctggaacttgaacgactgggctgaagtgatcttcccacctcagcctcccaagtagctgggaatacaggtgtctgccaccatacccagtttcatttttgttttttatacccgaagttcatttcctttgtctccctaaaactgaactgtaattttgggaggttttcattagtggaagctcttcatttataaagctatttgaaggggtttaggaatttatatcacatggtaattgtagagaaaaagaagctatatacctcaaaatcgtgccctctttacatatgtcttatcaggtataacatgttgaaatgtcacattagtagtaaagtggggtttatttatatagtggttaagaaatgtcagtttacactgctgtatacttcttcttctgtgtccctaaggcctggtacagtgccaagcacatacttggtatccaataaatatttgttggatgaatgtatgcatatgtattcagtatattttaaatgaataatcacagaagtaagtttaataatttgtcctatttttctctgtcacttcctttttctctaaggcaggaaaggaaagacattaaaccattaattaagtcaatcctcttggagactcaaaagactatgaagtgatcactctatataaaatataaatacagtgtgggttcaaatggccattttttgtgtgtccctctctctcatcttatgcttcccttcctttttttatttttattttttggagacggagtcttgctgtgtcgcccaggttggagtgcagtggcgtgatcttagctcactgcaagctctgccttccaggttcacgccattcttctgcctcagccccctgagtagctgggactacaggcgcccgccaccacgcccggctaattttttttttttttttttgtatttttagtagaggcagtgtttcaccgtgttagccaggatggtctcgatctcctgacctcgtgatccacccacctcgacctcccaaagtgctgggattacaggcgtgagccaccacgcccggcctcttttttttttagctgccaatctttttgaaggaatattcttacctctactttgtcaccttctactggctccttaactaaaatctgccatttggctctctggttaacagtcccttcctgtaaagtctaaaatcttaattctaaatccacagtttaattcacaagctagtacttgactttttttctgtatttgacatttttgacaacccctactttaaagatttattcccttgacttcttacattttgctcactcctgaaccaccccccaccttttggcctcttcatttattccttaaatgttattcctcagacctccattttttttttctctcttaatcacaacaccacttctcacgcttgggtaattttaattcagcagttcctaaatccttatctttagccagactcctcaatccatctgcctgttgcacttttcttggttgtcccagagacacctgtgtgtgtcttaaaacattcattctctgcaaaacctactctaatgcctgtgtcccttactttggttaattttagaaccattatattctaagttttctaggctcattcctctcctccaccttcccctatcatttagtgtctaagttttactgattttatctccacctctctgatacatcactctttcatcttcattgctattattaataaatacctacagtactaacctgcctcctatacctagctggtctcctctctgttgctcaatgttaccacagcaggctttctagaagcactctgacagtgttactccctaatatccttcagtgacttcaggaactttcaggagaaagccaaactcctctgtttggtgtacaaggtcttctgatgtgtttcctccaccgaatgttctggtgaaacagacttacacttcttcagaagccacatttggccaggcctcccgccttggtaaatgctgtactctttgcatcaagtgtgctagtcatccttccccacttggaaaattcctatgcatcttgcaggcctgacataagcatttcctctgtgaaacctcctttgctccactcaaggagagtcatctaacttccactttcgtgtcaccactgtaattacaacctacctctattgtatgtcacttaaatcgtactgtattgttttatttttcaaaagtctttactagaatgtgagctccttaagggcaggaaaaggaacctttttattttttgcatctccatagcatagtttttggcatatgaatgtttaataaatgtttgttgaataaattgattttaaagtgacatctttattatattagaggtcctacctatattccaaatactttcactcccttcactttacagcaagggtcagtagagtcccaaggatttgtagactttagggggtcaataaagctgaaattgtattca

SEQ ID NO: 311380 - DNA, 2168 bp, Homo sapiens
gccccccaaccccgcaggaaaacacaggcccctccggctttcgctctcgctctgggaactggaaggacccccgactcccgcgcagggtctggggttgtgcgcgtcgggttgcgtctccaggccgggggcgtcagggagccgggggcggggacgggcgcgggcgcagcggaccgggcggggccgagccgggaagctggtcggtgcgtcagcctcacgcggcgggaaggaaccggtccgaggccccgggctgccggcgcgggcgccgcggcacgtccacaggctgggtcgcgaggtggcgatcgctgagaggcaggagggccgaggcgggcctgggaggcggcccggaggtggggcgccgctggggccggcccgcacgggcttcatctgagggcgcacggcccgcgaccgagcgtgcggactggcctcccaagcgtggggcgacaagctgccggagctgcaatgggccgcggctggggattcttgtttggcctcctgggcgccgtgtggctgctcagctcgggccacggagaggagcagcccccggagacagcggcacagaggtgcttctgccaggttagtggttacttggatgattgtacctgtgatgttgaaaccattgatagatttaataactacaggcttttcccaagactacaaaaacttcttgaaagtgactactttaggtattacaaggtaaacctgaagaggccgtgtcctttctggaatgacatcagccagtgtggaagaagggactgtgctgtcaaaccatgtcaatctgatgaagttcctgatggaattaaatctgcgagctacaagtattctgaagaagccaataatctcattgaagaatgtgaacaagctgaacgacttggagcagtggatgaatctctgagtgaggaaacacagaaggctgttcttcagtggaccaagcatgatgattcttcagataacttctgtgaagctgatgacattcagtcccctgaagctgaatatgtagatttgcttcttaatcctgagcgctacactggttacaagggaccagatgcttggaaaatatggaatgtcatctacgaagaaaactgttttaagccacagacaattaaaagacctttaaatcctttggcttctggtcaagggacaagtgaagagaacactttttacagttggctagaaggtctctgtgtagaaaaaagagcattctacagacttatatctggcctacatgcaagcattaatgtgcatttgagtgcaagatatcttttacaagagacctggttagaaaagaaatggggacacaacattacagaatttcaacagcgatttgatggaattttgactgaaggagaaggtccaagaaggcttaagaacttgtattttctctacttaatagaactaagggctttatccaaagtgttaccattcttcgagcgcccagattttcaactctttactggaaataaaattcaggatgaggaaaacaaaatgttacttctggaaatacttcatgaaatcaagtcatttcctttgcattttgatgagaattcattttttgctggggataaaaaagaagcacacaaactaaaggaggactttcgactgcattttagaaatatttcaagaattatggattgtgttggttgttttaaatgtcgtctgtggggaaagcttcagactcagggtttgggcactgctctgaagatcttattttctgagaaattgatagcaaatatgccagaaagtggacctagttatgaattccatctaaccagacaagaaatagtatcattattcaacgcatttggaagaatttctacaagtgtgaaagaattagaaaacttcaggaacttgttacagaatattcattaaagaaaacaagctgatatgtgcctgtttctggacaatggaggcgaaagagtggaatttcattcaaaggcataatagcaatgacagtcttaagccaaacattttatataaagttgcttttgtaaaggagaattatattgttttaagtaaacacatttttaaaaattgtgttaagtctatgtataatactactgtgagtaaaagtaatactttaataatgtggtacaaattttaaagtttaatattgaataaaaggaggattattggcctcgttggcctcagcggtggagctggtcacgcagaac

SEQ ID NO: 311381 - DNA, 1431 bp, Homo sapiens
atagttgggattacaggtccttccacacccccggctaattttttatttttaggagagacgggttttcaccatcttgccaggatggtctcgatctcctgacctcgtgatccacccacctcgacctcccaaagtgctgggattacaggcgtgagccaccacgcccggcctcttttttttttagctgccaatctttttgaaggaatattcttacctctactttgtcaccttctactggctccttaactaaaatctgccatttggctctctggttaacagtcccttcctgtaaagtctaaaatcttaattctaaatccacagtttaattcacaagctagtacttgactttttttctgtatttgacatttttgacaacccctactttaaagatttattcccttgacttcttacattttgctcactcctgaaccaccccccaccttttggcctcttcatttattccttaaatgttattcctcagacctccattttttttttctctcttaatcacaacaccacttctcacgcttgggtaattttaattcagcagttcctaaatccttatctttagccagactcctcaatccatctgcctgttgcacttttcttggttgtcccagagacacctgtgtgtgtcttaaaacattcattctctgcaaaacctactctaatgcctgtgtcccttactttggttaattttagaaccattatattctaagttttctaggctcattcctctcctccaccttcccctatcatttagtgtctaagttttactgattttatctccacctctctgatacatcactctttcatcttcattgctattattaataaatacctacagtactaacctgcctcctatacctagctggtctcctctctgttgctcaatgttaccacagcaggctttctagaagcactctgacagtgttactccctaatatccttcagtgacttcaggaactttcaggagaaagccaaactcctctgtttggtgtacaaggtcttctgatgtgtttcctccaccgaatgttctggtgaaacagacttacacttcttcagaagccacatttggccaggcctcccgccttggtaaatgctgtactctttgcatcaagtgtgctagtcatccttccccacttggaaaattcctatgcatcttgcaggcctgacataagcatttcctctgtgaaacctcctttgctccactcaaggagagtcatctaacttccactttcgtgtcaccactgtaattacaacctacctctattgtatgtcacttaaatcgtactgtattgttttatttttcaaaagtctttactagaatgtgagctccttaagggcaggaaaaggaacctttttattttttgcatctccatagcatagtttttggcatatgaatgtttaataaatgtttgttgaataaattga

SEQ ID NO: 311382 - DNA, 1578 bp, Homo sapiens
gccccccaaccccgcaggaaaacacaggcccctccggctttcgctctcgctctgggaactggaaggacccccgactcccgcgcagggtctggggttgtgcgcgtcgggttgcgtctccaggccgggggcgtcagggagccgggggcggggacgggcgcgggcgcagcggaccgggcggggccgagccgggaagctggtcggtgcgtcagcctcacgcggcgggaaggaaccggtccgaggccccgggctgccggcgcgggcgccgcggcacgtccacaggctgggtcgcgaggtggcgatcgctgagaggcaggagggccgaggcgggcctgggaggcggcccggaggtggggcgccgctggggccggcccgcacgggcttcatctgagggcgcacggcccgcgaccgagcgtgcggactggcctcccaagcgtggggcgacaagctgccggagctgcaatgggccgcggctggggattcttgtttggcctcctgggcgccgtgtggctgctcagctcgggccacggagaggagcagcccccggagacagcggcacagaggtgcttctgccaggttagtggttacttggatgattgtacctgtgatgttgaaaccattgatagatttaataactacaggcttttcccaagactacaaaaacttcttgaaagtgactactttaggtattacaaggtaaacctgaagaggccgtgtcctttctggaatgacatcagccagtgtggaagaagggactgtgctgtcaaaccatgtcaatctgatgaagttcctgatggaattaaatctgcgagctacaagtattctgaagaagccaataatctcattgaagaatgtgaacaagctgaacgacttggagcagtggatgaatctctgagtgaggaaacacagaaggctgttcttcagtggaccaagcatgatgattcttcagataacttctgtgaagctgatgacattcagtcccctgaagctgaatatgtagatttgcttcttaatcctgagcgctacactggttacaagggaccagatgcttggaaaatatggaatgtcatctacgaagaaaactgttttaagccacagacaattaaaagacctttaaatcctttggcttctggtcaagggacaagtgaagagaacactttttacagttggctagaaggtctctgtgtagaaaaaagagcattctacagacttatatctggcctacatgcaagcattaatgtgcatttgagtgcaagatatcttttacaagagacctggttagaaaagaaatggggacacaacattacagaatttcaacagcgatttgatggaatgtcatctacgaagaaaactgttttaagccacagacaattaaaagacctttaaatcctttggcttctggtcaagggcacaagtgaagagaacactttttacagttggctagaaggtctctgtgtagaaaaaagagcattctacagacttatatctggcctacatgcaagcattaatgtgcatctgagtgcaagatatcttttacaagagactggttagaacagaatggggaccaacattaccgattca

SEQ ID NO: 311383 - DNA, 1873 bp, Homo sapiens
  misc_feature (1872)..(1873): n is a, c, g, or t
gccccccaaccccgcaggaaaacacaggcccctccggctttcgctctcgctctgggaactggaaggacccccgactcccgcgcagggtctggggttgtgcgcgtcgggttgcgtctccaggccgggggcgtcagggagccgggggcggggacgggcgcgggcgcagcggaccgggcggggccgagccgggaagctggtcggtgcgtcagcctcacgcggcgggaaggaaccggtccgaggccccgggctgccggcgcgggcgccgcggcacgtccacaggctgggtcgcgaggtggcgatcgctgagaggcaggagggccgaggcgggcctgggaggcggcccggaggtggggcgccgctggggccggcccgcacgggcttcatctgagggcgcacggcccgcgaccgagcgtgcggactggcctcccaagcgtggggcgacaagctgccggagctgcaatgggccgcggctggggattcttgtttggcctcctgggcgccgtgtggctgctcagctcgggccacggagaggagcagcccccggagacagcggcacagaggtgcttctgccaggttagtggttacttggatgattgtacctgtgatgttgaaaccattgatagatttaataactacaggcttttcccaagactacaaaaacttcttgaaagtgactactttaggtattacaaggtaaacctgaagaggccgtgtcctttctggaatgacatcagccagtgtggaagaagggactgtgctgtcaaaccatgtcaatctgatgaagttcctgatggaattaaatctgcgagctacaagtattctgaagaagccaataatctcattgaagaatgtgaacaagctgaacgacttggagcagtggatgaatctctgagtgaggaaacacagaaggctgttcttcagtggaccaagcatgatgattcttcagataacttctgtgaagctgatgacattcagtcccctgaagctgaatatgtagatttgcttcttaatcctgagcgctacactggttacaagggaccagatgcttggaaaatatggaatgtcatctacgaagaaaactgttttaaagacctggttagaaaagaaatggggacacaacattacagaatttcaacagcgatttgatggaattttgactgaaggagaaggtccaagaaggcttaagaacttgtattttctctacttaatagaactaagggctttatccaaagtgttaccattcttcgagcgcccagattttcaactctttactggaaataaaattcaggatgaggaaaacaaaatgttacttctggaaatacttcatgaaatcaagtcatttcctttgcattttgatgagaattcattttttgctggggataaaaaagaagcacacaaactaaaggaggactttcgactgcattttagaaatatttcaagaattatggattgtgttggttgttttaaatgtcgtctgtggggaaagcttcagactcagggtttgggcactgctctgaagatcttattttctgagaaattgatagcaaatatgccagaaagtggacctagttatgaattccatctaaccagacaagaaatagtatcattattcaacgcatttggaagaattctacagtgtgaagaatttgaacttcggaactgttccggaaattcttaagaaacaagtggtgtgtccgttttggccaaggggcagaaggggtttttccagggtatgaagaggttgccaattttaaggttgtggggattgtgttgaacctaaggggtgtataaggaagaaaaaggggcaggtaaggatgaaaaggggttggcggctatgtgtaatacgctgtcgaattatataataaatatatnn

SEQ ID NO: 311384 - DNA, 288 bp, Homo sapiens
agagaacactttttacagttggctagaaggtaattagaaactttaaaataaatttcaatgatggtttttttctcatgagattaattttatgtctacaagattcacatatgaaattttatttctaagtcactgctttttcttaggtctctgtgtagaaaaaagagcattctacagacttatatctggcctacatgcaagcattaatgtgcatttgagtgcaagatatcttttacaaggtatgtgacatttacttttattcagtctaccactcttaattttagatattct

SEQ ID NO: 311385 - DNA, 3547 bp, Homo sapiens
gccccccaaccccgcaggaaaacacaggcccctccggctttcgctctcgctctgggaactggaaggacccccgactcccgcgcagggtctggggttgtgcgcgtcgggttgcgtctccaggccgggggcgtcagggagccgggggcggggacgggcgcgggcgcagcggaccgggcggggccgagccgggaagctggtcggtgcgtcagcctcacgcggcgggaaggaaccggtccgaggccccgggctgccggcgcgggcgccgcggcacgtccacaggctgggtcgcgaggtggcgatcgctgagaggcaggagggccgaggcgggcctgggaggcggcccggaggtggggcgccgctggggccggcccgcacgggcttcatctgagggcgcacggcccgcgaccgagcgtgcggactggcctcccaagcgtggggcgacaagctgccggagctgcaatgggccgcggctggggattcttgtttggcctcctgggcgccgtgtggctgctcagctcgggccacggagaggagcagcccccggagacagcggcacagaggtgcttctgccaggttagtggttacttggatgattgtacctgtgatgttgaaaccattgatagatttaataactacaggcttttcccaagactacaaaaacttcttgaaagtgactactttaggtattacaaggtaaacctgaagaggccgtgtcctttctggaatgacatcagccagtgtggaagaagggactgtgctgtcaaaccatgtcaatctgatgaagttcctgatggaattaaatctgcgagctacaagtattctgaagaagccaataatctcattgaagaatgtgaacaagctgaacgacttggagcagtggatgaatctctgagtgaggaaacacagaaggctgttcttcagtggaccaagcatgatgattcttcagataacttctgtgaagctgatgacattcagtcccctgaagctgaatatgtagatttgcttcttaatcctgagcgctacactggttacaagggaccagatgcttggaaaatatggaatgtcatctacgaagaaaactgttttaagccacagacaattaaaagacctttaaatcctttggcttctggtcaagggacaagtgaagagaacactttttacagttggctagaaggtctctgtgtagaaaaaagagcattctacagacttatatctggcctacatgcaagcattaatgtgcatttgagtgcaagatatcttttacaagagacctggttagaaaagaaatggggacacaacattacagaatttcaacagcgatttgatggaattttgactgaaggagaaggtccaagaaggcttaagaacttgtattttctctacttaatagaactaagggctttatccaaagtgttaccattcttcgagcgcccagattttcaactctttactggaaataaaattcaggatgaggaaaacaaaatgttacttctggaaatacttcatgaaatcaagtcatttcctttgcattttgatgagaattcattttttgctggggataaaaaagaagcacacaaactaaaggaggactttcgactgcattttagaaatatttcaagaattatggattgtgttggttgttttaaatgtcgtctgtggggaaagcttcagactcagggtttgggcactgctctgaagatcttattttctgagaaattgatagcaaatatgccagaaagtggacctagttatgaattccatctaaccagacaagaaatagtatcattattcaacgcatttggaagaatttctacaagtgtgaaagaattagaaaacttcaggaacttgttacagaatattcattaaagaaaacaagctgatatgtgcctgtttctggacaatggaggcgaaagagtggaatttcattcaaaggcataatagcaatgacagtcttaagccaaacattttatataaagttgcttttgtaaaggagaattatattgttttaagtaaacacatttttaaaaattgtgttaagtctatgtataatactactgtgagtaaaagtaatactttaataatgtggtacaaattttaaagtttaatattgaataaaaggaggattatcaaattcatatatgataaaagtgaatgttctaagtctctcaaactagcgttttatgtaataatatgtaatataaataaaactatggtaaatgtgacaagcatttaataggaaaatgctaaggaggcctcataaatgacccataattaccaacgtagaatttttcagtacatttagggttgctggatttagcaaataaaaataaagattgcccagttagatttgaatttcagataaacaattagttttttaatattttacatggaatatttggaaaatacttatactaaaaaattatttgtttgaaattcacatttaactgggagtcttgtattttatctggcaatcctaaaatacattggtatgaaacaaatcacttttagaagtatattgctattttgattgggttgtttttgtgtgtagaaacgtacaataacaactcaaaggcacaggagatttctaaacattgtgaaaagttgaatagattatatatttattctcataatactttcactaatactaaataaaatttggggaacactttttatttttatataatttccaatttacagaaaagtttcaaaaatagtacaaagagctctcttacccagattcactaattgttcatacgtgctttatctttcatgctttctctgtacacacacacacacacacaaatttttcctcaatcatttgaaagtcagttataggcatcatgccccttaaaccctaaatacttcagtgtgtaatactgaataattactaaaaatgattttctcagaaaaaaaaactcccacaattctggaactataatactgtaagccttagaataaataatactttcaagttccaatctaaagttctttttgagttttgttgcccgttttatgcttgatgtgtatagtaatagggtaggctatttattttattaaaattttttttagagacaaggttttgctgtgttgcccaagctggaacttgaacgactgggctgaagtgatcttcccacctcagcctcccaagtagctgggaatacaggtgtctgccaccatacccagtttcatttttgttttttatacccgaagttcatttcctttgtctccctaaaactgaactgtaattttgggaggttttcattagtggaagctcttcatttataaagctatttgaaggggtttaggaatttatatcacatggtaattgtagagaaaaagaagctatatacctcaaaatcgtgccctctttacatatgtcttatcaggtataacatgttgaaatgtcacattagtagtaaagtggggtttatttatatagtggttaagaaatgtcagtttacactgctgtatacttcttcttctgtgtccctaaggcctggtacagtgccaagcacatacttggtatccaataaatatttgttggatg

SEQ ID NO: 311386 - DNA, 5465 bp, Homo sapiens
gccccccaaccccgcaggaaaacacaggcccctccggctttcgctctcgctctgggaactggaaggacccccgactcccgcgcagggtctggggttgtgcgcgtcgggttgcgtctccaggccgggggcgtcagggagccgggggcggggacgggcgcgggcgcagcggaccgggcggggccgagccgggaagctggtcggtgcgtcagcctcacgcggcgggaaggaaccggtccgaggccccgggctgccggcgcgggcgccgcggcacgtccacaggctgggtcgcgaggtggcgatcgctgagaggcaggagggccgaggcgggcctgggaggcggcccggaggtggggcgccgctggggccggcccgcacgggcttcatctgagggcgcacggcccgcgaccgagcgtgcggactggcctcccaagcgtggggcgacaagctgccggagctgcaatgggccgcggctggggattcttgtttggcctcctgggcgccgtgtggctgctcagctcgggccacggagaggagcagcccccggagacagcggcacagaggtgcttctgccaggttagtggttacttggatgattgtacctgtgatgttgaaaccattgatagatttaataactacaggcttttcccaagactacaaaaacttcttgaaagtgactactttaggtattacaaggtaaacctgaagaggccgtgtcctttctggaatgacatcagccagtgtggaagaagggactgtgctgtcaaaccatgtcaatctgatgaagttcctgatggaattaaatctgcgagctacaagtattctgaagaagccaataatctcattgaagaatgtgaacaagctgaacgacttggagcagtggatgaatctctgagtgaggaaacacagaaggctgttcttcagtggaccaagcatgatgattcttcagataacttctgtgaagctgatgacattcagtcccctgaagctgaatatgtagatttgcttcttaatcctgagcgctacactggttacaagggaccagatgcttggaaaatatggaatgtcatctacgaagaaaactgttttaagccacagacaattaaaagacctttaaatcctttggcttctggtcaagggacaagtgaagagaacactttttacagttggctagaaggtctctgtgtagaaaaaagagcattctacagacttatatctggcctacatgcaagcattaatgtgcatttgagtgcaagatatcttttacaagagacctggttagaaaagaaatggggacacaacattacagaatttcaacagcgatttgatggaattttgactgaaggagaaggtccaagaaggcttaagaacttgtattttctctacttaatagaactaagggctttatccaaagtgttaccattcttcgagcgcccagattttcaactctttactggaaataaaattcaggatgaggaaaacaaaatgttacttctggaaatacttcatgaaatcaagtcatttcctttgcattttgatgagaattcattttttgctggggataaaaaagaagcacacaaactaaaggaggactttcgactgcattttagaaatatttcaagaattatggattgtgttggttgttttaaatgtcgtctgtggggaaagcttcagactcagggtttgggcactgctctgaagatcttattttctgagaaattgatagcaaatatgccagaaagtggacctagttatgaattccatctaaccagacaagaaatagtatcattattcaacgcatttggaagaatttctacaagtgtgaaagaattagaaaacttcaggaacttgttacagaatattcattaaagaaaacaagctgatatgtgcctgtttctggacaatggaggcgaaagagtggaatttcattcaaaggcataatagcaatgacagtcttaagccaaacattttatataaagttgcttttgtaaaggagaattatattgttttaagtaaacacatttttaaaaattgtgttaagtctatgtataatactactgtgagtaaaagtaatactttaataatgtggtacaaattttaaagtttaatattgaataaaaggaggattatcaaattcatatatgataaaagtgaatgttctaagtctctcaaactagcgttttatgtaataatatgtaatataaataaaactatggtaaatgtgacaagcatttaataggaaaatgctaaggaggcctcataaatgacccataattaccaacgtagaatttttcagtacatttagggttgctggatttagcaaataaaaataaagattgcccagttagatttgaatttcagataaacaattagttttttaatattttacatggaatatttggaaaatacttatactaaaaaattatttgtttgaaattcacatttaactgggagtcttgtattttatctggcaatcctaaaatacattggtatgaaacaaatcacttttagaagtatattgctattttgattgggttgtttttgtgtgtagaaacgtacaataacaactcaaaggcacaggagatttctaaacattgtgaaaagttgaatagattatatatttattctcataatactttcactaatactaaataaaatttggggaacactttttatttttatataatttccaatttacagaaaagtttcaaaaatagtacaaagagctctcttacccagattcactaattgttcatacgtgctttatctttcatgctttctctgtacacacacacacacacacaaatttttcctcaatcatttgaaagtcagttataggcatcatgccccttaaaccctaaatacttcagtgtgtaatactgaataattactaaaaatgattttctcagaaaaaaaaactcccacaattctggaactataatactgtaagccttagaataaataatactttcaagttccaatctaaagttctttttgagttttgttgcccgttttatgcttgatgtgtatagtaatagggtaggctatttattttattaaaattttttttagagacaaggttttgctgtgttgcccaagctggaacttgaacgactgggctgaagtgatcttcccacctcagcctcccaagtagctgggaatacaggtgtctgccaccatacccagtttcatttttgttttttatacccgaagttcatttcctttgtctccctaaaactgaactgtaattttgggaggttttcattagtggaagctcttcatttataaagctatttgaaggggtttaggaatttatatcacatggtaattgtagagaaaaagaagctatatacctcaattagtagtaaagtggggtttatttatatagtggttaagaaatgtcagtttacactgctgtatacttcttcttctgtgtccctaaggcctggtacagtgccaagcacatacttggtatccaataaatatttgttggatgaatgtatgcatatgtattcagtatattttaaatgaataatcacagaagtaagtttaataatttgtcctatttttctctgtcacttcctttttctctaaggcaggaaaggaaagacattaaaccattaattaagtcaatcctcttggagactcaaaagactatgaagtgatcactctatataaaatataaatacagtgtgggttcaaatggccattttttgtgtgtccctctctctcatcttatgcttcccttcctttttttatttttattttttggagacggagtcttgctgtgtcgcccaggttggagtgcagtggcgtgatcttagctcactgcaagctctgccttccaggttcacgccattcttctgcctcagccccctgagtagctgggactacaggcgcccgccaccacgcccggctaattttttttttttttttttgtatttttagtagaggcagtgtttcaccgtgttagccaggatggtctcgatctcctgacctcgtgatccacccacctcgacctcccaaagtgctgggattacaggcgtgagccaccacgcccggcctcttttttttttagctgccaatctttttgaaggaatattcttacctctactttgtcaccttctactggctccttaactaaaatctgccatttggctctctggttaacagtcccttcctgtaaagtctaaaatcttaattctaaatccacagtttaattcacaagctagtacttgactttttttctgtatttgacatttttgacaacccctactttaaagatttattcccttgacttcttacattttgctcactcctgaaccaccccccaccttttggcctcttcatttattccttaaatgttattcctcagacctccattttttttttctctcttaatcacaacaccacttctcacgcttgggtaattttaattcagcagttcctaaatccttatctttagccagactcctcaatccatctgcctgttgcacttttcttggttgtcccagagacacctgtgtgtgtcttaaaacattcattctctgcaaaacctactctaatgcctgtgtcccttactttggttaattttagaaccattatattctaagttttctaggctcattcctctcctccaccttcccctatcatttagtgtctaagttttactgattttatctccacctctctgatacatcactctttcatcttcattgctattattaataaatacctacagtactaacctgcctcctatacctagctggtctcctctctgttgctcaatgttaccacagcaggctttctagaagcactctgacagtgttactccctaatatccttcagtgacttcaggaactttcaggagaaagccaaactcctctgtttggtgtacaaggtcttctgatgtgtttcctccaccgaatgttctggtgaaacagacttacacttcttcagaagccacatttggccaggcctcccgccttggtaaatgctgtactctttgcatcaagtgtgctagtcatccttccccacttggaaaattcctatgcatcttgcaggcctgacataagcatttcctctgtgaaacctcctttgctccactcaaggagagtcatctaacttccactttcgtgtcaccactgtaattacaacctacctctattgtatgtcacttaaatcgtactgtattgttttatttttcaaaagtctttactagaatgtgagctccttaagggcaggaaaaggaacctttttattttttgcatctccatagcatagtttttggcatatgaatgtttaataaatgtttgttgaataaattgattttaaagtgacatctttattatattagaggtcctacctatattccaaatactttcactcccttcactttacagcaagggtcagtagagtcccaaggatttgtagactttagggggtcaataaagctgaaattgtattca

SEQ ID NO: 311387 - DNA, 4626 bp, Homo sapiens
gccccccaaccccgcaggaaaacacaggcccctccggctttcgctctcgctctgggaactggaaggacccccgactcccgcgcagggtctggggttgtgcgcgtcgggttgcgtctccaggccgggggcgtcagggagccgggggcggggacgggcgcgggcgcagcggaccgggcggggccgagccgggaagctggtcggtgcgtcagcctcacgcggcgggaaggaaccggtccgaggccccgggctgccggcgcgggcgccgcggcacgtccacaggctgggtcgcgaggtggcgatcgctgagaggcaggagggccgaggcgggcctgggaggcggcccggaggtggggcgccgctggggccggcccgcacgggcttcatctgagggcgcacggcccgcgaccgagcgtgcggactggcctcccaagcgtggggcgacaagctgccggagctgcaatgggccgcggctggggattcttgtttggcctcctgggcgccgtgtggctgctcagctcgggccacggagaggagcagcccccggagacagcggcacagaggtgcttctgccaggttagtggttacttggatgattgtacctgtgatgttgaaaccattgatagatttaataactacaggcttttcccaagactacaaaaacttcttgaaagtgactactttaggtattacaaggtaaacctgaagaggccgtgtcctttctggaatgacatcagccagtgtggaagaagggactgtgctgtcaaaccatgtcaatctgatgaagttcctgatggaattaaatctgcgagctacaagtattctgaagaagccaataatctcattgaagaatgtgaacaagctgaacgacttggagcagtggatgaatctctgagtgaggaaacacagaaggctgttcttcagtggaccaagcatgatgattcttcagataacttctgtgaagctgatgacattcagtcccctgaagctgaatatgtagatttgcttcttaatcctgagcgctacactggttacaagggaccagatgcttggaaaatatggaatgtcatctacgaagaaaactgttttaagccacagacaattaaaagacctttaaatcctttggcttctggtcaagggacaagtgaagagaacactttttacagttggctagaaggtctctgtgtagaaaaaagagcattctacagacttatatctggcctacatgcaagcattaatgtgcatttgagtgcaagatatcttttacaagagacctggttagaaaagaaatggggacacaacattacagaatttcaacagcgatttgatggaattttgactgaaggagaaggtccaagaaggcttaagaacttgtattttctctacttaatagaactaagggctttatccaaagtgttaccattcttcgagcgcccagattttcaactctttactggaaataaaattcaggatgaggaaaacaaaatgttacttctggaaatacttcatgaaatcaagtcatttcctttgcattttgatgagaattcattttttgctggggataaaaaagaagcacacaaactaaaggaggactttcgactgcattttagaaatatttcaagaattatggattgtgttggttgttttaaatgtcgtctgtggggaaagcttcagactcagggtttgggcactgctctgaagatcttattttctgagaaattgatagcaaatatgccagaaagtggacctagttatgaattccatctaaccagacaagaaatagtatcattattcaacgcatttggaagaatttctacaagtgtgaaagaattagaaaacttcaggaacttgttacagaatattcattaaagaaaacaagctgatatgtgcctgtttctggacaatggaggcgaaagagtggaatttcattcaaaggcataatagcaatgacagtcttaagccaaacattttatataaagttgcttttgtaaaggagaattatattgttttaagtaaacacatttttaaaaattgtgttaagtctatgtataatactactgtgagtaaaagtaatactttaataatgtggtacaaattttaaagtttaatattgaataaaaggaggattatcaaattcatatatgataaaagtgaatgttctaagtctctcaaactagcgttttatgtaataatatgtaatataaataaaactatggtaaatgtgacaagcatttaataggaaaatgctaaggaggcctcataaatgacccataattaccaacgtagaatttttcagtacatttagggttgctggatttagcaaataaaaataaagattgcccagttagatttgaatttcagataaacaattagttttttaatattttacatggaatatttggaaaatacttatactaaaaaattatttgtttgaaattcacatttaactgggagtcttgtattttatctggcaatcctaaaatacattggtatgaaacaaatcacttttagaagtatattgctattttgattgggttgtttttgtgtgtagaaacgtacaataacaactcaaaggcacaggagatttctaaacattgtgaaaagttgaatagattatatatttattctcataatactttcactaatactaaataaaatttggggaacactttttatttttatataatttccaatttacagaaaagtttcaaaaatagtacaaagagctctcttacccagattcactaattgttcatacgtgctttatctttcatgctttctctgtacacacacacacacacacaaatttttcctcaatcatttgaaagtcagttataggcatcatgccccttaaaccctaaatacttcagtgtgtaatactgaataattactaaaaatgattttctcagaaaaaaaaactcccacaattctggaactataatactgtaagccttagaataaataatactttcaagttccaatctaaagttctttttgagttttgttgcccgttttatgcttgatgtgtatagtaatagggtaggctatttattttattaaaattttttttagagacaaggttttgctgtgttgcccaagctggaacttgaacgactgggctgaagtgatcttcccacctcagcctcccaagtagctgggaatacaggtgtctgccaccatacccagtttcatttttgttttttatacccgaagttcatttcctttgtctccctaaaactgaactgtaattttgggaggttttcattagtggaagctcttcatttataaagctatttgaaggggtttaggaatttatatcacatggtaattgtagagaaaaagaagctatatacctcaaaatcgtgccctctttacatatgtcttatcaggtataacatgttgaaatgtcacattagtagtaaagtggggtttatttatatagtggttaagaaatgtcagtttacactgctgtatacttcttcttctgtgtccctaaggcctggtacagtgccaagcacatacttggtatccaataaatatttgttggatgaatgtatgcatatgtattcagtatattttaaatgaataatcacagaagtaagtttaataatttgtcctatttttctctgtcacttcctttttctctaaggcaggaaaggaaagacattaaaccattaattaagtcaatcctcttggagactcaaaagactatgaagtgatcactctatataaaatataaatacagtgtgggttcaaatggccattttttgtgtgtccctctctctcatcttatgcttcccttcctttttttatttttattttttggagacggagtcttgctgtgtcgcccaggttggagtgcagtggcgtgatcttagctcactgcaagctctgccttccaggttcacgccattcttctgcctcagccccctgagtagctgggactacaggcgcccgccaccacgcccggctaattttttttttttttttttgtatttttagtagaggcagtgtttcaccgtgttagccaggatggtctcgatctcctgacctcgtgatccacccacctcgacctcccaaagtgctgggattacaggcgtgagccaccacgcccggcctcttttttttttagctgccaatctttttgaaggaatattcttacctctactttgtcaccttctactggctccttaactaaaatctgccatttggctctctggttaacagtcccttcctgtaaagtctaaaatcttaattctaaatccacagtttaattcacaagctagtacttgactttttttctgtatttgacatttttgacaacccctactttaaagatttattcccttgacttcttacattttgctcactcctgaaccacccccctccccaaaaatccccaaagtacggtgtggcagaaaacagcgccaacaggtcctgccagtcagaagccactcccctgatttcatggctcaagaccccaactataaattaacccttcccaccttgaatgtgtacacacactactgagatccaggccgatccttgccatgggatgaacctgagaattgccaagacccgccttcccacgttcacccaaccaaatcatgtggtatctgttacgcacgg

SEQ ID NO: 311388 - DNA, 2753 bp, Homo sapiens
gccccccaaccccgcaggaaaacacaggcccctccggctttcgctctcgctctgggaactggaaggacccccgactcccgcgcagggtctggggttgtgcgcgtcgggttgcgtctccaggccgggggcgtcagggagccgggggcggggacgggcgcgggcgcagcggaccgggcggggccgagccgggaagctggtcggtgcgtcagcctcacgcggcgggaaggaaccggtccgaggccccgggctgccggcgcgggcgccgcggcacgtccacaggctgggtcgcgaggtggcgatcgctgagaggcaggagggccgaggcgggcctgggaggcggcccggaggtggggcgccgctggggccggcccgcacgggcttcatctgagggcgcacggcccgcgaccgagcgtgcggactggcctcccaagcgtggggcgacaagctgccggagctgcaatgggccgcggctggggattcttgtttggcctcctgggcgccgtgtggctgctcagctcgggccacggagaggagcagcccccggagacagcggcacagaggtgcttctgccaggttagtggttacttggatgattgtacctgtgatgttgaaaccattgatagatttaataactacaggcttttcccaagactacaaaaacttcttgaaagtgactactttaggtattacaaggtaaacctgaagaggccgtgtcctttctggaatgacatcagccagtgtggaagaagggactgtgctgtcaaaccatgtcaatctgatgaagttcctgatggaattaaatctgcgagctacaagtattctgaagaagccaataatctcattgaagaatgtgaacaagctgaacgacttggagcagtggatgaatctctgagtgaggaaacacagaaggctgttcttcagtggaccaagcatgatgattcttcagataacttctgtgaagctgatgacattcagtcccctgaagctgaatatgtagatttgcttcttaatcctgagcgctacactggttacaagggaccagatgcttggaaaatatggaatgtcatctacgaagaaaactgttttaagccacagacaattaaaagacctttaaatcctttggcttctggtcaagggacaagtgaagagaacactttttacagttggctagaaggtctctgtgtagaaaaaagagcattctacagacttatatctggcctacatgcaagcattaatgtgcatttgagtgcaagatatcttttacaagagacctggttagaaaagaaatggggacacaacattacagaatttcaacagcgatttgatggaattttgactgaaggagaaggtccaagaaggcttaagaacttgtattttctctacttaatagaactaagggctttatccaaagtgttaccattcttcgagcgcccagattttcaactctttactggaaataaaattcaggatgaggaaaacaaaatgttacttctggaaatacttcatgaaatcaagtcatttcctttgcattttgatgagaattcattttttgctggggataaaaaagaagcacacaaactaaaggaggactttcgactgcattttagaaatatttcaagaattatggattgtgttggttgttttaaatgtcgtctgtggggaaagcttcagactcagggtttgggcactgctctgaagatcttattttctgagaaattgatagcaaatatgccagaaagtggacctagttatgaattccatctaaccagacaagaaatagtatcattattcaacgcatttggaagaatttctacaagtgtgaaagaattagaaaacttcaggaacttgttacagaatattcattaaagaaaacaagctgatatgtgcctgtttctggacaatggaggcgaaagagtggaatttcattcaaaggcataatagcaatgacagtcttaagccaaacattttatataaagttgcttttgtaaaggagaattatattgttttaagtaaacacatttttaaaaattgtgttaagtctatgtataatactactgtgagtaaaagtaatactttaataatgtggtacaaattttaaagtttaatattgaataaaaggaggattataaaaaaaaaaaaaaaaaaaaaaaaaaaaaaaaaaaaaaaaaaaaaaaaaaaaaaaaaaaaagaaaaagaaaaaaaagaaaaaaaaaaaaaaaaaaaaaaaaaaaaagaagaaaagaaaaaaaagaagaagaaaaaagagaaaaagaaacagaacaagagaagaaagaaccgatggagaaacggacccgccgcgagggggggaatcgcggcgaaggaaagagaggagaagaggaaggagagatgcggagaggagagggagtaagtcgcgaacggggtcgggaaagggccgaagagagaaacacgagaggagaaaagacaccacgcacaacaaaacaaagagagaagagagtcaagagagagaaaaaacagaaggagaagtacagaagcggaacggaagaggacgcaagaagagaaaagagagaaggagagaggaggaaaaaaagagtaaaagaacagagcaaggcgagaacagaaaaaaaaagggcagagtcagaagaagagagagaaaaaagcagaaagaagacgaaaggaagaaaaaggagacagaagaacgagaaaaagagaacagaaaacgagaaaaagagacagaaagaagaggaagagagagaaaaacacaaggggaggag

SEQ ID NO: 311389 - DNA, 1749 bp, Homo sapiens
gccccccaaccccgcaggaaaacacaggcccctccggctttcgctctcgctctgggaactggaaggacccccgactcccgcgcagggtctggggttgtgcgcgtcgggttgcgtctccaggccgggggcgtcagggagccgggggcggggacgggcgcgggcgcagcggaccgggcggggccgagccgggaagctggtcggtgcgtcagcctcacgcggcgggaaggaaccggtccgaggccccgggctgccggcgcgggcgccgcggcacgtccacaggctgggtcgcgaggtggcgatcgctgagaggcaggagggccgaggcgggcctgggaggcggcccggaggtggggcgccgctggggccggcccgcacgggcttcatctgagggcgcacggcccgcgaccgagcgtgcggactggcctcccaagcgtggggcgacaagctgccggagctgcaatgggccgcggctggggattcttgtttggcctcctgggcgccgtgtggctgctcagctcgggccacggagaggagcagcccccggagacagcggcacagaggtgcttctgccaggttagtggttacttggatgattgtacctgtgatgttgaaaccattgatagatttaataactacaggcttttcccaagactacaaaaacttcttgaaagtgactactttaggtattacaaggtaaacctgaagaggccgtgtcctttctggaatgacatcagccagtgtggaagaagggactgtgctgtcaaaccatgtcaatctgatgaagttcctgatggaattaaatctgcgagctacaagtattctgaagaagccaataatctcattgaagaatgtgaacaagctgaacgacttggagcagtggatgaatctctgagtgaggaaacacagaaggctgttcttcagtggaccaagcatgatgattcttcagataacttctgtgaagctgatgacattcagtcccctgaagctgaatatgtagatttgcttcttaatcctgagcgctacactggttacaagggaccagatgcttggaaaatatggaatgtcatctacgaagaaaactgttttaagccacagacaattaaaagacctttaaatcctttggcttctggtcaagggacaagtgaagagaacactttttacagttggctagaaggtctctgtgtagaaaaaagagcattctacagacttatatctggcctacatgcaagcattaatgtgcatttgagtgcaagatatcttttacaaggtatgtgacatttacttttattcagtctaccactcttaattttagatattcttaaaattttcctggcatttacctgaatgggaaaagattgacctgattgaatattaggcagtaaaaattcactcttaaatggtagtaatcagaaaggtgggaactgtagatacaattgaacagtttaacatactcttagctctcttcaccttcttttaagaagctgctcaaaattgtccatatcactttggaaatattcttgttttcttgtgggaatttaaatagttcctaacagcacagtttgctatttgatagatattgttgtatcagaacctttttatttgtgtgctcgtatcaggcctggagtttaaatgggtaaaagcctttcctgctgctgttgatgccttaatactgttgaaaatgagactgtggttgattttcatcagtaccatatttcttctggaattaaagtatcacactctgagaaacaa

SEQ ID NO: 311390 - DNA, 893 bp, Homo sapiens
gccccccaaccccgcaggaaaacacaggcccctccggctttcgctctcgctctgggaactggaaggacccccgactcccgcgcagggtctggggttgtgcgcgtcgggttgcgtctccaggccgggggcgtcagggagccgggggcggggacgggcgcgggcgcagcggaccgggcggggccgagccgggaagctggtcggtgcgtcagcctcacgcggcgggaaggaaccggtccgaggccccgggctgccggcgcgggcgccgcggcacgtccacaggctgggtcgcgaggtggcgatcgctgagaggcaggagggccgaggcgggcctgggaggcggcccggaggtggggcgccgctggggccggcccgcacgggcttcatctgagggcgcacggcccgcgaccgagcgtgcggactggcctcccaagcgtggggcgacaagctgccggagctgcaatgggccgcggctggggattcttgtttggcctcctgggcgccgtgtggctgctcagctcgggccacggagaggagcagcccccggagacagcggcacagaggtgcttctgccaggttagtggttacttggatgattgtacctgtgatgttgaaaccattgatagatttaataactacaggcttttcccaagactacaaaaacttcttgaaagtgactactttaggtattacaaggtaaacctgaagaggccgtgtcctttctggaatgacatcagccagtgtggaagaagggactgtgctgtcaaaccatgtcaatctgatgaagttcctgatggaattaaatctgcgagctacaaggtgtgtacgtatacctattgatgtgtccagtatcttaatgaaaaacttgaaaaacccatttccgttgtacctactat

SEQ ID NO: 311391 - DNA, 343 bp, Homo sapiens
caaatggctacaaaggttatgattgggcttcctgggctggttcctgcagagattatggtcaaagttgttttgtcttacatggtctggccagtatttatttgtatattcagcatctcaagataaaaaacatagtatggtggtaaatgctacgtgggacagcagctttacacaaacatgtttcttaagcctatagcccacaccaatacttataaattgagctatttgtgaattaaacaaacaaaagtaaattattcatatgctcacataagttgaatcaagaaaataatatctaattgcttttttttagggaagcttggttttcttagaagtctgtctgttagcc

SEQ ID NO: 311392 - DNA, 4339 bp, Homo sapiens
  misc_feature (3718)..(3718): n is a, c, g, or t
aggctggggagaacccacagggagacccacagacacatatgcacgagagagacagaggaggaaagagacagagacaaaggcacagcggaagaaggcagagacagggcaggcacagaagcggcccagacagagtcctacagagggagaggccagagaagctgcagaagacacaggcagggagagacaaagatccaggaaaggagggctcaggaggagagtttggagaagccagacccctgggcacctctcccaagcccaaggactaagttttctccatttcctttaacggtcctcagcccttctgaaaactttgcctctgaccttggcaggagtccaagcccccaggctacagagaggagctttccaaagctagggtgtggaggacttggtgccctagacggcctcagtccctcccagctgcagtaccagtgccatgtcccagacaggctcgcatcccgggaggggcttggcagggcgctggctgtggggagcccaaccctgcctcctgctccccattgtgccgctctcctggctggtgtggctgcttctgctactgctggcctctctcctgccctcagcccggctggccagccccctcccccgggaggaggagatcgtgtttccagagaagctcaacggcagcgtcctgcctggctcgggcgcccctgccaggctgttgtgccgcttgcaggcctttggggagacgctgctactagagctggagcaggactccggtgtgcaggtcgaggggctgacagtgcagtacctgggccaggcgcctgagctgctgggtggagcagagcctggcacctacctgactggcaccatcaatggagatccggagtcggtggcatctctgcactgggatgggggagccctgttaggcgtgttacaatatcggggggctgaactccacctccagcccctggagggaggcacccctaactctgctgggggacctggggctcacatcctacgccggaagagtcctgccagcggtcaaggtcccatgtgcaacgtcaaggctcctcttggaagccccagccccagaccccgaagagccaagcgctttgcttcactgagtagatttgtggagacactggtggtggcagatgacaagatggccgcattccacggtgcggggctaaagcgctacctgctaacagtgatggcagcagcagccaaggccttcaagcacccaagcatccgcaatcctgtcagcttggtggtgactcggctagtgatcctggggtcaggcgaggaggggccccaagtggggcccagtgctgcccagaccctgcgcagcttctgtgcctggcagcggggcctcaacacccctgaggactcggaccctgaccactttgacacagccattctgtttacccgtcaggacctgtgtggagtctccacttgcgacacgctgggtatggctgatgtgggcaccgtctgtgacccggctcggagctgtgccattgtggaggatgatgggctccagtcagccttcactgctgctcatgaactgggtcatgtcttcaacatgctccatgacaactccaagccatgcatcagtttgaatgggcctttgagcacctctcgccatgtcatggcccctgtgatggctcatgtggatcctgaggagccctggtccccctgcagtgcccgcttcatcactgacttcctggacaatggctatgggcactgtctcttagacaaaccagaggctccattgcatctgcctgtgactttccctggcaaggactatgatgctgaccgccagtgccagctgaccttcgggcccgactcacgccattgtccacagctgccgccgccctgtgctgccctctggtgctctggccacctcaatggccatgccatgtgccagaccaaacactcgccctgggccgatggcacaccctgcgggcccgcacaggcctgcatgggtggtcgctgcctccacatggaccagctccaggacttcaatattccacaggctggtggctggggtccttggggaccatggggtgactgctctcggacctgtgggggtggtgtccagttctcctcccgagactgcacgaggcctgtcccccggaatggtggcaagtactgtgagggccgccgtacccgcttccgctcctgcaacactgaggactgcccaactggctcagccctgaccttccgcgaggagcagtgtgctgcctacaaccaccgcaccgacctcttcaagagcttcccagggcccatggactgggttcctcgctacacaggcgtggccccccaggaccagtgcaaactcacctgccaggcccgggcactgggctactactatgtgctggagccacgggtggtagatgggaccccctgttccccggacagctcctcggtctgtgtccagggccgatgcatccatgctggctgtgatcgcatcattggctccaagaagaagtttgacaagtgcatggtgtgcggaggggacggttctggttgcagcaagcagtcaggctccttcaggaaattcaggtacggatacaacaatgtggtcactatccccgcgggggccacccacattcttgtccggcagcagggaaaccctggccaccggagcatctacttggccctgaagctgccagatggctcctatgccctcaatggtgaatacacgctgatgccctcccccacagatgtggtactgcctggggcagtcagcttgcgctacagcggggccactgcagcctcagagacactgtcaggccatgggccactggcccagcctttgacactgcaagtcctagtggctggcaacccccaggacacacgcctccgatacagcttcttcgtgccccggccgaccccttcaacgccacgccccactccccaggactggctgcaccgaagagcacagattctggagatccttcggcggcgcccctgggcgggcaggaaataacctcactatcccggctgccctttctgggcaccggggcctcggacttagctgggagaaagagagagcttctgttgctgcctcatgctaagactcagtggggaggggctgtgggcgtgagacctgcccctcctctctgccctaatgcgcaggctggccctgccctggtttcctgccctgggaggcagtgatgggttagtggatggaaggggctgacagacagccctccatctaaactgccccctctgccctgcgggtcacaggagggagggggaaggcagggagggcctgggccccagttgtatttatttagtatttattcacttttatttagcaccagggaaggggacaaggactagggtcctggggaacctgacccctgacccctcatagccctcaccctggggctaggaaatccagggtggtggtgataggtataagtggtgtgtgtatgcgtgtgtgtgtgtgtgtgaaaatgtgtgtgtgcttatgtatgaggtacaacctgttctgctttcctcttcctgaattttattttttgggaaaagaaaagtcaagggtagggtgggccttcagggagtgagggattatctttttttttttttctttctttctttcttttttttttttgagacagaatctcgctctgtcgcccaggctggagtgcaatggcacaatctcggctcactgcatcctccgcctcccgggttcaagtgattctcatgcctcagcctcctgagtagctgggattacaggctcctgccaccacgcccngctaatttttgttttgttttgtttggagacagagtctcgctattgtcaccagggctggaatgatttcagctcactgcaaccttcgccacctgggttccagcaattctcctgcctcagcctcccgagtagctgagattataggcacctaccaccacgcccggctaatttttgtatttttagtagagacggggtttcaccatgttggccaggctggtctcgaactcctgaccttaggtgatccactcgccttcatctcccaaagtgctgggattacaggcgtgagccaccgtgcctggccacgcccaactaatttttgtatttttagtagagacagggtttcaccatgttggccaggctgctcttgaactcctgacctcaggtaatcgacctgcctcggcctcccaaagtgctgggattacaggtgtgagccaccacgcccggtacatattttttaaattgaattctactatttatgtgatccttttggagtcagacagatgtggttgcatcctaactccatgtctctgagcattagatttctcatttgccaataataatacctcccttagaagtttgttgtgaggattaaataatgtaaataaagaactagcataacactca

SEQ ID NO: 311393 - DNA, 1661 bp, Homo sapiens
  misc_feature (1040)..(1040): n is a, c, g, or t
catgctctgagtgtactcctcctccctcctgtgacccgcagggcagagggggcagtttagatggagggctgtctgtcagccccttccatccactaacccatcactgcctcctagtggctggcaacccccaggacacacgcctccgatacagcttcttcgtgccccggccgaccccttcaacgccacgccccactccccaggactggctgcaccgaagagcacagattctggagatccttcggcggcgcccctgggcgggcaggaaataacctcactatcccggctgccctttctgggcaccggggcctcggacttagctgggagaaagagagagcttctgttgctgcctcatgctaagactcagtggggaggggctgtgggcgtgagacctgcccctcctctctgccctaatgcgcaggctggccctgccctggtttcctgccctgggaggcagtgatgggttagtggatggaaggggctgacagacagccctccatctaaactgccccctctgccctgcgggtcacaggagggagggggaaggcagggagggcctgggccccagttgtatttatttagtatttattcacttttatttagcaccagggaaggggacaaggactagggtcctggggaacctgacccctgacccctcatagccctcaccctggggctaggaaatccagggtggtggtgataggtataagtggtgtgtgtatgcgtgtgtgtgtgtgtgtgaaaatgtgtgtgtgcttatgtatgaggtacaacctgttctgctttcctcttcctgaattttattttttgggaaaagaaaagtcaagggtagggtgggccttcagggagtgagggattatctttttttttttttctttctttctttcttttttttttttgagacagaatctcgctctgtcgcccaggctggagtgcaatggcacaatctcggctcactgcatcctccgcctcccgggttcaagtgattctcatgcctcagcctcctgagtagctgggattacaggctcctgccaccacgcccngctaatttttgttttgttttgtttggagacagagtctcgctattgtcaccagggctggaatgatttcagctcactgcaaccttcgccacctgggttccagcaattctcctgcctcagcctcccgagtagctgagattataggcacctaccaccacgcccggctaatttttgtatttttagtagagacggggtttcaccatgttggccaggctggtctcgaactcctgaccttaggtgatccactcgccttcatctcccaaagtgctgggattacaggcgtgagccaccgtgcctggccacgcccaactaatttttgtatttttagtagagacagggtttcaccatgttggccaggctgctcttgaactcctgacctcaggtaatcgacctgcctcggcctcccaaagtgctgggattacaggtgtgagccaccacgcccggtacatattttttaaattgaattctactatttatgtgatccttttggagtcagacagatgtggttgcatcctaactccatgtctctgagcattagatttctcatttgccaataataatacctcccttagaagtttgttgtgaggattaaataatgtaaataaagaactagcataacactca

SEQ ID NO: 311394 - DNA, 3036 bp, Homo sapiens
  misc_feature (2415)..(2415): n is a, c, g, or t
ggagaaaccgaaggggatcccctattagaagacttgaagcaagtttaagaaaggcccccaataccatttgcaacttgtgggctgggaagccacacgagatagcccaggctgggggatttacaggatctgatcatccacagctgcagccagatttattatggagtccctcagggcatggggaagggaccctcagatcctatcagggcctttgctcccacaggtcatgtcttcaacatgctccatgacaactccaagccatgcatcagtttgaatgggcctttgagcacctctcgccatgtcatggcccctgtgatggctcatgtggatcctgaggagccctggtccccctgcagtgcccgcttcatcactgacttcctggacaatggctatgggcactgtctcttagacaaaccagaggctccattgcatctgcctgtgactttccctggcaaggactatgatgctgaccgccagtgccagctgaccttcgggcccgactcacgccattgtccacagctgccgccgccctgtgctgccctctggtgctctggccacctcaatggccatgccatgtgccagaccaaacactcgccctgggccgatggcacaccctgcgggcccgcacaggcctgcatgggtggtcgctgcctccacatggaccagctccaggacttcaatattccacaggctggtggctggggtccttggggaccatggggtgactgctctcggacctgtgggggtggtgtccagttctcctcccgagactgcacgaggcctgtcccccggaatggtggcaagtactgtgagggccgccgtacccgcttccgctcctgcaacactgaggactgcccaactggctcagccctgaccttccgcgaggagcagtgtgctgcctacaaccaccgcaccgacctcttcaagagcttcccagggcccatggactgggttcctcgctacacaggcgtggccccccaggaccagtgcaaactcacctgccaggcccgggcactgggctactactatgtgctggagccacgggtggtagatgggaccccctgttccccggacagctcctcggtctgtgtccagggccgatgcatccatgctggctgtgatcgcatcattggctccaagaagaagtttgacaagtgcatggtgtgcggaggggacggttctggttgcagcaagcagtcaggctccttcaggaaattcaggtacggatacaacaatgtggtcactatccccgcgggggccacccacattcttgtccggcagcagggaaaccctggccaccggagcatctacttggccctgaagctgccagatggctcctatgccctcaatggtgaatacacgctgatgccctcccccacagatgtggtactgcctggggcagtcagcttgcgctacagcggggccactgcagcctcagagacactgtcaggccatgggccactggcccagcctttgacactgcaagtcctagtggctggcaacccccaggacacacgcctccgatacagcttcttcgtgccccggccgaccccttcaacgccacgccccactccccaggactggctgcaccgaagagcacagattctggagatccttcggcggcgcccctgggcgggcaggaaataacctcactatcccggctgccctttctgggcaccggggcctcggacttagctgggagaaagagagagcttctgttgctgcctcatgctaagactcagtggggaggggctgtgggcgtgagacctgcccctcctctctgccctaatgcgcaggctggccctgccctggtttcctgccctgggaggcagtgatgggttagtggatggaaggggctgacagacagccctccatctaaactgccccctctgccctgcgggtcacaggagggagggggaaggcagggagggcctgggccccagttgtatttatttagtatttattcacttttatttagcaccagggaaggggacaaggactagggtcctggggaacctgacccctgacccctcatagccctcaccctggggctaggaaatccagggtggtggtgataggtataagtggtgtgtgtatgcgtgtgtgtgtgtgtgtgaaaatgtgtgtgtgcttatgtatgaggtacaacctgttctgctttcctcttcctgaattttattttttgggaaaagaaaagtcaagggtagggtgggccttcagggagtgagggattatctttttttttttttctttctttctttcttttttttttttgagacagaatctcgctctgtcgcccaggctggagtgcaatggcacaatctcggctcactgcatcctccgcctcccgggttcaagtgattctcatgcctcagcctcctgagtagctgggattacaggctcctgccaccacgcccngctaatttttgttttgttttgtttggagacagagtctcgctattgtcaccagggctggaatgatttcagctcactgcaaccttcgccacctgggttccagcaattctcctgcctcagcctcccgagtagctgagattataggcacctaccaccacgcccggctaatttttgtatttttagtagagacggggtttcaccatgttggccaggctggtctcgaactcctgaccttaggtgatccactcgccttcatctcccaaagtgctgggattacaggcgtgagccaccgtgcctggccacgcccaactaatttttgtatttttagtagagacagggtttcaccatgttggccaggctgctcttgaactcctgacctcaggtaatcgacctgcctcggcctcccaaagtgctgggattacaggtgtgagccaccacgcccggtacatattttttaaattgaattctactatttatgtgatccttttggagtcagacagatgtggttgcatcctaactccatgtctctgagcattagatttctcatttgccaataataatacctcccttagaagtttgttgtgaggattaaataatgtaaataaagaactagcataacactca

SEQ ID NO: 311395 - DNA, 1786 bp, Homo sapiens
aggctggggagaacccacagggagacccacagacacatatgcacgagagagacagaggaggaaagagacagagacaaaggcacagcggaagaaggcagagacagggcaggcacagaagcggcccagacagagtcctacagagggagaggccagagaagctgcagaagacacaggcagggagagacaaagatccaggaaaggagggctcaggaggagagtttggagaagccagacccctgggcacctctcccaagcccaaggactaagttttctccatttcctttaacggtcctcagcccttctgaaaactttgcctctgaccttggcaggagtccaagcccccaggctacagagaggagctttccaaagctagggtgtggaggacttggtgccctagacggcctcagtccctcccagctgcagtaccagtgccatgtcccagacaggctcgcatcccgggaggggcttggcagggcgctggctgtggggagcccaaccctgcctcctgctccccattgtgccgctctcctggctggtgtggctgcttctgctactgctggcctctctcctgccctcagcccggctggccagccccctcccccgggaggaggagatcgtgtttccagagaagctcaacggcagcgtcctgcctggctcgggcgcccctgccaggctgttgtgccgcttgcaggcctttggggagacgctgctactagagctggagcaggactccggtgtgcaggtcgaggggctgacagtgcagtacctgggccaggcgcctgagctgctgggtggagcagagcctggcacctacctgactggcaccatcaatggagatccggagtcggtggcatctctgcactgggatgggggagccctgttaggcgtgttacaatatcggggggctgaactccacctccagcccctggagggaggcacccctaactctgctgggggacctggggctcacatcctacgccggaagagtcctgccagcggtcaaggtcccatgtgcaacgtcaaggctcctcttggaagccccagccccagaccccgaagagccaagcgctttgcttcactgagtagatttgtggagacactggtggtggcagatgacaagatggccgcattccacggtgcggggctaaagcgctacctgctaacagtgatggcagcagcagccaaggccttcaagcacccaagcatccgcaatcctgtcagcttggtggtgactcggctagtgatcctggggtcaggcgaggaggggccccaagtggggcccagtgctgcccagaccctgcgcagcttctgtgcctggcagcggggcctcaacacccctgaggactcggaccctgaccactttgacacagccattctgtttacccgtcaggacctgtgtggagtctccacttgcgacacgctgggtatggctgatgtgggcaccgtctgtgacccggctcggagctgtgccattgtggaggatgatgggctccagtcagccttcactgctgctcatgaactgggtcatgtcttcaacatgctccatgacaactccaagccatgcatcagtttgaatgggcctttgagcacctctcgccatgtcatggcccctgtgatggctcatgtggatcctgaggagccctggtccccctgcagtgcccgcttcatcactgacttcctggacaatggctatgggcactgtctcttagacaaaccagaggctccattgcatctgcctgtgactttccccgaacgctgtaaactgggatcctctaagtcagctaat

SEQ ID NO: 311396 - DNA, 576 bp, Homo sapiens
taaccttcctgtcttggactattgcacctgtgtccatttattcatatcttcaaggttttatttctatcatagattagttacactgttcccattaatgtcattcttagtaaaatacctaccaatagaagaatgattgaataaacattcatagaataccctaaaaccaaagaaagaatgaagatgatttctatgtgttggtatgggagtgatctctctaagatacatcattaaagtgacaacgacaatattaaaaaaatacagtatgctactactttctgtgtaagagaggaagtaataatacataaagctactggcttttttcggaaaaaaaaaaagaaaagaaaagaaaaccagaaggataaactgaaattaattaaaaatgattacctatgagagacagagaatgggataagaaataggaagaattttaatagttttctagttaatttttacgtttaaatcaaattcaaaagataaaactgagcaaaaatgagtatttctaactttttaatatttatattttgcgtggactctcactttggttgttattcaaagtggttattacataatttcggt

SEQ ID NO: 311397 - DNA, 3438 bp, Homo sapiens
ttgtccggccctatatccggtgtccgcccgccctcggctcctccgccgtgatgctgtcccgatcccgctgtgtgtctcgggcgttcagccgctcgctctccgccttccagaagcattaacaacagtgtcttcagtgttcgctttttcagaactacagctgtatgcaaggatgacttggttacagtcaaaaccccagcgtttgcagaatctgtcacagagggagatgtcaggtgggagaaagctgttggagacacagttgcagaagatgaagtggtttgtgagattgaaactgacaagacatctgtgcaggttccatcaccagcaaatggcgtgattgaagctcttttggtacctgatgggggaaaagtcgaaggaggcactccacttttcacactcaggaaaactggtgctgctcctgctaaggccaagccggctgaagctcctgctgctgcagccccaaaagcagaacctacagcagcggcagttcctccccctgcagcacccatacccactcagatgccaccggtgccctcgccctcacaacctccttctggcaaacctgtgtctgcagtaaaacccactgttgccccaccactagctgagccaggagctggcaaaggtctgcgttcagaacatcgggagaaaatgaacaggatgcggcagcgcattgctcagcgtctgaaggaggcccagaatacatgtgcaatgctgacaacttttaatgagattgacatgagtaacatccaggagatgagggctcggcacaaagaggcttttttgaagaaacataacctcaaactaggcttcatgtcggcatttgtgaaggcctcagcctttgccttgcaggaacagcctgttgtaaatgcagtgattgacgacacaaccaaagaggtggtgtatagggattatattgacatcagtgttgcagtggccaccccacggggtctggtggttccagtcatcaggaatgtggaagctatgaattttgcagatattgaacggaccatcactgaactgggagagaaggcccgaaagaatgaacttgccattgaagatatggatggcggtaccttcaccattagcaatggaggcgtttttggctcgctctttggaacacccattatcaacccccctcagtctgccatcctggggatgcatggcatctttgacaggccagtggctataggaggcaaggtagaggtgcggcccatgatgtacgtggcactgacctatgatcaccggctgattgatggcagagaggctgtgactttcctccgcaaaatcaaggcagcggtagaggatcccagagtcctcctcctggatctttaggaggaacccacacaccctacaagttgatcatgcaggaactgaaaaccagtcttctccctgtcccctcatgggtcccgggttagcctggtgacaggcagacacatgctgttggcctcaagcaaggaagcagagcactgtgtaaccagcagtcacaggtcttttcttggcgttcctgccaggctctccctctctgcacctgtctcatagcctcgaatatcttaattccttaggcttaagagagagagccttaatggatgctcattcatattcctgcctttcttccatcagctctctgcaaagatgattttgcttctccctagtgctggtatactatagagaaacccccggggaccatgtgattaagttcctatcttttgaaagtttgttctgcagagacttctaggaggatgctgtgcctcccaagctcagagcagcctctgtcctggctgtgcacattctcccttgattccacttgtgtggagggattgaacacaggcaaagaggtgctgctttgcttcttcaatggcaccttcattctccgttgtcattgacttcaagatgcctcttctacctcttccaggaagcacaggccaggggatctgggtgtgtgagtgggaggagagggcagaggtcccctgaggtcatgcattgtaatcatcatagaaggagagcccaggcctgccctcacgctctccatcataggctgacaccaagaagactcgtcttggcacaatctcacacagctggggctgtagcaaccctttccaacccctttgctggttgctgggcctcattctagcaccttgttcttagagcagattctagcacatcatggcagtgggaccaagcgtggtcccgaggaagggccagagcctggtagagactagggaagggaggtctcctctagactgactcacattgccttgagcttttcagttaagttgctgtaagcacctgggctgaggaggcagtttttgttccttcctgcgttatagcggggccttgtctcttcctctgcaggacacagatctggaggacgtggactggggtaggaaaccaccctgagggtgttagtacctagtggtgaaacggatgaggtcatttctaaggtgtgttgcccgtggatctgggcacaatcattggaattccttggagccactgggattcatggctttgtatccaactgcatccaggcctgaggctgctgacgtttgacaccagggccagtagagagtgcccttttgtatcttaagccaagaagtgaggcctgggggtgggggaggggggaaggggtgggagccaatactgagtgcctgcagcatctactactctgtcttcactattcagaacttgtaactaaagtatttaaagaaactgattttaaatgcaaattaaagggcagatattctcaaacagggttcctgtatctgttccttttggctactgaggtggtacaagtccccagcactgttgcactgaaattattgaaagccactcaaggtcctgttgcttattttgtgaaatcagaaatcccttatgtggaacttaacactcataatttgacagaaggtagaaccctgactgccagccgggaaagtgttgccaaaaagagtcaacctctgtaaaaatatttgaagagatttattctgagccaagtgtgagtgactgatggcctgtgatacaactcttaggagatcctgagaacatgtgtccagggtcgtctggctacaacttagttttatacatttaatacattttagggagacataagataccagtcagtacatgtaagatgtacagtggtttggtctggagaggcaggacagctcaagacctggggatgttgtcataggcagaatcaaagattttctgattggcaattggttgaaagagttattatctaaagacctggaatcaatagaaaggaatgtctgggttacagtaaggggttgtggagaccaaggttttatgcagatgaagcctccagccagcaggcttcagagaaaatagattgtaaatgcttctcatcagacttaaggagcctgttttaacagtaattccaaaagggaggggagtataatgaggaatggctggctccctcttcccacc

SEQ ID NO: 311398 - DNA, 2259 bp, Homo sapiens
  misc_feature (1380)..(1380): n is a, c, g, or t
  misc_feature (1495)..(1495): n is a, c, g, or t
  misc_feature (1596)..(1596): n is a, c, g, or t
ggctttcaccatgttggccaggatggttttgatctgttgaccttgtgatccgcctgccttggcctcccaaggggagtaatcccttggcctgtaatcctgggattacaggcgtgagcaactgcacccagcctattttttaatagtattcttgcatatataatgttaaaatagaggatgaagagtatcagtaattagaaatatgttatgtatgcatttcaatattttaaattgcctaggtgttttttttccttggaagtttacattttcttgggcttgataggtgctttgaaagtacttgctgaatttattcagtggaaacctgtgaaattgggaagggagctaagttgagccagttatctgatggacatttagggaccctgaggactagagaatagtgccttatgtcattgtgtgtgtgtctcatagtgctttgcatattgctgatacccagtagacattcgttacttgattggagctagagtttttgccactaaattttgcttggttgcttctcatttcagacagtgccagtggcatatacttttcttgtttttcagctgctcctgctaaggccaagccggctgaagctcctgctgctgcagccccaaaagcagaacctacagcagcggcagttcctccccctgcagcacccatacccactcagatgccaccggtgccctcgccctcacaacctccttctggcaaacctggtaggcttccaactcccacatgtcatgtgggagaacatctcgtctaatatgttccttcaaagggtaaactctagactgatgatggttctgaacaggccaggttggctgctttgtagaaagaattctagactttgtatccaaaggcctgctttgcatctcagctttctgttactagctgtgtgtctttaggctagtcacttaatttatctgaacagattgttcatctgtgaagttggagtgatactaatatacctcagaatatcttgaagattaagtaacagtacatatgaaagcactggcacaaactcagcagatgtttctttccttgtctgatgcagctttatcctcttttcattttcagtgtctgcagtaaaacccactgttgccccaccactagctgagccaggagctggcaaaggtctgcgttcagaacatcgggtaagctctgaggaccactttcaggaaagaggcagggggcagtgttgagattagtggagtatgggtgtggtgatgcctacctttgaatgcctggcagctcattccctcaaccttgataaagggagtttaggatataacttcttcatagtcacataaccatcaaatgataggactagaacctgaggtcttctgaacacttgttcagtggttttcctactatattatgctaccngtgaaagccttgggtaagttaaatatttgtaggggtggtagcttagtaactcaccccgtcctccacgatgtcacacgttcagagaggtggtttagtgagctctattcctatactnctgggatacttagctgtagctaagggataatactcagtagcaatagctgtcaggtgcagacataaagcctcaaggaagtatggtcaggattgtggttcctntgcctgagaatacttcctaaaaatatgatagcctcgaaagtttgttgctcatgaggttctgttccacaaatagctattcttatgcaaatctttatcaacagaaagtgccctttttcttatgattcttatgttggctagactacactacactacattcttttataaatgggttttggtttttaaatcactgtttctgagccttcattcttggtcaagctttaggcacatctgagtgagtagttttggcctgtgtttgcatgtttttgcttggaggagaaagggccaccacaggaaagggaagcctggagctcgtgtacttagatactgtagtccttggccatctactcgtggcaagccgtgttctttctgactacacggggaatgcttgacccagagagatcagattgtcaatgcttgttccactcttactttcaggagaaaatgaacaggatgcggcagcgcattgctcagcgtctgaaggaggcccagaatacatgtgcaatgctgacaacttttaatgagattgacatgaggtagtgtctctagtccctcttatcccctaggcccctttttcttagagaacacgaacttgccccactccttatctagtgctgattctaaaactaacttgtcagggaagaggtatttgtttattgttttttg

SEQ ID NO: 311399 - DNA, 2823 bp, Homo sapiens
ttgtccggccctatatccggtgtccgcccgccctcggctcctccgccgtgatgctgtcccgatcccgctgtgtgtctcgggcgttcagccgctcgctctccgccttccagaaggggaactgccctctagggagacgttccctgcctggggtctccttatgccagggaccaggttaccctaacagcaggaaggttgtcattaacaacagtgtcttcagtgttcgctttttcagaactacagctgtatgcaaggatgacttggttacagtcaaaaccccagcgtttgcagaatctgtcacagagggagatgtcaggtgggagaaagctgttggagacacagttgcagaagatgaagtggtttgtgagattgaaactgacaagacatctgtgcaggttccatcaccagcaaatggcgtgattgaagctcttttggtacctgatgggggaaaagtcgaaggaggcactccacttttcacactcaggaaaactggtgctgctcctgctaaggccaagccggctgaagctcctgctgctgcagccccaaaagcagaacctacagcagcggcagttcctccccctgcagcacccatacccactcagatgccaccggtgccctcgccctcacaacctccttctggcaaacctgtgtctgcagtaaaacccactgttgccccaccactagctgagccaggagctggcaaaggtctgcgttcagaacatcgggagaaaatgaacaggatgcggcagcgcattgctcagcgtctgaaggaggcccagaatacatgtgcaatgctgacaacttttaatgagattgacatgagtaacatccaggagatgagggctcggcacaaagaggcttttttgaagaaacataacctcaaactaggcttcatgtcggcatttgtgaaggcctcagcctttgccttgcaggaacagcctgttgtaaatgcagtgattgacgacacaaccaaagaggtggtgtatagggattatattgacatcagtgttgcagtggccaccccacggggtctggtggttccagtcatcaggaatgtggaagctatgaattttgcagatattgaacggaccatcactgaactgggagagaaggcccgaaagaatgaacttgccattgaagatatggatggcggtaccttcaccattagcaatggaggcgtttttggctcgctctttggaacacccattatcaacccccctcagtctgccatcctggggatgcatggcatctttgacaggccagtggctataggaggcaaggtagaggtgcggcccatgatgtacgtggcactgacctatgatcaccggctgattgatggcagagaggctgtgactttcctccgcaaaatcaaggcagcggtagaggatcccagagtcctcctcctggatctttaggaggaacccacacaccctacaagttgatcatgcaggaactgaaaaccagtcttctccctgtcccctcatgggtcccgggttagcctggtgacaggcagacacatgctgttggcctcaagcaaggaagcagagcactgtgtaaccagcagtcacaggtcttttcttggcgttcctgccaggctctccctctctgcacctgtctcatagcctcgaatatcttaattccttaggcttaagagagagagccttaatggatgctcattcatattcctgcctttcttccatcagctctctgcaaagatgattttgcttctccctagtgctggtatactatagagaaacccccggggaccatgtgattaagttcctatcttttgaaagtttgttctgcagagacttctaggaggatgctgtgcctcccaagctcagagcagcctctgtcctggctgtgcacattctcccttgattccacttgtgtggagggattgaacacaggcaaagaggtgctgctttgcttcttcaatggcaccttcattctccgttgtcattgacttcaagatgcctcttctacctcttccaggaagcacaggccaggggatctgggtgtgtgagtgggaggagagggcagaggtcccctgaggtcatgcattgtaatcatcatagaaggagagcccaggcctgccctcacgctctccatcataggctgacaccaagaagactcgtcttggcacaatctcacacagctggggctgtagcaaccctttccaacccctttgctggttgctgggcctcattctagcaccttgttcttagagcagattctagcacatcatggcagtgggaccaagcgtggtcccgaggaagggccagagcctggtagagactagggaagggaggtctcctctagactgactcacattgccttgagcttttcagttaagttgctgtaagcacctgggctgaggaggcagtttttgttccttcctgcgttatagcggggccttgtctcttcctctgcaggacacagatctggaggacgtggactggggtaggaaaccaccctgagggtgttagtacctagtggtgaaacggatgaggtcatttctaaggtgtgttgcccgtggatctgggcacaatcattggaattccttggagccactgggattcatggctttgtatccaactgcatccaggcctgaggctgctgacgtttgacaccagggccagtagagagtgcccttttgtatcttaagccaagaagtgaggcctgggggtgggggaggggggaaggggtgggagccaatactgagtgcctgcagcatctactactctgtcttcactattcagaacttgtaactaaagtatttaaagaaactgattttaaatgcaaattaaagggcagatattctca

SEQ ID NO: 311400 - DNA, 642 bp, Homo sapiens
atgtcaaagactcttgtcattccagctgcccttagttgagggaataaggggtaaatttatatatagtgtgaacttcaaatgtcaaattctaaaagaaaagtgtattttttaaaaaataaaccttatactctgttctttccatgggtgtttcttagcaggagctgagaaactggaccttttcttatagatatacagattgagcatacctaatctgaaaattcaaaatctgaaatgctccaaaactgaaaatccaaaatctgaaatgcttcaaaactttttgagcactgacagaatgctcaaaggaaatgctcattgtcttttatggggaattcagtgttgtttcttttcacatctgttctctcatatctctaggaagggttggtatttcttttgggaagaaatgagaaacgaatttgtactggacctgataggattagagattaataactttatctgactcttagttaaattttataaccactaaaaagtctatttctttttcctaagcgagaatcgtacccgtagaccaacgagtcacagaagtctatttctttttcactgttacactaataaggcagatagaccgcatgattgaggttagtcaggcaagaccagaagctcagagtagaaaacatgtatggt

SEQ ID NO: 311401 - DNA, 388 bp, Homo sapiens
aaccctttccaacccctttgctggttgctgggcctcattctagcaccttgttcttagagcagattctagctgagccaggagctggcaaaggtctgcgttcagaacatcgggagaaaatgaacaggatgcggcagcgcattgctcagcgtctgaaggaggcccagaatacatgtgcaatgtgctgacgtttgacaccagggccagtagagagtgcccttttgtatcttaagccaagaagtgaggcctgggggtgggggaggggggaaggggtgggagccaatactgagtgcctgcagcatctactactctgtcttcactattcagaacttgtaactaaagtatttaaagaaactgattttaaatgcaaattaaagggcagatattctca

SEQ ID NO: 311402 - DNA, 3521 bp, Homo sapiens
ttgtccggccctatatccggtgtccgcccgccctcggctcctccgccgtgatgctgtcccgatcccgctgtgtgtctcgggcgttcagccgctcgctctccgccttccagaaggggaactgccctctagggagacgttccctgcctggggtctccttatgccagggaccaggttaccctaacagcaggaaggttgtcattaacaacagtgtcttcagtgttcgctttttcagaactacagctgtatgcaaggatgacttggttacagtcaaaaccccagcgtttgcagaatctgtcacagagggagatgtcaggtgggagaaagctgttggagacacagttgcagaagatgaagtggtttgtgagattgaaactgacaagacatctgtgcaggttccatcaccagcaaatggcgtgattgaagctcttttggtacctgatgggggaaaagtcgaaggaggcactccacttttcacactcaggaaaactggtgctgctcctgctaaggccaagccggctgaagctcctgctgctgcagccccaaaagcagaacctacagcagcggcagttcctccccctgcagcacccatacccactcagatgccaccggtgccctcgccctcacaacctccttctggcaaacctgtgtctgcagtaaaacccactgttgccccaccactagctgagccaggagctggcaaaggtctgcgttcagaacatcgggagaaaatgaacaggatgcggcagcgcattgctcagcgtctgaaggaggcccagaatacatgtgcaatgctgacaacttttaatgagattgacatgagtaacatccaggagatgagggctcggcacaaagaggcttttttgaagaaacataacctcaaactaggcttcatgtcggcatttgtgaaggcctcagcctttgccttgcaggaacagcctgttgtaaatgcagtgattgacgacacaaccaaagaggtggtgtatagggattatattgacatcagtgttgcagtggccaccccacggggtctggtggttccagtcatcaggaatgtggaagctatgaattttgcagatattgaacggaccatcactgaactgggagagaaggcccgaaagaatgaacttgccattgaagatatggatggcggtaccttcaccattagcaatggaggcgtttttggctcgctctttggaacacccattatcaacccccctcagtctgccatcctggggatgcatggcatctttgacaggccagtggctataggaggcaaggtagaggtgcggcccatgatgtacgtggcactgacctatgatcaccggctgattgatggcagagaggctgtgactttcctccgcaaaatcaaggcagcggtagaggatcccagagtcctcctcctggatctttaggaggaacccacacaccctacaagttgatcatgcaggaactgaaaaccagtcttctccctgtcccctcatgggtcccgggttagcctggtgacaggcagacacatgctgttggcctcaagcaaggaagcagagcactgtgtaaccagcagtcacaggtcttttcttggcgttcctgccaggctctccctctctgcacctgtctcatagcctcgaatatcttaattccttaggcttaagagagagagccttaatggatgctcattcatattcctgcctttcttccatcagctctctgcaaagatgattttgcttctccctagtgctggtatactatagagaaacccccggggaccatgtgattaagttcctatcttttgaaagtttgttctgcagagacttctaggaggatgctgtgcctcccaagctcagagcagcctctgtcctggctgtgcacattctcccttgattccacttgtgtggagggattgaacacaggcaaagaggtgctgctttgcttcttcaatggcaccttcattctccgttgtcattgacttcaagatgcctcttctacctcttccaggaagcacaggccaggggatctgggtgtgtgagtgggaggagagggcagaggtcccctgaggtcatgcattgtaatcatcatagaaggagagcccaggcctgccctcacgctctccatcataggctgacaccaagaagactcgtcttggcacaatctcacacagctggggctgtagcaaccctttccaacccctttgctggttgctgggcctcattctagcaccttgttcttagagcagattctagcacatcatggcagtgggaccaagcgtggtcccgaggaagggccagagcctggtagagactagggaagggaggtctcctctagactgactcacattgccttgagcttttcagttaagttgctgtaagcacctgggctgaggaggcagtttttgttccttcctgcgttatagcggggccttgtctcttcctctgcaggacacagatctggaggacgtggactggggtaggaaaccaccctgagggtgttagtacctagtggtgaaacggatgaggtcatttctaaggtgtgttgcccgtggatctgggcacaatcattggaattccttggagccactgggattcatggctttgtatccaactgcatccaggcctgaggctgctgacgtttgacaccagggccagtagagagtgcccttttgtatcttaagccaagaagtgaggcctgggggtgggggaggggggaaggggtgggagccaatactgagtgcctgcagcatctactactctgtcttcactattcagaacttgtaactaaagtatttaaagaaactgattttaaatgcaaattaaagggcagatattctcaaacagggttcctgtatctgttccttttggctactgaggtggtacaagtccccagcactgttgcactgaaattattgaaagccactcaaggtcctgttgcttattttgtgaaatcagaaatcccttatgtggaacttaacactcataatttgacagaaggtagaaccctgactgccagccgggaaagtgttgccaaaaagagtcaacctctgtaaaaatatttgaagagatttattctgagccaagtgtgagtgactgatggcctgtgatacaactcttaggagatcctgagaacatgtgtccagggtcgtctggctacaacttagttttatacatttaatacattttagggagacataagataccagtcagtacatgtaagatgtacagtggtttggtctggagaggcaggacagctcaagacctggggatgttgtcataggcagaatcaaagattttctgattggcaattggttgaaagagttattatctaaagacctggaatcaatagaaaggaatgtctgggttacagtaaggggttgtggagaccaaggttttatgcagatgaagcctccagccagcaggcttcagagaaaatagattgtaaatgcttctcatcagacttaaggagcctgttttaacagtaattccaaaagggaggggagtataatgaggaatggctggctccctcttcccacc

SEQ ID NO: 311403 - DNA, 3472 bp, Homo sapiens
ttgtccggccctatatccggtgtccgcccgccctcggctcctccgccgtgatgctgtcccgatcccgctgtgtgtctcgggcgttcagccgctcgctctccgccttccagaaggggaactgccctctagggagacgttccctgcctgcattaacaacagtgtcttcagtgttcgctttttcagaactacagctgtatgcaaggatgacttggttacagtcaaaaccccagcgtttgcagaatctgtcacagagggagatgtcaggtgggagaaagctgttggagacacagttgcagaagatgaagtggtttgtgagattgaaactgacaagacatctgtgcaggttccatcaccagcaaatggcgtgattgaagctcttttggtacctgatgggggaaaagtcgaaggaggcactccacttttcacactcaggaaaactggtgctgctcctgctaaggccaagccggctgaagctcctgctgctgcagccccaaaagcagaacctacagcagcggcagttcctccccctgcagcacccatacccactcagatgccaccggtgccctcgccctcacaacctccttctggcaaacctgtgtctgcagtaaaacccactgttgccccaccactagctgagccaggagctggcaaaggtctgcgttcagaacatcgggagaaaatgaacaggatgcggcagcgcattgctcagcgtctgaaggaggcccagaatacatgtgcaatgctgacaacttttaatgagattgacatgagtaacatccaggagatgagggctcggcacaaagaggcttttttgaagaaacataacctcaaactaggcttcatgtcggcatttgtgaaggcctcagcctttgccttgcaggaacagcctgttgtaaatgcagtgattgacgacacaaccaaagaggtggtgtatagggattatattgacatcagtgttgcagtggccaccccacggggtctggtggttccagtcatcaggaatgtggaagctatgaattttgcagatattgaacggaccatcactgaactgggagagaaggcccgaaagaatgaacttgccattgaagatatggatggcggtaccttcaccattagcaatggaggcgtttttggctcgctctttggaacacccattatcaacccccctcagtctgccatcctggggatgcatggcatctttgacaggccagtggctataggaggcaaggtagaggtgcggcccatgatgtacgtggcactgacctatgatcaccggctgattgatggcagagaggctgtgactttcctccgcaaaatcaaggcagcggtagaggatcccagagtcctcctcctggatctttaggaggaacccacacaccctacaagttgatcatgcaggaactgaaaaccagtcttctccctgtcccctcatgggtcccgggttagcctggtgacaggcagacacatgctgttggcctcaagcaaggaagcagagcactgtgtaaccagcagtcacaggtcttttcttggcgttcctgccaggctctccctctctgcacctgtctcatagcctcgaatatcttaattccttaggcttaagagagagagccttaatggatgctcattcatattcctgcctttcttccatcagctctctgcaaagatgattttgcttctccctagtgctggtatactatagagaaacccccggggaccatgtgattaagttcctatcttttgaaagtttgttctgcagagacttctaggaggatgctgtgcctcccaagctcagagcagcctctgtcctggctgtgcacattctcccttgattccacttgtgtggagggattgaacacaggcaaagaggtgctgctttgcttcttcaatggcaccttcattctccgttgtcattgacttcaagatgcctcttctacctcttccaggaagcacaggccaggggatctgggtgtgtgagtgggaggagagggcagaggtcccctgaggtcatgcattgtaatcatcatagaaggagagcccaggcctgccctcacgctctccatcataggctgacaccaagaagactcgtcttggcacaatctcacacagctggggctgtagcaaccctttccaacccctttgctggttgctgggcctcattctagcaccttgttcttagagcagattctagcacatcatggcagtgggaccaagcgtggtcccgaggaagggccagagcctggtagagactagggaagggaggtctcctctagactgactcacattgccttgagcttttcagttaagttgctgtaagcacctgggctgaggaggcagtttttgttccttcctgcgttatagcggggccttgtctcttcctctgcaggacacagatctggaggacgtggactggggtaggaaaccaccctgagggtgttagtacctagtggtgaaacggatgaggtcatttctaaggtgtgttgcccgtggatctgggcacaatcattggaattccttggagccactgggattcatggctttgtatccaactgcatccaggcctgaggctgctgacgtttgacaccagggccagtagagagtgcccttttgtatcttaagccaagaagtgaggcctgggggtgggggaggggggaaggggtgggagccaatactgagtgcctgcagcatctactactctgtcttcactattcagaacttgtaactaaagtatttaaagaaactgattttaaatgcaaattaaagggcagatattctcaaacagggttcctgtatctgttccttttggctactgaggtggtacaagtccccagcactgttgcactgaaattattgaaagccactcaaggtcctgttgcttattttgtgaaatcagaaatcccttatgtggaacttaacactcataatttgacagaaggtagaaccctgactgccagccgggaaagtgttgccaaaaagagtcaacctctgtaaaaatatttgaagagatttattctgagccaagtgtgagtgactgatggcctgtgatacaactcttaggagatcctgagaacatgtgtccagggtcgtctggctacaacttagttttatacatttaatacattttagggagacataagataccagtcagtacatgtaagatgtacagtggtttggtctggagaggcaggacagctcaagacctggggatgttgtcataggcagaatcaaagattttctgattggcaattggttgaaagagttattatctaaagacctggaatcaatagaaaggaatgtctgggttacagtaaggggttgtggagaccaaggttttatgcagatgaagcctccagccagcaggcttcagagaaaatagattgtaaatgcttctcatcagacttaaggagcctgttttaacagtaattccaaaagggaggggagtataatgaggaatggctggctccctcttcccacc

SEQ ID NO: 311404 - DNA, 3586 bp, Homo sapiens
ggctttcaccatgttggccaggatggttttgatctgttgaccttgtgatccgcctgccttggcctcccaaggggagtaatcccttggcctgtaatcctgggattacaggcgtgagcaactgcacccagcctattttttaatagtattcttgcatatataatgttaaaatagaggatgaagagtatcagtaattagaaatatgttatgtatgcatttcaatattttaaattgcctaggtgttttttttccttggaagtttacattttcttgggcttgataggtgctttgaaagtacttgctgaatttattcagtggaaacctgtgaaattgggaagggagctaagttgagccagttatctgatggacatttagggaccctgaggactagagaatagtgccttatgtcattgtgtgtgtgtctcatagtgctttgcatattgctgatacccagtagacattcgttacttgattggagctagagtttttgccactaaattttgcttggttgcttctcatttcagacagtgccagtggcatatacttttcttgtttttcagctgctcctgctaaggccaagccggctgaagctcctgctgctgcagccccaaaagcagaacctacagcagcggcagttcctccccctgcagcacccatacccactcagatgccaccggtgccctcgccctcacaacctccttctggcaaacctgtgtctgcagtaaaacccactgttgccccaccactagctgagccaggagctggcaaaggtctgcgttcagaacatcgggagaaaatgaacaggatgcggcagcgcattgctcagcgtctgaaggaggcccagaatacatgtgcaatgctgacaacttttaatgagattgacatgagtaacatccaggagatgagggctcggcacaaagaggcttttttgaagaaacataacctcaaactaggcttcatgtcggcatttgtgaaggcctcagcctttgccttgcaggaacagcctgttgtaaatgcagtgattgacgacacaaccaaagaggtggtgtatagggattatattgacatcagtgttgcagtggccaccccacggggtctggtggttccagtcatcaggaatgtggaagctatgaattttgcagatattgaacggaccatcactgaactgggagagaaggcccgaaagaatgaacttgccattgaagatatggatggcggtaccttcaccattagcaatggaggcgtttttggctcgctctttggaacacccattatcaacccccctcagtctgccatcctggggatgcatggcatctttgacaggccagtggctataggaggcaaggtagaggtgcggcccatgatgtacgtggcactgacctatgatcaccggctgattgatggcagagaggctgtgactttcctccgcaaaatcaaggcagcggtagaggatcccagagtcctcctcctggatctttaggaggaacccacacaccctacaagttgatcatgcaggaactgaaaaccagtcttctccctgtcccctcatgggtcccgggttagcctggtgacaggcagacacatgctgttggcctcaagcaaggaagcagagcactgtgtaaccagcagtcacaggtcttttcttggcgttcctgccaggctctccctctctgcacctgtctcatagcctcgaatatcttaattccttaggcttaagagagagagccttaatggatgctcattcatattcctgcctttcttccatcagctctctgcaaagatgattttgcttctccctagtgctggtatactatagagaaacccccggggaccatgtgattaagttcctatcttttgaaagtttgttctgcagagacttctaggaggatgctgtgcctcccaagctcagagcagcctctgtcctggctgtgcacattctcccttgattccacttgtgtggagggattgaacacaggcaaagaggtgctgctttgcttcttcaatggcaccttcattctccgttgtcattgacttcaagatgcctcttctacctcttccaggaagcacaggccaggggatctgggtgtgtgagtgggaggagagggcagaggtcccctgaggtcatgcattgtaatcatcatagaaggagagcccaggcctgccctcacgctctccatcataggctgacaccaagaagactcgtcttggcacaatctcacacagctggggctgtagcaaccctttccaacccctttgctggttgctgggcctcattctagcaccttgttcttagagcagattctagcacatcatggcagtgggaccaagcgtggtcccgaggaagggccagagcctggtagagactagggaagggaggtctcctctagactgactcacattgccttgagcttttcagttaagttgctgtaagcacctgggctgaggaggcagtttttgttccttcctgcgttatagcggggccttgtctcttcctctgcaggacacagatctggaggacgtggactggggtaggaaaccaccctgagggtgttagtacctagtggtgaaacggatgaggtcatttctaaggtgtgttgcccgtggatctgggcacaatcattggaattccttggagccactgggattcatggctttgtatccaactgcatccaggcctgaggctgctgacgtttgacaccagggccagtagagagtgcccttttgtatcttaagccaagaagtgaggcctgggggtgggggaggggggaaggggtgggagccaatactgagtgcctgcagcatctactactctgtcttcactattcagaacttgtaactaaagtatttaaagaaactgattttaaatgcaaattaaagggcagatattctcaaacagggttcctgtatctgttccttttggctactgaggtggtacaagtccccagcactgttgcactgaaattattgaaagccactcaaggtcctgttgcttattttgtgaaatcagaaatcccttatgtggaacttaacactcataatttgacagaaggtagaaccctgactgccagccgggaaagtgttgccaaaaagagtcaacctctgtaaaaatatttgaagagatttattctgagccaagtgtgagtgactgatggcctgtgatacaactcttaggagatcctgagaacatgtgtccagggtcgtctggctacaacttagttttatacatttaatacattttagggagacataagataccagtcagtacatgtaagatgtacagtggtttggtctggagaggcaggacagctcaagacctggggatgttgtcataggcagaatcaaagattttctgattggcaattggttgaaagagttattatctaaagacctggaatcaatagaaaggaatgtctgggttacagtaaggggttgtggagaccaaggttttatgcagatgaagcctccagccagcaggcttcagagaaaatagattgtaaatgcttctcatcagacttaaggagcctgttttaacagtaattccaaaagggaggggagtataatgaggaatggctggctccctcttcccacc

SEQ ID NO: 311405 - DNA, 1291 bp, Homo sapiens
ttgtccggccctatatccggtgtccgcccgccctcggctcctccgccgtgatgctgtcccgatcccgctgtgtgtctcgggcgttcagccgctcgctctccgccttccagaaggggaactgccctctagggagacgttccctgcctggggtctccttatgccagggaccaggttaccctaacagcaggaaggttgtcattaacaacagtgtcttcagtgttcgctttttcagaactacagctgtatgcaaggatgacttggttacagtcaaaaccccagcgtttgcagaatctgtcacagagggagatgtcaggtgggagaaagctgttggagacacagttgcagaagatgaagtggtttgtgagattgaaactgacaagacatctgtgcaggttccatcaccagcaaatggcgtgattgaagctcttttggtacctgatgggggaaaagtcgaaggaggcactccacttttcacactcaggaaaactggtgctgctcctgctaaggccaagccggctgaagctcctgctgctgcagccccaaaagcagaacctacagcagcggcagttcctccccctgcagcacccatacccactcagatgccaccggtgccctcgccctcacaacctccttctggcaaacctgtgtctgcagtaaaacccactgttgccccaccactagctgagccaggagctggcaaaggtctgcgttcagaacatcgggagaaaatgaacaggatgcggcagcgcattgctcagcgtctgaaggaggcccagaatacatgtgcaatgctgacaacttttaatgagattgacatgagtaacatccaggagatgagggctcggcacaaagaggcttttttgaagaaacataacctcaaactaggcttcatgtcggcatttgtgaaggcctcagcctttgccttgcaggaacagcctgttgtaaatgcagtgattgacgacacaaccaaagaggtggtgtatagggattatattgacatcagtgttgcagtggccaccccacggggtctggtggttccagtcatcaggaatgtggaagctatgaattttgcagatattgaacggaccatcactgaactgggagagaaggcccgaaagaatgaaacttgccttgagatatgggttggcgaccttcacattacaagggggcggttgggcgcgctttggaaacctttttaacccctcaagttgcaccgggggaggtgggcttaaagggcccgctattaggcagaaaagtgggccccattattgggacataaaccggagattga

SEQ ID NO: 311406 - DNA, 851 bp, Homo sapiens
ctgcctcccaggttcaagtgattctcctgcctcagcctcccgaatagctgggattacaggtgcccaccaccatgcctggctaagttttttgtatttttagtagagacagggtttcaccatgttggtcaggctggtctcaaactcctgacctcaggtgatctgcccacctcagcctgccacaaagtgttgggattacaggcctgagccactgcgtgagccactgcgcctggctcctctcacttcttaagtttaagtgctatctaaaattctcccctcccctcaggatagttgtagaatttatagctctgccgttttctttacatatgtactttctgctggccctgtaggaaagggttcttataacatacctgccaaaatgggttttgtggctactggaggctccccgctaacaggtagccttgtagcctttgattgtcttttcagctgttggagacacagttgcagaagatgaagtggtttgtgagattgaaactgacaagacatctgtgcaggttccatcaccagcaaatggatgaggtcatttctaaggtgtgttgcccgtggatctgggcacaatcattggaattccttggagccactgggattcatggctttgtatccaactgcatccaggcctgaggctgctgacgtttgacaccagggccagtagagagtgcccttttgtatcttaagccaagaagtgaggcctgggggtgggggaggggggaaggggtgggagccaatactgagtgcctgcagcatctactactctgtcttcactattcagaacttgtaactaaagtatttaaagaaactgattttaaatgcaaattaaagggcagatattctca

SEQ ID NO: 311407 - DNA, 877 bp, Homo sapiens
gcaagcaactatgtagcagtacgatacctggctgttatatcagtgcgaggcgccgtctgcatctttcaacgtgatgctgtcccgatcccgctgtgtgtctcgggcgttcagccgctcgctctccgccttccagaaggggaactgccctctagggagacgttccctgcctggggtctccttatgccagggaccaggttaccctaacagcaggaaggttgtcattaacaacagtgtcttcagtgttcgctttttcagaactacagctgtatgcaaggatgacttggttacagtcaaaaccccagcgtttgcagaatctgtcacagagggagatgtcaggtgggagaaagctgttggagacacagttgcagaagatgaagtggtttgtgagattgaaactgacaagacatctgtgcaggttccatcaccagcaaatggcgtgattgaagctcttttggtacctgatgggggaaaagtcgaaggaggcactccacttttcacactcaggaaaactggtgctgctcctgctaaggccaagccggctgaagctcctgctgctgcagccccaaaagcagaacctacagcagcggcagttcctccccctgcagcacccatacccactcagatgccaccggtgccctcgccctcacaacctccttctggcaaacctgtgctgacgtttgacaccagggccagtagagagtgcccttttgtatcttaagccaagaagtgaggcctgggggtgggggaggggggaaggggtgggagccaatactgagtgcctgcagcatctactactctgtcttcactattcagaacttgtaactaaagtatttaaagaaactgattttaaatgcaaattaaagggcagatattctca

SEQ ID NO: 311408 - DNA, 399 bp, Homo sapiens
cttcattggagattctatacagctaattttctaatgctggataaacatttggacttcctccatctgtcttcctcttccagacaacatctgtgcaggttccatcaccagcaaatggcgtgattgaagctcttttggtacctgatgggggaaaagtcgaaggaggcactccacttttcacactcaggaaaactggtggtaaagaagttctcctggtggtcaaggtctccagtgttccctcttgggattgggactgagcataatgtgctaattccccgatatgtcaaagactcttgtcattccagctgcccttagttgagggaataaggggtaaatttatatatagtgtgaacttcaaatgtcaaattctaaaagaaaagtgtattttttaaaaaataaacc

SEQ ID NO: 311409 - DNA, 3465 bp, Homo sapiens
ttgtccggccctatatccggtgtccgcccgccctcggctcctccgccgtgatgctgtcccgatcccgctgtgtgtctcgggcgttcagccgctcgctctccgccttccagaaggggaactgccctctagggagacgttccctgcctggggtctccttatgccagggaccaggttaccctaacagcaggaaggttgtcattaacaacagtgtcttcagtgttcgctttttcagaactacagctgtatgcaaggatgacttggttacagtcaaaaccccagcgtttgcagaatctgtcacagagggagatgtcaggtgggagaaagacatctgtgcaggttccatcaccagcaaatggcgtgattgaagctcttttggtacctgatgggggaaaagtcgaaggaggcactccacttttcacactcaggaaaactggtgctgctcctgctaaggccaagccggctgaagctcctgctgctgcagccccaaaagcagaacctacagcagcggcagttcctccccctgcagcacccatacccactcagatgccaccggtgccctcgccctcacaacctccttctggcaaacctgtgtctgcagtaaaacccactgttgccccaccactagctgagccaggagctggcaaaggtctgcgttcagaacatcgggagaaaatgaacaggatgcggcagcgcattgctcagcgtctgaaggaggcccagaatacatgtgcaatgctgacaacttttaatgagattgacatgagtaacatccaggagatgagggctcggcacaaagaggcttttttgaagaaacataacctcaaactaggcttcatgtcggcatttgtgaaggcctcagcctttgccttgcaggaacagcctgttgtaaatgcagtgattgacgacacaaccaaagaggtggtgtatagggattatattgacatcagtgttgcagtggccaccccacggggtctggtggttccagtcatcaggaatgtggaagctatgaattttgcagatattgaacggaccatcactgaactgggagagaaggcccgaaagaatgaacttgccattgaagatatggatggcggtaccttcaccattagcaatggaggcgtttttggctcgctctttggaacacccattatcaacccccctcagtctgccatcctggggatgcatggcatctttgacaggccagtggctataggaggcaaggtagaggtgcggcccatgatgtacgtggcactgacctatgatcaccggctgattgatggcagagaggctgtgactttcctccgcaaaatcaaggcagcggtagaggatcccagagtcctcctcctggatctttaggaggaacccacacaccctacaagttgatcatgcaggaactgaaaaccagtcttctccctgtcccctcatgggtcccgggttagcctggtgacaggcagacacatgctgttggcctcaagcaaggaagcagagcactgtgtaaccagcagtcacaggtcttttcttggcgttcctgccaggctctccctctctgcacctgtctcatagcctcgaatatcttaattccttaggcttaagagagagagccttaatggatgctcattcatattcctgcctttcttccatcagctctctgcaaagatgattttgcttctccctagtgctggtatactatagagaaacccccggggaccatgtgattaagttcctatcttttgaaagtttgttctgcagagacttctaggaggatgctgtgcctcccaagctcagagcagcctctgtcctggctgtgcacattctcccttgattccacttgtgtggagggattgaacacaggcaaagaggtgctgctttgcttcttcaatggcaccttcattctccgttgtcattgacttcaagatgcctcttctacctcttccaggaagcacaggccaggggatctgggtgtgtgagtgggaggagagggcagaggtcccctgaggtcatgcattgtaatcatcatagaaggagagcccaggcctgccctcacgctctccatcataggctgacaccaagaagactcgtcttggcacaatctcacacagctggggctgtagcaaccctttccaacccctttgctggttgctgggcctcattctagcaccttgttcttagagcagattctagcacatcatggcagtgggaccaagcgtggtcccgaggaagggccagagcctggtagagactagggaagggaggtctcctctagactgactcacattgccttgagcttttcagttaagttgctgtaagcacctgggctgaggaggcagtttttgttccttcctgcgttatagcggggccttgtctcttcctctgcaggacacagatctggaggacgtggactggggtaggaaaccaccctgagggtgttagtacctagtggtgaaacggatgaggtcatttctaaggtgtgttgcccgtggatctgggcacaatcattggaattccttggagccactgggattcatggctttgtatccaactgcatccaggcctgaggctgctgacgtttgacaccagggccagtagagagtgcccttttgtatcttaagccaagaagtgaggcctgggggtgggggaggggggaaggggtgggagccaatactgagtgcctgcagcatctactactctgtcttcactattcagaacttgtaactaaagtatttaaagaaactgattttaaatgcaaattaaagggcagatattctcaaacagggttcctgtatctgttccttttggctactgaggtggtacaagtccccagcactgttgcactgaaattattgaaagccactcaaggtcctgttgcttattttgtgaaatcagaaatcccttatgtggaacttaacactcataatttgacagaaggtagaaccctgactgccagccgggaaagtgttgccaaaaagagtcaacctctgtaaaaatatttgaagagatttattctgagccaagtgtgagtgactgatggcctgtgatacaactcttaggagatcctgagaacatgtgtccagggtcgtctggctacaacttagttttatacatttaatacattttagggagacataagataccagtcagtacatgtaagatgtacagtggtttggtctggagaggcaggacagctcaagacctggggatgttgtcataggcagaatcaaagattttctgattggcaattggttgaaagagttattatctaaagacctggaatcaatagaaaggaatgtctgggttacagtaaggggttgtggagaccaaggttttatgcagatgaagcctccagccagcaggcttcagagaaaatagattgtaaatgcttctcatcagacttaaggagcctgttttaacagtaattccaaaagggaggggagtataatgaggaatggctggctccctcttcccacc

SEQ ID NO: 311410 - DNA, 3377 bp, Homo sapiens
ttgtccggccctatatccggtgtccgcccgccctcggctcctccgccgtgatgctgtcccgatcccgctgtgtgtctcgggcgttcagccgctcgctctccgccttccagaaggggaactgccctctagggagacgttccctgcctggggtctccttatgccagggaccaggttaccctaacagcaggaaggttgtcattaacaacagtgtcttcagtgttcgctttttcagaactacagctgtatgcaaggatgacttggttacagtcaaaaccccagcgtttgcagaatctgtcacagagggagatgtcaggtgggagaaagctgttggagacacagttgcagaagatgaagtggtttgtgagattgaaactgacaagacatctgtgcaggttccatcaccagcaaatggcgtgattgaagctcttttggtacctgatgggggaaaagtcgaaggaggcactccacttttcacactcaggaaaactggtgctgctcctgctaaggccaagccggctgaagctcctgctgctgcagccccaaaagcagaacctacagcagcggcagttcctccccctgcagcacccatacccactcagatgccaccggtgccctcgccctcacaacctccttctggcaaacctgtgtctgcagtaaaacccactgttgccccaccactagctgagccaggagctggcaaaggtctgcgttcagaacatcgggagaaaatgaacaggatgcggcagcgcattgctcagcgtctgaaggaggcccagaatacatgtgcaatgctgacaacttttaatgagattgacatgagtaacatccaggagatgagggctcggcacaaagaggcttttttgaagaaacataacctcaaactaggcttcatgtcggcatttgtgaaggcctcagcctttgccttgcaggaacagcctgttgtaaatgcagtgattgacgacacaaccaaagaggtggtgtatagggattatattgacatcagtgttgcagtggccaccccacggggtctggtggttccagtcatcaggaatgtggaagctatgaattttgcagatattgaacggaccatcactgaactgggagagaaggcccgaaagaatgaacttgccattgaagatatggatggcggtaccttcaccattagcaatggaggcgtttttggctcgctctttggaacacccattatcaacccccctcagtctgccatcctggggatgcatggcatctttgacaggccagtggctataggaggcaaggtagaggtgcggcccatgatgtacgtggcactgacctatgatcaccggctgattgatggcagagaggctgtgactttcctccgcaaaatcaaggcagcggtagaggatcccagagtcctcctcctggatctttaggaggaacccacacaccctacaagttgatcatgcaggaactgaaaaccagtcttctccctgtcccctcatgggtcccgggttagcctggtgacaggcagacacatgctgttggcctcaagcaaggaagcagagcactgtgtaaccagcagtcacaggtcttttcttggcgttcctgccaggctctccctctctgcacctgtctcatagcctcgaatatcttaattccttaggcttaagagagagagccttaatggatgctcattcatattcctgcctttcttccatcagctctctgcaaagatgattttgcttctccctagtgctggtatactatagagaaacccccggggaccatgtgattaagttcctatcttttgaaagtttgttctgcagagacttctaggaggatgctgtgcctcccaagctcagagcagcctctgtcctggctgtgcacattctcccttgattccacttgtgtggagggattgaacacaggcaaagaggtgctgctttgcttcttcaatggcaccttcattctccgttgtcattgacttcaagatgcctcttctacctcttccaggaagcacaggccaggggatctgggtgtgtgagtgggaggagagggcagaggtcccctgaggtcatgcattgtaatcatcatagaaggagagcccaggcctgccctcacgctctccatcataggctgacaccaagaagactcgtcttggcacaatctcacacagctggggctgtagcaaccctttccaacccctttgctggttgctgggcctcattctagcaccttgttcttagagcagattctagcacatcatggcagtgggaccaagcgtggtcccgaggaagggccagagcctggtagagactagggaagggaggtctcctctagactgactcacattgccttgagcttttcagttaagttgctgtaagcacctgggctgaggaggcagtttttgttccttcctgcgttatagcggggccttgtctcttcctctgcaggacacagatctggaggacgtggactggggtaggaaaccaccctgagggtgttagtacctagtggtgaaacggatgaggtcatttctaaggtgtgttgcccgtggatctgggcacaatcattggaattccttggagccaatactgagtgcctgcagcatctactactctgtcttcactattcagaacttgtaactaaagtatttaaagaaactgattttaaatgcaaattaaagggcagatattctcaaacagggttcctgtatctgttccttttggctactgaggtggtacaagtccccagcactgttgcactgaaattattgaaagccactcaaggtcctgttgcttattttgtgaaatcagaaatcccttatgtggaacttaacactcataatttgacagaaggtagaaccctgactgccagccgggaaagtgttgccaaaaagagtcaacctctgtaaaaatatttgaagagatttattctgagccaagtgtgagtgactgatggcctgtgatacaactcttaggagatcctgagaacatgtgtccagggtcgtctggctacaacttagttttatacatttaatacattttagggagacataagataccagtcagtacatgtaagatgtacagtggtttggtctggagaggcaggacagctcaagacctggggatgttgtcataggcagaatcaaagattttctgattggcaattggttgaaagagttattatctaaagacctggaatcaatagaaaggaatgtctgggttacagtaaggggttgtggagaccaaggttttatgcagatgaagcctccagccagcaggcttcagagaaaatagattgtaaatgcttctcatcagacttaaggagcctgttttaacagtaattccaaaagggaggggagtataatgaggaatggctggctccctcttcccacc

SEQ ID NO: 311411 - DNA, 2227 bp, Homo sapiens
ttgtccggccctatatccggtgtccgcccgccctcggctcctccgccgtgatgctgtcccgatcccgctgtgtgtctcgggcgttcagccgctcgctctccgccttccagaaggggaactgccctctagggagacgttccctgcctggggtctccttatgccagggaccaggttaccctaacagcaggaaggttgtcattaacaacagtgtcttcagtgttcgctttttcagaactacagctgtatgcaaggatgacttggttacagtcaaaaccccagcgtttgcagaatctgtcacagagggagatgtcaggtgggagaaagctgttggagacacagttgcagaagatgaagtggtttgtgagattgaaactgacaagacatctgtgcaggttccatcaccagcaaatggcgtgattgaagctcttttggtacctgatgggggaaaagtcgaaggaggcactccacttttcacactcaggaaaactggtgctgctcctgctaaggccaagccggctgaagctcctgctgctgcagccccaaaagcagaacctacagcagcggcagttcctccccctgcagcacccatacccactcagatgccaccggtgccctcgccctcacaacctccttctggcaaacctgtgtctgcagtaaaacccactgttgccccaccactagctgagccaggagctggcaaaggtctgcgttcagaacatcgggagaaaatgaacaggatgcggcagcgcattgctcagcgtctgaaggaggcccagaatacatgtgcaatgctgacaacttttaatgagattgacatgagtaacatccaggagatgagggctcggcacaaagaggcttttttgaagaaacataacctcaaactaggcttcatgtcggcatttgtgaaggcctcagcctttgccttgcaggaacagcctgttgtaaatgcagtgattgacgacacaaccaaagaggtggtgtatagggattatattgacatcagtgttgcagtggccaccccacggggtctggtggttccagtcatcaggaatgtggaagctatgaattttgcagatattgaacggaccatcactgaactgggagagaaggcccgaaagaatgaacttgccattgaagatatggatggcggtaccttcaccattagcaatggaggcgtttttggctcgctctttggaacacccattatcaacccccctcagtctgccatcctggggatgcatggcatctttgacaggccagtggctataggaggcaaggtagaggtgcggcccatgatgtacgtggcactgacctatgatcaccggctgattgatggcagagaggctgtgactttcctccgcaaaatcaaggcagcggtagaggatcccagagtcctcctcctggatctttaggaggaacccacacaccctacaagttgatcatgcaggaactgaaaaccagtcttctccctgtcccctcatgggtcccgggttagcctggtgacaggcagacacatgctgttggcctcaagcaaggaagcagagcactgtgtaaccagcagtcacaggtcttttcttggcgttcctgccaggctctccctctctgcacctgtctcatagcctcgaatatcttaattccttaggcttaagagagagagccttaatggatgctcattcatattcctgcctttcttccatcagctctctgcaaagatgattttgcttctccctagtgctggtatactatagagaaacccccggggaccatgtgattaagttcctatcttttgaaagtttgttctgcagagacttctaggaggatgctgtgcctcccaagctcagagcagcctctgtcctggctgtgcacattctcccttgattccacttgtgtggagggattgaacacaggcaaagaggtgctgctttgcttcttcaatggcaccttcattctccgttgtcattgacttcaagatgcctcttctacctcttccaggaagcacaggccaggggatctgggtgtgtgagtgggaggagagggcagaggtcccctgaggtcatgcattgtaatcatcatagaaggagagcccaggcctgccctcacgctctccatcataggccaatactgagtgcctgcagcatctactactctgtcttcactattcagaacttgtaactaaagtatttaaagaaactgattttaaatgcaaattaaagggcagatattctca

SEQ ID NO: 311412 - DNA, 3641 bp, Homo sapiens
ctgcctcccaggttcaagtgattctcctgcctcagcctcccgaatagctgggattacaggtgcccaccaccatgcctggctaagttttttgtatttttagtagagacagggtttcaccatgttggtcaggctggtctcaaactcctgacctcaggtgatctgcccacctcagcctgccacaaagtgttgggattacaggcctgagccactgcgtgagccactgcgcctggctcctctcacttcttaagtttaagtgctatctaaaattctcccctcccctcaggatagttgtagaatttatagctctgccgttttctttacatatgtactttctgctggccctgtaggaaagggttcttataacatacctgccaaaatgggttttgtggctactggaggctccccgctaacaggtagccttgtagcctttgattgtcttttcagctgttggagacacagttgcagaagatgaagtggtttgtgagattgaaactgacaagacatctgtgcaggttccatcaccagcaaatggcgtgattgaagctcttttggtacctgatgggggaaaagtcgaaggaggcactccacttttcacactcaggaaaactggtgctgctcctgctaaggccaagccggctgaagctcctgctgctgcagccccaaaagcagaacctacagcagcggcagttcctccccctgcagcacccatacccactcagatgccaccggtgccctcgccctcacaacctccttctggcaaacctgtgtctgcagtaaaacccactgttgccccaccactagctgagccaggagctggcaaaggtctgcgttcagaacatcgggagaaaatgaacaggatgcggcagcgcattgctcagcgtctgaaggaggcccagaatacatgtgcaatgctgacaacttttaatgagattgacatgagtaacatccaggagatgagggctcggcacaaagaggcttttttgaagaaacataacctcaaactaggcttcatgtcggcatttgtgaaggcctcagcctttgccttgcaggaacagcctgttgtaaatgcagtgattgacgacacaaccaaagaggtggtgtatagggattatattgacatcagtgttgcagtggccaccccacggggtctggtggttccagtcatcaggaatgtggaagctatgaattttgcagatattgaacggaccatcactgaactgggagagaaggcccgaaagaatgaacttgccattgaagatatggatggcggtaccttcaccattagcaatggaggcgtttttggctcgctctttggaacacccattatcaacccccctcagtctgccatcctggggatgcatggcatctttgacaggccagtggctataggaggcaaggtagaggtgcggcccatgatgtacgtggcactgacctatgatcaccggctgattgatggcagagaggctgtgactttcctccgcaaaatcaaggcagcggtagaggatcccagagtcctcctcctggatctttaggaggaacccacacaccctacaagttgatcatgcaggaactgaaaaccagtcttctccctgtcccctcatgggtcccgggttagcctggtgacaggcagacacatgctgttggcctcaagcaaggaagcagagcactgtgtaaccagcagtcacaggtcttttcttggcgttcctgccaggctctccctctctgcacctgtctcatagcctcgaatatcttaattccttaggcttaagagagagagccttaatggatgctcattcatattcctgcctttcttccatcagctctctgcaaagatgattttgcttctccctagtgctggtatactatagagaaacccccggggaccatgtgattaagttcctatcttttgaaagtttgttctgcagagacttctaggaggatgctgtgcctcccaagctcagagcagcctctgtcctggctgtgcacattctcccttgattccacttgtgtggagggattgaacacaggcaaagaggtgctgctttgcttcttcaatggcaccttcattctccgttgtcattgacttcaagatgcctcttctacctcttccaggaagcacaggccaggggatctgggtgtgtgagtgggaggagagggcagaggtcccctgaggtcatgcattgtaatcatcatagaaggagagcccaggcctgccctcacgctctccatcataggctgacaccaagaagactcgtcttggcacaatctcacacagctggggctgtagcaaccctttccaacccctttgctggttgctgggcctcattctagcaccttgttcttagagcagattctagcacatcatggcagtgggaccaagcgtggtcccgaggaagggccagagcctggtagagactagggaagggaggtctcctctagactgactcacattgccttgagcttttcagttaagttgctgtaagcacctgggctgaggaggcagtttttgttccttcctgcgttatagcggggccttgtctcttcctctgcaggacacagatctggaggacgtggactggggtaggaaaccaccctgagggtgttagtacctagtggtgaaacggatgaggtcatttctaaggtgtgttgcccgtggatctgggcacaatcattggaattccttggagccactgggattcatggctttgtatccaactgcatccaggcctgaggctgctgacgtttgacaccagggccagtagagagtgcccttttgtatcttaagccaagaagtgaggcctgggggtgggggaggggggaaggggtgggagccaatactgagtgcctgcagcatctactactctgtcttcactattcagaacttgtaactaaagtatttaaagaaactgattttaaatgcaaattaaagggcagatattctcaaacagggttcctgtatctgttccttttggctactgaggtggtacaagtccccagcactgttgcactgaaattattgaaagccactcaaggtcctgttgcttattttgtgaaatcagaaatcccttatgtggaacttaacactcataatttgacagaaggtagaaccctgactgccagccgggaaagtgttgccaaaaagagtcaacctctgtaaaaatatttgaagagatttattctgagccaagtgtgagtgactgatggcctgtgatacaactcttaggagatcctgagaacatgtgtccagggtcgtctggctacaacttagttttatacatttaatacattttagggagacataagataccagtcagtacatgtaagatgtacagtggtttggtctggagaggcaggacagctcaagacctggggatgttgtcataggcagaatcaaagattttctgattggcaattggttgaaagagttattatctaaagacctggaatcaatagaaaggaatgtctgggttacagtaaggggttgtggagaccaaggttttatgcagatgaagcctccagccagcaggcttcagagaaaatagattgtaaatgcttctcatcagacttaaggagcctgttttaacagtaattccaaaagggaggggagtataatgaggaatggctggctccctcttcccacc

SEQ ID NO: 311413 - DNA, 3416 bp, Homo sapiens
ttgtccggccctatatccggtgtccgcccgccctcggctcctccgccgtgatgctgtcccgatcccgctgtgtgtctcgggcgttcagccgctcgctctccgccttccagaaggggaactgccctctagggagacgttccctgcctgcattaacaacagtgtcttcagtgttcgctttttcagaactacagctgtatgcaaggatgacttggttacagtcaaaaccccagcgtttgcagaatctgtcacagagggagatgtcaggtgggagaaagacatctgtgcaggttccatcaccagcaaatggcgtgattgaagctcttttggtacctgatgggggaaaagtcgaaggaggcactccacttttcacactcaggaaaactggtgctgctcctgctaaggccaagccggctgaagctcctgctgctgcagccccaaaagcagaacctacagcagcggcagttcctccccctgcagcacccatacccactcagatgccaccggtgccctcgccctcacaacctccttctggcaaacctgtgtctgcagtaaaacccactgttgccccaccactagctgagccaggagctggcaaaggtctgcgttcagaacatcgggagaaaatgaacaggatgcggcagcgcattgctcagcgtctgaaggaggcccagaatacatgtgcaatgctgacaacttttaatgagattgacatgagtaacatccaggagatgagggctcggcacaaagaggcttttttgaagaaacataacctcaaactaggcttcatgtcggcatttgtgaaggcctcagcctttgccttgcaggaacagcctgttgtaaatgcagtgattgacgacacaaccaaagaggtggtgtatagggattatattgacatcagtgttgcagtggccaccccacggggtctggtggttccagtcatcaggaatgtggaagctatgaattttgcagatattgaacggaccatcactgaactgggagagaaggcccgaaagaatgaacttgccattgaagatatggatggcggtaccttcaccattagcaatggaggcgtttttggctcgctctttggaacacccattatcaacccccctcagtctgccatcctggggatgcatggcatctttgacaggccagtggctataggaggcaaggtagaggtgcggcccatgatgtacgtggcactgacctatgatcaccggctgattgatggcagagaggctgtgactttcctccgcaaaatcaaggcagcggtagaggatcccagagtcctcctcctggatctttaggaggaacccacacaccctacaagttgatcatgcaggaactgaaaaccagtcttctccctgtcccctcatgggtcccgggttagcctggtgacaggcagacacatgctgttggcctcaagcaaggaagcagagcactgtgtaaccagcagtcacaggtcttttcttggcgttcctgccaggctctccctctctgcacctgtctcatagcctcgaatatcttaattccttaggcttaagagagagagccttaatggatgctcattcatattcctgcctttcttccatcagctctctgcaaagatgattttgcttctccctagtgctggtatactatagagaaacccccggggaccatgtgattaagttcctatcttttgaaagtttgttctgcagagacttctaggaggatgctgtgcctcccaagctcagagcagcctctgtcctggctgtgcacattctcccttgattccacttgtgtggagggattgaacacaggcaaagaggtgctgctttgcttcttcaatggcaccttcattctccgttgtcattgacttcaagatgcctcttctacctcttccaggaagcacaggccaggggatctgggtgtgtgagtgggaggagagggcagaggtcccctgaggtcatgcattgtaatcatcatagaaggagagcccaggcctgccctcacgctctccatcataggctgacaccaagaagactcgtcttggcacaatctcacacagctggggctgtagcaaccctttccaacccctttgctggttgctgggcctcattctagcaccttgttcttagagcagattctagcacatcatggcagtgggaccaagcgtggtcccgaggaagggccagagcctggtagagactagggaagggaggtctcctctagactgactcacattgccttgagcttttcagttaagttgctgtaagcacctgggctgaggaggcagtttttgttccttcctgcgttatagcggggccttgtctcttcctctgcaggacacagatctggaggacgtggactggggtaggaaaccaccctgagggtgttagtacctagtggtgaaacggatgaggtcatttctaaggtgtgttgcccgtggatctgggcacaatcattggaattccttggagccactgggattcatggctttgtatccaactgcatccaggcctgaggctgctgacgtttgacaccagggccagtagagagtgcccttttgtatcttaagccaagaagtgaggcctgggggtgggggaggggggaaggggtgggagccaatactgagtgcctgcagcatctactactctgtcttcactattcagaacttgtaactaaagtatttaaagaaactgattttaaatgcaaattaaagggcagatattctcaaacagggttcctgtatctgttccttttggctactgaggtggtacaagtccccagcactgttgcactgaaattattgaaagccactcaaggtcctgttgcttattttgtgaaatcagaaatcccttatgtggaacttaacactcataatttgacagaaggtagaaccctgactgccagccgggaaagtgttgccaaaaagagtcaacctctgtaaaaatatttgaagagatttattctgagccaagtgtgagtgactgatggcctgtgatacaactcttaggagatcctgagaacatgtgtccagggtcgtctggctacaacttagttttatacatttaatacattttagggagacataagataccagtcagtacatgtaagatgtacagtggtttggtctggagaggcaggacagctcaagacctggggatgttgtcataggcagaatcaaagattttctgattggcaattggttgaaagagttattatctaaagacctggaatcaatagaaaggaatgtctgggttacagtaaggggttgtggagaccaaggttttatgcagatgaagcctccagccagcaggcttcagagaaaatagattgtaaatgcttctcatcagacttaaggagcctgttttaacagtaattccaaaagggaggggagtataatgaggaatggctggctccctcttcccacc

SEQ ID NO: 311414 - DNA, 3540 bp, Homo sapiens
ttgtccggccctatatccggtgtccgcccgccctcggctcctccgccgtgatgctgtcccgatcccgctgtgtgtctcgggcgttcagccgctcgctctccgccttccagaaggggaactgccctctagggagacgttccctgcctggggtctccttatgccagggaccaggttaccctaacagcaggaaggttgtcattaacaacagtgtcttcagtgttcgctttttcagaactacagctgtatgcaaggatgacttggttacagtcaaaaccccagcgtttgcagaatctgtcacagagggagatgtcaggtgggagaaagcctttgattgtcttttcagctgttggagacacagttgcagaagatgaagtggtttgtgagattgaaactgacaagacatctgtgcaggttccatcaccagcaaatggcgtgattgaagctcttttggtacctgatgggggaaaagtcgaaggaggcactccacttttcacactcaggaaaactggtgctgctcctgctaaggccaagccggctgaagctcctgctgctgcagccccaaaagcagaacctacagcagcggcagttcctccccctgcagcacccatacccactcagatgccaccggtgccctcgccctcacaacctccttctggcaaacctgtgtctgcagtaaaacccactgttgccccaccactagctgagccaggagctggcaaaggtctgcgttcagaacatcgggagaaaatgaacaggatgcggcagcgcattgctcagcgtctgaaggaggcccagaatacatgtgcaatgctgacaacttttaatgagattgacatgagtaacatccaggagatgagggctcggcacaaagaggcttttttgaagaaacataacctcaaactaggcttcatgtcggcatttgtgaaggcctcagcctttgccttgcaggaacagcctgttgtaaatgcagtgattgacgacacaaccaaagaggtggtgtatagggattatattgacatcagtgttgcagtggccaccccacggggtctggtggttccagtcatcaggaatgtggaagctatgaattttgcagatattgaacggaccatcactgaactgggagagaaggcccgaaagaatgaacttgccattgaagatatggatggcggtaccttcaccattagcaatggaggcgtttttggctcgctctttggaacacccattatcaacccccctcagtctgccatcctggggatgcatggcatctttgacaggccagtggctataggaggcaaggtagaggtgcggcccatgatgtacgtggcactgacctatgatcaccggctgattgatggcagagaggctgtgactttcctccgcaaaatcaaggcagcggtagaggatcccagagtcctcctcctggatctttaggaggaacccacacaccctacaagttgatcatgcaggaactgaaaaccagtcttctccctgtcccctcatgggtcccgggttagcctggtgacaggcagacacatgctgttggcctcaagcaaggaagcagagcactgtgtaaccagcagtcacaggtcttttcttggcgttcctgccaggctctccctctctgcacctgtctcatagcctcgaatatcttaattccttaggcttaagagagagagccttaatggatgctcattcatattcctgcctttcttccatcagctctctgcaaagatgattttgcttctccctagtgctggtatactatagagaaacccccggggaccatgtgattaagttcctatcttttgaaagtttgttctgcagagacttctaggaggatgctgtgcctcccaagctcagagcagcctctgtcctggctgtgcacattctcccttgattccacttgtgtggagggattgaacacaggcaaagaggtgctgctttgcttcttcaatggcaccttcattctccgttgtcattgacttcaagatgcctcttctacctcttccaggaagcacaggccaggggatctgggtgtgtgagtgggaggagagggcagaggtcccctgaggtcatgcattgtaatcatcatagaaggagagcccaggcctgccctcacgctctccatcataggctgacaccaagaagactcgtcttggcacaatctcacacagctggggctgtagcaaccctttccaacccctttgctggttgctgggcctcattctagcaccttgttcttagagcagattctagcacatcatggcagtgggaccaagcgtggtcccgaggaagggccagagcctggtagagactagggaagggaggtctcctctagactgactcacattgccttgagcttttcagttaagttgctgtaagcacctgggctgaggaggcagtttttgttccttcctgcgttatagcggggccttgtctcttcctctgcaggacacagatctggaggacgtggactggggtaggaaaccaccctgagggtgttagtacctagtggtgaaacggatgaggtcatttctaaggtgtgttgcccgtggatctgggcacaatcattggaattccttggagccactgggattcatggctttgtatccaactgcatccaggcctgaggctgctgacgtttgacaccagggccagtagagagtgcccttttgtatcttaagccaagaagtgaggcctgggggtgggggaggggggaaggggtgggagccaatactgagtgcctgcagcatctactactctgtcttcactattcagaacttgtaactaaagtatttaaagaaactgattttaaatgcaaattaaagggcagatattctcaaacagggttcctgtatctgttccttttggctactgaggtggtacaagtccccagcactgttgcactgaaattattgaaagccactcaaggtcctgttgcttattttgtgaaatcagaaatcccttatgtggaacttaacactcataatttgacagaaggtagaaccctgactgccagccgggaaagtgttgccaaaaagagtcaacctctgtaaaaatatttgaagagatttattctgagccaagtgtgagtgactgatggcctgtgatacaactcttaggagatcctgagaacatgtgtccagggtcgtctggctacaacttagttttatacatttaatacattttagggagacataagataccagtcagtacatgtaagatgtacagtggtttggtctggagaggcaggacagctcaagacctggggatgttgtcataggcagaatcaaagattttctgattggcaattggttgaaagagttattatctaaagacctggaatcaatagaaaggaatgtctgggttacagtaaggggttgtggagaccaaggttttatgcagatgaagcctccagccagcaggcttcagagaaaatagattgtaaatgcttctcatcagacttaaggagcctgttttaacagtaattccaaaagggaggggagtataatgaggaatggctggctccctcttcccacc

SEQ ID NO: 311415 - DNA, 2602 bp, Homo sapiens
  misc_feature (30)..(30): n is a, c, g, or t
  misc_feature (58)..(58): n is a, c, g, or t
  misc_feature (81)..(81): n is a, c, g, or t
  misc_feature (88)..(88): n is a, c, g, or t
cagtttctttaaatactttagttacaagtnctgaatagtgaagacagagtagtagatnctgcaggcactcagtattgacancagtgtngcagtggccaccccacggggtctggtggttccagtcatcaggaatgtggaagctatgaattttgcagatattgaacggaccatcactgaactgggagagaaggcccgaaagaatgaacttgccattgaagatatggatggcggtaccttcaccattagcaatggaggcgtttttggctcgctctttggaacacccattatcaacccccctcagtctgccatcctggggatgcatggcatctttgacaggccagtggctataggaggcaaggtagaggtgcggcccatgatgtacgtggcactgacctatgatcaccggctgattgatggcagagaggctgtgactttcctccgcaaaatcaaggcagcggtagaggatcccagagtcctcctcctggatctttaggaggaacccacacaccctacaagttgatcatgcaggaactgaaaaccagtcttctccctgtcccctcatgggtcccgggttagcctggtgacaggcagacacatgctgttggcctcaagcaaggaagcagagcactgtgtaaccagcagtcacaggtcttttcttggcgttcctgccaggctctccctctctgcacctgtctcatagcctcgaatatcttaattccttaggcttaagagagagagccttaatggatgctcattcatattcctgcctttcttccatcagctctctgcaaagatgattttgcttctccctagtgctggtatactatagagaaacccccggggaccatgtgattaagttcctatcttttgaaagtttgttctgcagagacttctaggaggatgctgtgcctcccaagctcagagcagcctctgtcctggctgtgcacattctcccttgattccacttgtgtggagggattgaacacaggcaaagaggtgctgctttgcttcttcaatggcaccttcattctccgttgtcattgacttcaagatgcctcttctacctcttccaggaagcacaggccaggggatctgggtgtgtgagtgggaggagagggcagaggtcccctgaggtcatgcattgtaatcatcatagaaggagagcccaggcctgccctcacgctctccatcataggctgacaccaagaagactcgtcttggcacaatctcacacagctggggctgtagcaaccctttccaacccctttgctggttgctgggcctcattctagcaccttgttcttagagcagattctagcacatcatggcagtgggaccaagcgtggtcccgaggaagggccagagcctggtagagactagggaagggaggtctcctctagactgactcacattgccttgagcttttcagttaagttgctgtaagcacctgggctgaggaggcagtttttgttccttcctgcgttatagcggggccttgtctcttcctctgcaggacacagatctggaggacgtggactggggtaggaaaccaccctgagggtgttagtacctagtggtgaaacggatgaggtcatttctaaggtgtgttgcccgtggatctgggcacaatcattggaattccttggagccactgggattcatggctttgtatccaactgcatccaggcctgaggctgctgacgtttgacaccagggccagtagagagtgcccttttgtatcttaagccaagaagtgaggcctgggggtgggggaggggggaaggggtgggagccaatactgagtgcctgcagcatctactactctgtcttcactattcagaacttgtaactaaagtatttaaagaaactgattttaaatgcaaattaaagggcagatattctcaaacagggttcctgtatctgttccttttggctactgaggtggtacaagtccccagcactgttgcactgaaattattgaaagccactcaaggtcctgttgcttattttgtgaaatcagaaatcccttatgtggaacttaacactcataatttgacagaaggtagaaccctgactgccagccgggaaagtgttgccaaaaagagtcaacctctgtaaaaatatttgaagagatttattctgagccaagtgtgagtgactgatggcctgtgatacaactcttaggagatcctgagaacatgtgtccagggtcgtctggctacaacttagttttatacatttaatacattttagggagacataagataccagtcagtacatgtaagatgtacagtggtttggtctggagaggcaggacagctcaagacctggggatgttgtcataggcagaatcaaagattttctgattggcaattggttgaaagagttattatctaaagacctggaatcaatagaaaggaatgtctgggttacagtaaggggttgtggagaccaaggttttatgcagatgaagcctccagccagcaggcttcagagaaaatagattgtaaatgcttctcatcagacttaaggagcctgttttaacagtaattccaaaagggaggggagtataatgaggaatggctggctccctcttcccacc

SEQ ID NO: 311416 - DNA, 1335 bp, Homo sapiens
ttgtccggccctatatccggtgtccgcccgccctcggctcctccgccgtgatgctgtcccgatcccgctgtgtgtctcgggcgttcagccgctcgctctccgccttccagaaggggaactgccctctagggagacgttccctgcctggggtctccttatgccagggaccaggttaccctaacagcaggaaggttgtcattaacaacagtgtcttcagtgttcgctttttcagaactacagctgtatgcaaggatgacttggttacagtcaaaaccccagcgtttgcagaatctgtcacagagggagatgtcaggtgggagaaagctgttggagacacagttgcagaagatgaagtggtttgtgagattgaaactgacaagacatctgtgcaggttccatcaccagcaaatggcgtgattgaagctcttttggtacctgatgggggaaaagtcgaaggaggcactccacttttcacactcaggaaaactggtgctgctcctgctaaggccaagccggctgaagctcctgctgctgcagccccaaaagcagaacctacagcagcggcagttcctccccctgcagcacccatacccactcagatgccaccggtgccctcgccctcacaacctccttctggcaaacctgtgtctgcagtaaaacccactgttgccccaccactagctgagccaggagctggcaaaggtctgcgttcagaacatcgggagaaaatgaacaggatgcggcagcgcattgctcagcgtctgaaggaggcccagaatacatgtgcaatgctgacaacttttaatgagattgacatgagtaacatccaggagatgagggctcggcacaaagaggcttttttgaagaaacataacctcaaactaggcttcatgtcggcatttgtgaaggcctcagcctttgccttgcaggaacagcctgttgtaaatgcagtgattgacgacaaacaaagaggtggtgtaatagggatatatcgatcaggtgcagggcaaacccaaggggtcgcaggaccacgcaccagagaacacgcgccaaccacatgaaactacaggaaccacactggacaggaacaacacagcaagcgcgcccacacagggccgacccaacagcaactgccaccgcaccatggaggagggccaccaccacaacacacgaccgcgctcaggcgcacaagaaacaaccagcctcaacaacacaacagcacaaggagacgctaactcgacgcaacaccaaacagcccgcacccaacaacccacgcataaagccaaccaacccacaaaaggaacccctaccacccgggcaaccaactacacaaca

SEQ ID NO: 311417 - DNA, 854 bp, Homo sapiens
ttgtccggccctatatccggtgtccgcccgccctcggctcctccgccgtgatgctgtcccgatcccgctgtgtgtctcgggcgttcagccgctcgctctccgccttccagaaggggaactgccctctagggagacgttccctgcctggggtctccttatgccagggaccaggttaccctaacagcaggaaggttgtcattaacaacagtgtcttcagtgttcgctttttcagaactacagctgtatgcaaggatgacttggttacagtcaaaaccccagcgtttgcagaatctgtcacagagggagatgtcaggtgggagaaagctgttggagacacagttgcagaagatgaagtggtttgtgagattgaaactgacaagacatctgtgcaggttccatcaccagcaaatggcgtgattgaagctcttttggtacctgatgggggaaaagtcgaaggaggcactccacttttcacactcaggaaaactggtgctgctcctgctaaggccaagccggctgaagctcctgctgctgcagccccaaaagcagaacctacagcagcggcagttcctccccctgcagcacccatacccactcagatgccaccggtgccctcgccctcacaacctccttctggcaaacctgtgctgacgtttgacaccagggccagtagagagtgcccttttgtatcttaagccaagaagtgaggcctgggggtgggggaggggggaaggggtgggagccaatactgagtgcctgcagcatctactactctgtcttcactattcagaacttgtaactaaagtatttaaagaaactgattttaaatgcaaattaaagggcagatattctca

SEQ ID NO: 311418 - DNA, 1621 bp, Homo sapiens
gaaaaattagctaggtcgaggcccgggtgtgaatcggccgaggaacttccggcagcggcagctcaagtggccaaggcaagatgggtcaaagtcagagtggtggtcatggtcctggaggtggcaagaaggatgacaaggacaagaaaaagaaatatgaacctcctgtaccaactagagtggggaaaaagaagaagaaaacaaagggaccagatgctgccagcaaactgccactggtgacacctcacactcagtgccggttaaaattactgaagttagagagaattaaagactatcttctcatggaggaagaattcattagaaatcaggaacaaatgaaaccattagaagaaaagcaagaggaggaaagatcaaaagtggatgatctgagggggaccccgatgtcagtaggaaccttggaagagattattgatgacaatcatgccatcgtgtctacatctgtgggctcagaacactacgtcagcattctttcatttgtagacaaggatctgctggaacctggctgctcggtcctgctcaaccacaaggtgcatgccgtgataggggtgctgatggatgacacggatcccctggtcacagtgatgaaggtagaaaaggccccccaggagacctatgcagatattggggggttggacaaccaaattcaggaaattaaggaatctgtggagcttcctctcacccatcctgaatattatgaagagatgggtataaagcctcctaagggggtcattctctatggtccacctggcacaggtaaaaccttgttagccaaagcagtagcaaaccaaacctcagccactttcttgagagtggttggctctgaacttattcagaagtacctaggtgatgggcccaaactcgtacgggaattgttccgagttgctgaagaacatgcaccgtccatcgtgtttattgatgaaattgacgccattgggacaaaaagatatgactccaattctggtggtgagagagaaattcagcgaacaatgttggaactgctgaaccagttggatggatttgattctaggggagatgtgaaagttatcatggccacaaaccgaatagaaactttggatccagcacttatcagaccaggccgcattgacaggaagattgagttccccctgcctgatgaaaagacgaagaagcgcatctttcagattcacacaagcaggatgacgctggctgatgatgtaaccctggacgacctgatcatggctaaagatgacctctctggtgctgacatcaaggcaatctgtacagaagctggtctgatggccttaagagaacgtagaatgaaagtaacaaatgaagacttcaaaaaatctaaagaaaatgttctttataagaaacaggaaggcacccctgaggggctgtatctctaatgaaccatggctgtcatcaggaaaatggttgggagatttctcaatccctgaaagggatgaggttgggggagttgcccagaggaatccctgttcccactgatttttattagcaaaacatcctgtgtcttttggagtacgatgtgtaagtgcccattgggtggcctgttggtcactgtgcagcagtctgcttcccaataaagcgtgctctttcacaaaca

SEQ ID NO: 311419 - DNA, 1139 bp, Homo sapiens
ggtcctgtctcagctgtctgagctggcagcaagcccacccagtagctacttttctggagcagtaggcactgcatgcctggagctcaggaacacttcgtgtatctccttagggccaaagctaggattcccagacccttttttccagcactgatggtttcctaggagtttactttggctctacagccctgggttggatgggtcaggttaatgtatgcaactttgaaggggcccaagaaagactcaaccagagaaaaaaatgagatttatttcattactggaatgaagcaattcttcgtacaggtaattatagttcgcagcttttcaggggaaactgggtcaaggttggaaaataaccaagtaaaaagtattttctgacgttatcataagttcagcaaaatagctaaggataatccaaacatgttagtagatttttctaaatgtcctcttatctacttaggagaatggaatgtcgtgacacttgaattggtgccatgccttagcatgagggcccgcctgtttttggtgtccatttaaggtggtaatgatacgagtttttaagttaaaatggcacttaaggtgtcttttttttttttatctttttcatccaaaataggtaaaaccttgttagccaaagcagtagcaaaccaaacctcagccactttcttgagagtggttggctctgaacttattcagaagtacctaggtgatgggcccaaactcgtacgggaattgttccgagttgctgaagaacatgcaccgtccatcgtgtttattgatgaaattgacgccattgggacaaaaagaggtagactttctcatacttattttgccttgtttagtagggaacaccgcatagctcttctcttgagaatgggcaatctcagggggctctccctatggccacagttcttgctgtgcgtggccttccatgcatgctttaggctctgctctcccaggagccagctaacaactgcccagtaactgtgaacgtctggagagactggtcagttatgaataaccatgtcttgagcacccgccctgatccaggaccatctggactctagggacacagttgtgagcacaagtctctgccctggaggagctcacaggttgtagggatcagataccaaacatggaaa

SEQ ID NO: 311420 - DNA, 378 bp, Homo sapiens
agatttttacttatttttgttgaaagcaagatattgtcatgttgccaattagtaaatatgctaataatttcagtaaagcctttcattcatactgtttttcataggaatctgtggagcttcctctcacccatcctgaatattatgaagagatgggtataaagcctcctaagggggtcattctctatggtccacctggcacaggtatgctctgtttttgacactttccaggcacccagctggtctcttgagcagcagcattggctagttataattactgaactaataagagaggacaccacaattccttagtttaaaacagggctgctcaaccttgtctgcatgttggaatcaccttgggagctttaaaaatactgatgg

SEQ ID NO: 311421 - DNA, 2271 bp, Homo sapiens
gaaaaattagctaggtcgaggcccgggtgtgaatcggccgaggaacttccggcagcggcagctcaagtggccaaggcaagatgggtcaaagtcagagtggtggtcatggtcctggaggtggcaagaaggatgacaaggacaagaaaaagaaatatgaacctcctgtaccaactagagtggggaaaaagaagaagaaaacaaagggaccagatgctgccagcaaactgccactggtgacacctcacactcagtgccggttaaaattactgaagttagagagaattaaagactatcttctcatggaggaagaattcattagaaatcaggaacaaatgaaaccattagaagaaaagcaagaggaggaaagatcaaaagtggatgatctgagggggaccccgatgtcagtaggaaccttggaagagattattgatgacaatcatgccatcgtgtctacatctgtgggctcagaacactacgtcagcattctttcatttgtagacaaggatctgctggaacctggctgctcggtcctgctcaaccacaaggtgcatgccgtgataggggtgctgatggatgacacggatcccctggtcacagtgatgaaggtagaaaaggccccccaggagacctatgcagatattggggggttggacaaccaaattcaggaaattaaggaatctgtggagcttcctctcacccatcctgaatattatgaagagatgggtataaagcctcctaagggggtcattctctatggtccacctggcacaggtaaaaccttgttagccaaagcagtagcaaaccaaacctcagccactttcttgagagtggttggctctgaacttattcagaagtacctaggtgatgggcccaaactcgtacgggaattgttccgagttgctgaagaacatgcaccgtccatcgtgtttattgatgaaattgacgccattgggacaaaaagatatgactccaattctggtggtgagagagaaattcagcgaacaatgttggaactgctgaaccagttggatggatttgattctaggggagatgtgaaagttatcatggccacaaaccgaatagaaactttggatccagcacttatcagaccaggttaaatttgctttggtttcatcatggagattaatgtgtttatatatttgtgtttaagtgtgctttgggaggcctataaaatgatacataaaaaagcaaatactgcagtgaaacttaggataatttacaaaaaaataggtcctcttgagatgagggttaaaacagagcatgatatggtctgtgcaccttggccctttgaattccagtcttatgtcttgtcttttcttttccataacattccctttttagcctcaagaacttgctgctttttctggaagaaataattcatgtgatggtaggatttgtcctttttacattcaggtagcatcagaagaaacagtgatttgtttgctgtcttttgtaatgtttttaacacaataggtctgcccagtttcactcaggaattgctcctttcatttatttctgaaggtatcaaagcagagagagtttcttttaaatgaagagaattcaaatgtagaaatctacaaactacaaaaatatatgtttactttttaaaatttagacatccttcccacagaattctgtccgactgaaacttcgtatgtaaggagatgggctgaggcctctgagccatggccgagcctggggtttggatgttggtgtgacttcaaatctctttgtacctgcaggccgcattgacaggaagattgagttccccctgcctgatgaaaagacgaagaagcgcatctttcagattcacacaagcaggatgacgctggctgatgatgtaaccctggacgacctgatcatggctaaagatgacctctctggtgctgacatcaaggcaatctgtacagaagctggtctgatggccttaagagaacgtagaatgaaagtaacaaatgaagacttcaaaaaatctaaagaaaatgttctttataagaaacaggaaggcacccctgaggggctgtatctctaatgaaccatggctgtcatcaggaaaatggttgggagatttctcaatccctgaaagggatgaggttgggggagttgcccagaggaatccctgttcccactgatttttattagcaaaacatcctgtgtcttttggagtacgatgtgtaagtgcccattgggtggcctgttggtcactgtgcagcagtctgcttcccaataaagcgtgctctttcacaaaca

SEQ ID NO: 311422 - DNA, 1568 bp, Homo sapiens
gaaaaattagctaggtcgaggcccgggtgtgaatcggccgaggaacttccggcagcggcagctcaagtggccaaggcaagatgggtcaaagtcagagtggtggtcatggtcctggaggtggcaagaaggatgacaaggacaagaaaaagaaatatgaacctcctgtaccaactagagtggggaaaaagaagaagaaaacaaagggaccagatgctgccagcaaactgccactggtgacacctcacactcagtgccggttaaaattactgaagttagagagaattaaagactatcttctcatggaggaagaattcattagaaatcaggaacaaatgaaaccattagaagaaaagcaagaggaggaaagatcaaaagtggatgatctgagggggaccccgatgtcagtaggaaccttggaagagattattgatgacaatcatgccatcgtgtctacatctgtgggctcagaacactacgtcagcattctttcatttgtagacaaggatctgctggaacctggctgctcggtcctgctcaaccacaaggtgcatgccgtgataggggtgctgatggatgacacggatcccctggtcacagtgatgaaggtagaaaaggccccccaggagacctatgcagatattggggggttggacaaccaaattcaggaaattaaggaatctgtggagcttcctctcacccatcctgaatattatgaagagatgggtataaagcctcctaagggggtcattctctatggtccacctggcacaggtaaaaccttgttagccaaagcagtagcaaaccaaacctcagccactttcttgagagtggttggctctgaacttattcagaagtacctaggtgatgggcccaaactcgtacgggaattgttccgagttgctgaagaacatgcaccgtccatcgtgtttattgatgaaattgacgccattgggacaaaaagtgctgaaccagttggatggatttgattctaggggagatgtgaaagttatcatggccacaaaccgaatagaaactttggatccagcacttatcagaccaggccgcattgacaggaagattgagttccccctgcctgatgaaaagacgaagaagcgcatctttcagattcacacaagcaggatgacgctggctgatgatgtaaccctggacgacctgatcatggctaaagatgacctctctggtgctgacatcaaggcaatctgtacagaagctggtctgatggccttaagagaacgtagaatgaaagtaacaaatgaagacttcaaaaaatctaaagaaaatgttctttataagaaacaggaaggcacccctgaggggctgtatctctaatgaaccatggctgtcatcaggaaaatggttgggagatttctcaatccctgaaagggatgaggttgggggagttgcccagaggaatccctgttcccactgatttttattagcaaaacatcctgtgtcttttggagtacgatgtgtaagtgcccattgggtggcctgttggtcactgtgcagcagtctgcttcccaataaagcgtgctctttcacaaaca

SEQ ID NO: 311423 - DNA, 1567 bp, Homo sapiens
gaaaaattagctaggtcgaggcccgggtgtgaatcggccgaggaacttccggcagcggcagctcaagtggccaaggcaagatgggtcaaagtcagagtggtggtcatggtcctggaggtggcaagaaggatgacaaggacaagaaaaagaaatatgaacctcctgtaccaactagagtggggaaaaagaagaagaaaacaaagggaccagatgctgccagcaaactgccactggtgacacctcacactcagtgccggttaaaattactgaagttagagagaattaaagactatcttctcatggaggaagaattcattagaaatcaggaacaaatgaaaccattagaagaaaagcaagaggaggaaagatcaaaagtggatgatctgagggggaccccgatgtcagtaggaaccttggaagagattattgatgacaatcatgccatcgtgtctacatctgtgggctcagaacactacgtcagcattctttcatttgtagacaaggatctgctggaacctggctgctcggtcctgctcaaccacaaggtgcatgccgtgataggggtgctgatggatgacacggatcccctggtcacagtgatgaaggtagaaaaggccccccaggagacctatgcagatattggggggttggacaaccaaattcaggaaattaaggaatctgtggagcttcctctcacccatcctgaatattatgaagagatgggtataaagcctcctaagggggtcattctctatggtccacctggcacaggtaaaaccttgttagccaaagcagtagcaaaccaaacctcagccactttcttgagagtggttggctctgaacttattcagaagtacctaggtgatgggcccaaactcgtacgggaattgttccgagttgctgaagaacatgcaccgtccatcgtgtttattgatgaaattgacgccattgggacaaaaagatatgactccaattctggtggtgagagagaaattcagcgaacaatgttggaactgctgaaccagttggatggatttgattctaggggagatgtgaaagttatcatggccacaaaccgaatagaaactttggatccagcacttatcagaccaggccgcattgacaggaagattgagttccccctgcctgatgatgatgtaaccctggacgacctgatcatggctaaagatgacctctctggtgctgacatcaaggcaatctgtacagaagctggtctgatggccttaagagaacgtagaatgaaagtaacaaatgaagacttcaaaaaatctaaagaaaatgttctttataagaaacaggaaggcacccctgaggggctgtatctctaatgaaccatggctgtcatcaggaaaatggttgggagatttctcaatccctgaaagggatgaggttgggggagttgcccagaggaatccctgttcccactgatttttattagcaaaacatcctgtgtcttttggagtacgatgtgtaagtgcccattgggtggcctgttggtcactgtgcagcagtctgcttcccaataaagcgtgctctttcacaaaca

SEQ ID NO: 311424 - DNA, 1572 bp, Homo sapiens
cgcattcagctagtacgagcccggctgagagatgggtcaaagtcagagtggtggtcatggtcctggaggtggcaagaaggatgacaaggacaagaaaaagaaatatgaacctcctgtaccaactagagtggggaaaaagaagaagaaaacaaagggaccagatgctgccagcaaactgccactggtgacacctcacactcagtgccggttaaaattactgaagttagagagaattaaagactatcttctcatggaggaagaattcattagaaatcaggaacaaatgaaaccattagaagaaaagcaagaggaggaaagatcaaaagtggatgatctgagggggaccccgatgtcagtaggaaccttggaagagattattgatgacaatcatgccatcgtgtctacatctgtgggctcagaacactacgtcagcattctttcatttgtagacaaggatctgctggaacctggctgctcggtcctgctcaaccacaaggtgcatgccgtgataggggtgctgatggatgacacggatcccctggtcacagtgatgaaggtagaaaaggccccccaggagacctatgcagatattggggggttggacaaccaaattcaggaaattaaggaatctgtggagcttcctctcacccatcctgaatattatgaagagatgggtataaagcctcctaagggggtcattctctatggtccacctggcacaggtaaaaccttgttagccaaagcagtagcaaaccaaacctcagccactttcttgagagtggttggctctgaacttattcagaagtacctaggtgatgggcccaaactcgtacgggaattgttccgagttgctgaagaacatgcaccgtccatcgtgtttattgatgaaattgacgccattgggacaaaaagatatgactccaattctggtggtgagagagaaattcagcgaacaatgttggaactgctgaaccagttggatggatttgattctaggggagatgtgaaagttatcatggccacaaaccgaatagaaactttggatccagcacttatcagaccaggccgcattgacaggaagattgagttccccctgcctgatgaaaagacgaagaagcgcatctttcagattcacacaagcaggatgacgctggctgatgatgtaaccctggacgacctgatcatggctaaagatgacctctctggtgctgacatcaaggcaatctgtacagaagctggtctgatggccttaagagaacgtagaatgaaagtaacaaatgaagacttcaaaaaatctaaagaaaatgttctttataagaaacaggaaggcacccctgaggggctgtatctctaatgaaccatggctgtcatcaggaaaatggttgggagatttctcaatccctgaaagggatgaggttgggggagttgcccagaggaatccctgttcccactgatttttattagcaaaacatcctgtgtcttttggagtacgatgtgtaagtgcccattgggtggcctgttggtcactgtgcagcagtctgcttcccaataaagcgtgctctttcacaaaca

SEQ ID NO: 311425 - DNA, 1578 bp, Homo sapiens
aaacttcggctaggtacgaggcctgggtgtgtggcagatgggtcaaagtcagagtggtggtcatggtcctggaggtggcaagaaggatgacaaggacaagaaaaagaaatatgaacctcctgtaccaactagagtggggaaaaagaagaagaaaacaaagggaccagatgctgccagcaaactgccactggtgacacctcacactcagtgccggttaaaattactgaagttagagagaattaaagactatcttctcatggaggaagaattcattagaaatcaggaacaaatgaaaccattagaagaaaagcaagaggaggaaagatcaaaagtggatgatctgagggggaccccgatgtcagtaggaaccttggaagagattattgatgacaatcatgccatcgtgtctacatctgtgggctcagaacactacgtcagcattctttcatttgtagacaaggatctgctggaacctggctgctcggtcctgctcaaccacaaggtgcatgccgtgataggggtgctgatggatgacacggatcccctggtcacagtgatgaaggtagaaaaggccccccaggagacctatgcagatattggggggttggacaaccaaattcaggaaattaaggaatctgtggagcttcctctcacccatcctgaatattatgaagagatgggtataaagcctcctaagggggtcattctctatggtccacctggcacaggtaaaaccttgttagccaaagcagtagcaaaccaaacctcagccactttcttgagagtggttggctctgaacttattcagaagtacctaggtgatgggcccaaactcgtacgggaattgttccgagttgctgaagaacatgcaccgtccatcgtgtttattgatgaaattgacgccattgggacaaaaagatatgactccaattctggtggtgagagagaaattcagcgaacaatgttggaactgctgaaccagttggatggatttgattctaggggagatgtgaaagttatcatggccacaaaccgaatagaaactttggatccagcacttatcagaccaggccgcattgacaggaagattgagttccccctgcctgatgaaaagacgaagaagcgcatctttcagattcacacaagcaggatgacgctggctgatgatgtaaccctggacgacctgatcatggctaaagatgacctctctggtgctgacatcaaggcaatctgtacagaagctggtctgatggccttaagagaacgtagaatgaaagtaacaaatgaagacttcaaaaaatctaaagaaaatgttctttataagaaacaggaaggcacccctgaggggctgtatctctaatgaaccatggctgtcatcaggaaaatggttgggagatttctcaatccctgaaagggatgaggttgggggagttgcccagaggaatccctgttcccactgatttttattagcaaaacatcctgtgtcttttggagtacgatgtgtaagtgcccattgggtggcctgttggtcactgtgcagcagtctgcttcccaataaagcgtgctctttcacaaaca

SEQ ID NO: 311426 - DNA, 1579 bp, Homo sapiens
aaaataatgtcataggtcgagtgctgggtgttattacgatgggtcaaagtcagagtggtggtcatggtcctggaggtggcaagaaggatgacaaggacaagaaaaagaaatatgaacctcctgtaccaactagagtggggaaaaagaagaagaaaacaaagggaccagatgctgccagcaaactgccactggtgacacctcacactcagtgccggttaaaattactgaagttagagagaattaaagactatcttctcatggaggaagaattcattagaaatcaggaacaaatgaaaccattagaagaaaagcaagaggaggaaagatcaaaagtggatgatctgagggggaccccgatgtcagtaggaaccttggaagagattattgatgacaatcatgccatcgtgtctacatctgtgggctcagaacactacgtcagcattctttcatttgtagacaaggatctgctggaacctggctgctcggtcctgctcaaccacaaggtgcatgccgtgataggggtgctgatggatgacacggatcccctggtcacagtgatgaaggtagaaaaggccccccaggagacctatgcagatattggggggttggacaaccaaattcaggaaattaaggaatctgtggagcttcctctcacccatcctgaatattatgaagagatgggtataaagcctcctaagggggtcattctctatggtccacctggcacaggtaaaaccttgttagccaaagcagtagcaaaccaaacctcagccactttcttgagagtggttggctctgaacttattcagaagtacctaggtgatgggcccaaactcgtacgggaattgttccgagttgctgaagaacatgcaccgtccatcgtgtttattgatgaaattgacgccattgggacaaaaagatatgactccaattctggtggtgagagagaaattcagcgaacaatgttggaactgctgaaccagttggatggatttgattctaggggagatgtgaaagttatcatggccacaaaccgaatagaaactttggatccagcacttatcagaccaggccgcattgacaggaagattgagttccccctgcctgatgaaaagacgaagaagcgcatctttcagattcacacaagcaggatgacgctggctgatgatgtaaccctggacgacctgatcatggctaaagatgacctctctggtgctgacatcaaggcaatctgtacagaagctggtctgatggccttaagagaacgtagaatgaaagtaacaaatgaagacttcaaaaaatctaaagaaaatgttctttataagaaacaggaaggcacccctgaggggctgtatctctaatgaaccatggctgtcatcaggaaaatggttgggagatttctcaatccctgaaagggatgaggttgggggagttgcccagaggaatccctgttcccactgatttttattagcaaaacatcctgtgtcttttggagtacgatgtgtaagtgcccattgggtggcctgttggtcactgtgcagcagtctgcttcccaataaagcgtgctctttcacaaaca

SEQ ID NO: 311427 - DNA, 1572 bp, Homo sapiens
tggctgtaccggcccgaatctttggatgcagatgggtcaaagtcagagtggtggtcatggtcctggaggtggcaagaaggatgacaaggacaagaaaaagaaatatgaacctcctgtaccaactagagtggggaaaaagaagaagaaaacaaagggaccagatgctgccagcaaactgccactggtgacacctcacactcagtgccggttaaaattactgaagttagagagaattaaagactatcttctcatggaggaagaattcattagaaatcaggaacaaatgaaaccattagaagaaaagcaagaggaggaaagatcaaaagtggatgatctgagggggaccccgatgtcagtaggaaccttggaagagattattgatgacaatcatgccatcgtgtctacatctgtgggctcagaacactacgtcagcattctttcatttgtagacaaggatctgctggaacctggctgctcggtcctgctcaaccacaaggtgcatgccgtgataggggtgctgatggatgacacggatcccctggtcacagtgatgaaggtagaaaaggccccccaggagacctatgcagatattggggggttggacaaccaaattcaggaaattaaggaatctgtggagcttcctctcacccatcctgaatattatgaagagatgggtataaagcctcctaagggggtcattctctatggtccacctggcacaggtaaaaccttgttagccaaagcagtagcaaaccaaacctcagccactttcttgagagtggttggctctgaacttattcagaagtacctaggtgatgggcccaaactcgtacgggaattgttccgagttgctgaagaacatgcaccgtccatcgtgtttattgatgaaattgacgccattgggacaaaaagatatgactccaattctggtggtgagagagaaattcagcgaacaatgttggaactgctgaaccagttggatggatttgattctaggggagatgtgaaagttatcatggccacaaaccgaatagaaactttggatccagcacttatcagaccaggccgcattgacaggaagattgagttccccctgcctgatgaaaagacgaagaagcgcatctttcagattcacacaagcaggatgacgctggctgatgatgtaaccctggacgacctgatcatggctaaagatgacctctctggtgctgacatcaaggcaatctgtacagaagctggtctgatggccttaagagaacgtagaatgaaagtaacaaatgaagacttcaaaaaatctaaagaaaatgttctttataagaaacaggaaggcacccctgaggggctgtatctctaatgaaccatggctgtcatcaggaaaatggttgggagatttctcaatccctgaaagggatgaggttgggggagttgcccagaggaatccctgttcccactgatttttattagcaaaacatcctgtgtcttttggagtacgatgtgtaagtgcccattgggtggcctgttggtcactgtgcagcagtctgcttcccaataaagcgtgctctttcacaaaca

SEQ ID NO: 311428 - DNA, 1570 bp, Homo sapiens
  misc_feature (21)..(21): n is a, c, g, or t
  misc_feature (23)..(23): n is a, c, g, or t
cgcgttacctccgcatgggcnanggcaagatgggtcaaagtcagagtggtggtcatggtcctggaggtggcaagaaggatgacaaggacaagaaaaagaaatatgaacctcctgtaccaactagagtggggaaaaagaagaagaaaacaaagggaccagatgctgccagcaaactgccactggtgacacctcacactcagtgccggttaaaattactgaagttagagagaattaaagactatcttctcatggaggaagaattcattagaaatcaggaacaaatgaaaccattagaagaaaagcaagaggaggaaagatcaaaagtggatgatctgagggggaccccgatgtcagtaggaaccttggaagagattattgatgacaatcatgccatcgtgtctacatctgtgggctcagaacactacgtcagcattctttcatttgtagacaaggatctgctggaacctggctgctcggtcctgctcaaccacaaggtgcatgccgtgataggggtgctgatggatgacacggatcccctggtcacagtgatgaaggtagaaaaggccccccaggagacctatgcagatattggggggttggacaaccaaattcaggaaattaaggaatctgtggagcttcctctcacccatcctgaatattatgaagagatgggtataaagcctcctaagggggtcattctctatggtccacctggcacaggtaaaaccttgttagccaaagcagtagcaaaccaaacctcagccactttcttgagagtggttggctctgaacttattcagaagtacctaggtgatgggcccaaactcgtacgggaattgttccgagttgctgaagaacatgcaccgtccatcgtgtttattgatgaaattgacgccattgggacaaaaagatatgactccaattctggtggtgagagagaaattcagcgaacaatgttggaactgctgaaccagttggatggatttgattctaggggagatgtgaaagttatcatggccacaaaccgaatagaaactttggatccagcacttatcagaccaggccgcattgacaggaagattgagttccccctgcctgatgaaaagacgaagaagcgcatctttcagattcacacaagcaggatgacgctggctgatgatgtaaccctggacgacctgatcatggctaaagatgacctctctggtgctgacatcaaggcaatctgtacagaagctggtctgatggccttaagagaacgtagaatgaaagtaacaaatgaagacttcaaaaaatctaaagaaaatgttctttataagaaacaggaaggcacccctgaggggctgtatctctaatgaaccatggctgtcatcaggaaaatggttgggagatttctcaatccctgaaagggatgaggttgggggagttgcccagaggaatccctgttcccactgatttttattagcaaaacatcctgtgtcttttggagtacgatgtgtaagtgcccattgggtggcctgttggtcactgtgcagcagtctgcttcccaataaagcgtgctctttcacaaaca

SEQ ID NO: 311429 - DNA, 1297 bp, Homo sapiens
gaaaaattagctaggtcgaggcccgggtgtgaatcggccgaggaacttccggcagcggcagctcaagtggccaaggcaagatgggtcaaagtcagagtggtggtcatggtcctggaggtggcaagaaggatgacaaggacaagaaaaagaaatatgaacctcctgtaccaactagagtggggaaaaagaagaagaaaacaaagggaccagatgctgccagcaaactgccactggtgacacctcacactcagtgccggttaaaattactgaagttagagagaattaaagactatcttctcatggaggaagaattcattagaaatcaggaacaaatgaaaccattagaagaaaagcaagaggaggaaagatcaaaagtggatgatctgagggggaccccgatgtcagtaggaaccttggaagagattattgatgacaatcatgccatcgtgtctacatctgtgggctcagaacactacgtcagcattctttcatttgtagacaaggatctgctggaacctggctgctcggtcctgctcaaccacaaggtgcatgccgtgataggggtgctgatggatgacacggatcccctggtcacagtgatgaaggtagaaaaggccccccaggagacctatgcagatattggggggttggacaaccaaattcaggaaattaaggaatctgtggagcttcctctcacccatcctgaatattatgaagagatgggtataaagcctcctaagggggtcattctctatggtccacctggcacaggtaaaaccttgttagccaaagcagtagcaaaccaaacctcagccactttcttgagagtggttggctctgaacttattcagaagtacctaggtgatgggcccaaactcgtacgggaattgttccgagttgctgaagaacatgcaccgtccatcgtgtttattgatgaaattgacgccattgggacaaaaagaggtagactttctcatacttattttgccttgtttagtagggaacaccgcatagctcttctcttgagaatgggcaatctcagggggctctccctatggccacagttcttgctgtgcgtggccttccatgcatgctttaggctctgctctcccaggagccagctaacaactgcccagtaactgtgaacgtctggagagactggtcagttatgaataaccatgtcttgagcacccgccctgatccaggaccatctggactctagggacacagttgtgagcacaagtctctgccctggaggagctcacaggttgtagggatcagataccaaacatggaaa

SEQ ID NO: 311430 - DNA, 1408 bp, Homo sapiens
ctgcccacgaagtgccactggtgacacctcacactcagtgccggttaaaattactgaagttagagagaattaaagactatcttctcatggaggaagaattcattagaaatcaggaacaaatgaaaccattagaagaaaagcaagaggaggaaagatcaaaagtggatgatctgagggggaccccgatgtcagtaggaaccttggaagagattattgatgacaatcatgccatcgtgtctacatctgtgggctcagaacactacgtcagcattctttcatttgtagacaaggatctgctggaacctggctgctcggtcctgctcaaccacaaggtgcatgccgtgataggggtgctgatggatgacacggatcccctggtcacagtgatgaaggtagaaaaggccccccaggagacctatgcagatattggggggttggacaaccaaattcaggaaattaaggaatctgtggagcttcctctcacccatcctgaatattatgaagagatgggtataaagcctcctaagggggtcattctctatggtccacctggcacaggtaaaaccttgttagccaaagcagtagcaaaccaaacctcagccactttcttgagagtggttggctctgaacttattcagaagtacctaggtgatgggcccaaactcgtacgggaattgttccgagttgctgaagaacatgcaccgtccatcgtgtttattgatgaaattgacgccattgggacaaaaagatatgactccaattctggtggtgagagagaaattcagcgaacaatgttggaactgctgaaccagttggatggatttgattctaggggagatgtgaaagttatcatggccacaaaccgaatagaaactttggatccagcacttatcagaccaggccgcattgacaggaagattgagttccccctgcctgatgaaaagacgaagaagcgcatctttcagattcacacaagcaggatgacgctggctgatgatgtaaccctggacgacctgatcatggctaaagatgacctctctggtgctgacatcaaggcaatctgtacagaagctggtctgatggccttaagagaacgtagaatgaaagtaacaaatgaagacttcaaaaaatctaaagaaaatgttctttataagaaacaggaaggcacccctgaggggctgtatctctaatgaaccatggctgtcatcaggaaaatggttgggagatttctcaatccctgaaagggatgaggttgggggagttgcccagaggaatccctgttcccactgatttttattagcaaaacatcctgtgtcttttggagtacgatgtgtaagtgcccattgggtggcctgttggtcactgtgcagcagtctgcttcccaataaagcgtgctctttcacaaaca

SEQ ID NO: 311431 - DNA, 1387 bp, Homo sapiens
ctgacttggattgactgctgtgttgggaatccactgcagggagatgaggctgaagtcagggagacaggtaggaagaattcattagaaatcaggaacaaatgaaaccattagaagaaaagcaagaggaggaaagatcaaaagtggatgatctgagggggaccccgatgtcagtaggaaccttggaagagattattgatgacaatcatgccatcgtgtctacatctgtgggctcagaacactacgtcagcattctttcatttgtagacaaggatctgctggaacctggctgctcggtcctgctcaaccacaaggtgcatgccgtgataggggtgctgatggatgacacggatcccctggtcacagtgatgaaggtagaaaaggccccccaggagacctatgcagatattggggggttggacaaccaaattcaggaaattaaggaatctgtggagcttcctctcacccatcctgaatattatgaagagatgggtataaagcctcctaagggggtcattctctatggtccacctggcacaggtaaaaccttgttagccaaagcagtagcaaaccaaacctcagccactttcttgagagtggttggctctgaacttattcagaagtacctaggtgatgggcccaaactcgtacgggaattgttccgagttgctgaagaacatgcaccgtccatcgtgtttattgatgaaattgacgccattgggacaaaaagatatgactccaattctggtggtgagagagaaattcagcgaacaatgttggaactgctgaaccagttggatggatttgattctaggggagatgtgaaagttatcatggccacaaaccgaatagaaactttggatccagcacttatcagaccaggccgcattgacaggaagattgagttccccctgcctgatgaaaagacgaagaagcgcatctttcagattcacacaagcaggatgacgctggctgatgatgtaaccctggacgacctgatcatggctaaagatgacctctctggtgctgacatcaaggcaatctgtacagaagctggtctgatggccttaagagaacgtagaatgaaagtaacaaatgaagacttcaaaaaatctaaagaaaatgttctttataagaaacaggaaggcacccctgaggggctgtatctctaatgaaccatggctgtcatcaggaaaatggttgggagatttctcaatccctgaaagggatgaggttgggggagttgcccagaggaatccctgttcccactgatttttattagcaaaacatcctgtgtcttttggagtacgatgtgtaagtgcccattgggtggcctgttggtcactgtgcagcagtctgcttcccaataaagcgtgctctttcacaaaca

SEQ ID NO: 311432 - DNA, 1561 bp, Homo sapiens
gaaaaattagctaggtcgaggcccgggtgtgaatcggccgaggaacttccggcagcggcagctcaagtggccaaggcaagatgggtcaaagtcagagtggtggtcatggtcctggaggtggcaagaaggatgacaaggacaagaaaaagaaatatgaacctcctgtaccaactagagtggggaaaaagaagaagaaaacaaagggaccagatgctgccagcaaactgccactggtgacacctcacactcagtgccggttaaaattactgaagttagagagaattaaagactatcttctcatggaggaagaattcattagaaatcaggaacaaatgaaaccattagaagaaaagcaagaggaggaaagatcaaaagtggatgatctgagggggaccccgatgtcagtaggaaccttggaagagattattgatgacaatcatgccatcgtgtctacatctgtgggctcagaacactacgtcagcattctttcatttgtagacaaggatctgctggaacctggctgctcggtcctgctcaaccacaaggtgcatgccgtgataggggtgctgatggatgacacggatcccctggtcacagtgatgaaggtagaaaaggaatctgtggagcttcctctcacccatcctgaatattatgaagagatgggtataaagcctcctaagggggtcattctctatggtccacctggcacaggtaaaaccttgttagccaaagcagtagcaaaccaaacctcagccactttcttgagagtggttggctctgaacttattcagaagtacctaggtgatgggcccaaactcgtacgggaattgttccgagttgctgaagaacatgcaccgtccatcgtgtttattgatgaaattgacgccattgggacaaaaagatatgactccaattctggtggtgagagagaaattcagcgaacaatgttggaactgctgaaccagttggatggatttgattctaggggagatgtgaaagttatcatggccacaaaccgaatagaaactttggatccagcacttatcagaccaggccgcattgacaggaagattgagttccccctgcctgatgaaaagacgaagaagcgcatctttcagattcacacaagcaggatgacgctggctgatgatgtaaccctggacgacctgatcatggctaaagatgacctctctggtgctgacatcaaggcaatctgtacagaagctggtctgatggccttaagagaacgtagaatgaaagtaacaaatgaagacttcaaaaaatctaaagaaaatgttctttataagaaacaggaaggcacccctgaggggctgtatctctaatgaaccatggctgtcatcaggaaaatggttgggagatttctcaatccctgaaagggatgaggttgggggagttgcccagaggaatccctgttcccactgatttttattagcaaaacatcctgtgtcttttggagtacgatgtgtaagtgcccattgggtggcctgttggtcactgtgcagcagtctgcttcccaataaagcgtgctctttcacaaaca

SEQ ID NO: 311433 - DNA, 1463 bp, Homo sapiens
ggtcctgtctcagctgtctgagctggcagcaagcccacccagtagctacttttctggagcagtaggcactgcatgcctggagctcaggaacacttcgtgtatctccttagggccaaagctaggattcccagacccttttttccagcactgatggtttcctaggagtttactttggctctacagccctgggttggatgggtcaggttaatgtatgcaactttgaaggggcccaagaaagactcaaccagagaaaaaaatgagatttatttcattactggaatgaagcaattcttcgtacaggtaattatagttcgcagcttttcaggggaaactgggtcaaggttggaaaataaccaagtaaaaagtattttctgacgttatcataagttcagcaaaatagctaaggataatccaaacatgttagtagatttttctaaatgtcctcttatctacttaggagaatggaatgtcgtgacacttgaattggtgccatgccttagcatgagggcccgcctgtttttggtgtccatttaaggtggtaatgatacgagtttttaagttaaaatggcacttaaggtgtcttttttttttttatctttttcatccaaaataggtaaaaccttgttagccaaagcagtagcaaaccaaacctcagccactttcttgagagtggttggctctgaacttattcagaagtacctaggtgatgggcccaaactcgtacgggaattgttccgagttgctgaagaacatgcaccgtccatcgtgtttattgatgaaattgacgccattgggacaaaaagatatgactccaattctggtggtgagagagaaattcagcgaacaatgttggaactgctgaaccagttggatggatttgattctaggggagatgtgaaagttatcatggccacaaaccgaatagaaactttggatccagcacttatcagaccaggccgcattgacaggaagattgagttccccctgcctgatgaaaagacgaagaagcgcatctttcagattcacacaagcaggatgacgctggctgatgatgtaaccctggacgacctgatcatggctaaagatgacctctctggtgctgacatcaaggcaatctgtacagaagctggtctgatggccttaagagaacgtagaatgaaagtaacaaatgaagacttcaaaaaatctaaagaaaatgttctttataagaaacaggaaggcacccctgaggggctgtatctctaatgaaccatggctgtcatcaggaaaatggttgggagatttctcaatccctgaaagggatgaggttgggggagttgcccagaggaatccctgttcccactgatttttattagcaaaacatcctgtgtcttttggagtacgatgtgtaagtgcccattgggtggcctgttggtcactgtgcagcagtctgcttcccaataaagcgtgctctttcacaaaca

SEQ ID NO: 311434 - DNA, 909 bp, Homo sapiens
tgcggttgactctagcaggatccctcataggttcgcaggtgtgatggtaggatttgtcctttttacattcaggtagcatcagaagaaacagtgatttgtttgctgtcttttgtaatgtttttaacacaataggtctgcccagtttcactcaggaattgctcctttcatttatttctgaaggtatcaaagcagagagagtttcttttaaatgaagagaattcaaatgtagaaatctacaaactacaaaaatatatgtttactttttaaaatttagacatccttcccacagaattctgtccgactgaaacttcgtatgtaaggagatgggctgaggcctctgagccatggccgagcctggggtttggatgttggtgtgacttcaaatctctttgtacctgcaggccgcattgacaggaagattgagttccccctgcctgatgaaaagacgaagaagcgcatctttcagattcacacaagcaggatgacgctggctgatgatgtaaccctggacgacctgatcatggctaaagatgacctctctggtgctgacatcaaggcaatctgtacagaagctggtctgatggccttaagagaacgtagaatgaaagtaacaaatgaagacttcaaaaaatctaaagaaaatgttctttataagaaacaggaaggcacccctgaggggctgtatctctaatgaaccatggctgtcatcaggaaaatggttgggagatttctcaatccctgaaagggatgaggttgggggagttgcccagaggaatccctgttcccactgatttttattagcaaaacatcctgtgtcttttggagtacgatgtgtaagtgcccattgggtggcctgttggtcactgtgcagcagtctgcttcccaataaagcgtgctctttcacaaaca

SEQ ID NO: 311435 - DNA, 1033 bp, Homo sapiens
gaaaaattagctaggtcgaggcccgggtgtgaatcggccgaggaacttccggcagcggcagctcaagtggccaaggcaagatgggtcaaagtcagagtggtggtcatggtcctggaggtggcaagaaggatgacaaggacaagaaaaagaaatatgaacctcctgtaccaactagagtggggaaaaagaagaagaaaacaaagggaccagatgctgccagcaaactgccactggtgacacctcacactcagtgccggttaaaattactgaagttagagagaattaaagactatcttctcatggaggaagaattcattagaaatcaggaacaaatgaaaccattagaagaaaagcaagaggaggaaagatcaaaagtggatgatctgagggggaccccgatgtcagtaggaaccttggaagagattattgatgacaatcatgccatcgtgtctacatctgtgggctcagaacactacgtcagcattctttcatttgtagacaaggatctgctggaacctggctgctcggtcctgctcaaccacaaggtgcatgccgtgataggggtgctgatggatgacacggatcccctggtcacagtgatgaaggtagaaaaggccccccaggagacctatgcagatattggggggttggacaaccaaattcaggaaattaagcacgaatctgtggagcttccatctcaacacatgctgactattatgacaagagatgggtcataaaagctccctaaagggcggtcatccctctatagagtcccaacctggacacacgcgtaaaaaaccattagtaagaccaaacgcagtacgcaaaccaaaagcctcaaggccagagttatctctgaggaagatgggttgggcgtcatgaaactaatttcagaaaacgtaccgtaagggtgaatgaggccaaaaacctgagtaaggggaaatgggtcccgaacatggtgaagaaaacgatgaaacacgacaaacggagataaatagataaaattgaggcgatagggaaaagaaagatatgc

SEQ ID NO: 311436 - DNA, 553 bp, Homo sapiens
tagtagagatggggtttcaccgtgttggccaggctggtcttgaactcctgaccttaggcgatccacctgcctcggcctcccagagtgctgggattacaggtgtgagccaccgcgcctggcctcagaataggttttttggaattccttgttagaataaaaatgagtatgtcactttctgaacacactcttctttcttacaggcaatctgtacagaagctggtctgatggccttaagagaacgtagaatgaaagtaacaaatgaagacttcaaaaaatctaaagaaaatgttctttataagaaacaggaaggcacccctgaggggctgtatctctaatgaaccatggctgtcatcaggaaaatggttgggagatttctcaatccctgaaagggatgaggttgggggagttgcccagaggaatccctgttcccactgatttttattagcaaaacatcctgtgtcttttggagtacgatgtgtaagtgcccattgggtggcctgttggtcactgtgcagcagtctgcttcccaataaagcgtgctctttcacaaaca

SEQ ID NO: 311437 - DNA, 466 bp, Homo sapiens
gaaaaattagctaggtcgaggcccgggtgtgaatcggccgaggaacttccggcagcggcagctcaagtggccaaggcaagatgggtcaaagtcagagtggtggtcatggtcctggaggtggcaagaaggatgacaaggacaagaaaaagaaatatgaacctcctgtaccaactagagtggggaaaaagaagaagaaaacaaagggaccagatgctgccagcaaactgccactggtgacacctcacactcagtgccggttaaaattactgaagttagagagaattaaagactatcttctcatggaggaagaattcattagaaatcaggaacaaatgaaaccattagaagaaaagcaagagaggaaagatcaaaagttggaatggaaatttcccttttttgtggaaaaaaaggggggggggggggctctctttctttaaaaaaatcatgccatcgtggtctacatttg

SEQ ID NO: 311438 - DNA, 140 bp, Homo sapiens
aagaaaacaaagggaccagatgctgccagcaaactgccactgggtaatgacatggcttctccttgccatctttccagttcttaggataaaccatctctgtgcatgtagcttagagtctgaaaggggtaacaggaagtaga

SEQ ID NO: 311439 - DNA, 620 bp, Homo sapiens
gccgcctactactactaaattcgcggccgctcgactgattctaggggagatgtgaaagttatcatggccacaaaccgaatagaaactttggatccagcacttatcagaccaggccgcattgacaggaagattgagttccccctgcctgatgaaaagacgaagaagcgcatctttcagattcacacaagcaggatgacgctggctgatgatgtaaccctggacgacctgatcatggctaaagatgacctctctggtgctgacatcaaggcaatctgtacagaagctggtctgatggccttaagagaacgtagaatgaaagtaacaaatgaagacttcaaaaaatctaaagaaaatgttctttataagaaacaggaaggcacccctgaggggctgtatctctaatgaaccatggctgtcatcaggaaaatggttgggagatttctcaatccctgaaagggatgaggttgggggagttgcccagaggaatccctgttcccactgatttttattagcaaaacatcctgtgtcttttggagtacgatgtgtaagtgcccattgggtggcctgttggtcactgtgcagcagtctgcttcccaataaagcgtgctctttcacaaaca

SEQ ID NO: 311440 - DNA, 2269 bp, Homo sapiens
gaaaaattagctaggtcgaggcccgggtgtgaatcggccgaggaacttccggcagcggcagctcaagtggccaaggcaagatgggtcaaagtcagagtggtggtcatggtcctggaggtggcaagaaggatgacaaggacaagaaaaagaaatatgaacctcctgtaccaactagagtggggaaaaagaagaagaaaacaaagggaccagatgctgccagcaaactgccactggtgacacctcacactcagtgccggttaaaattactgaagttagagagaattaaagactatcttctcatggaggaagaattcattagaaatcaggaacaaatgaaaccattagaagaaaagcaagaggaggaaagatcaaaagtggatgatctgagggggaccccgatgtcagtaggaaccttggaagagattattgatgacaatcatgccatcgtgtctacatctgtgggctcagaacactacgtcagcattctttcatttgtagacaaggatctgctggaacctggctgctcggtcctgctcaaccacaaggtgcatgccgtgataggggtgctgatggatgacacggatcccctggtcacagtgatgaaggtagaaaaggccccccaggagacctatgcagatattggggggttggacaaccaaattcaggaaattaaggaatctgtggagcttcctctcacccatcctgaatattatgaagagatgggtataaagcctcctaagggggtcattctctatggtccacctggcacaggtaaaaccttgttagccaaagcagtagcaaaccaaacctcagccactttcttgagagtggttggctctgaacttattcagaagtacctaggtgatgggcccaaactcgtacgggaattgttccgagttgctgaagaacatgcaccgtccatcgtgtttattgatgaaattgacgccattgggacaaaaagatatgactccaattctggtggtgagagagaaattcagcgaacaatgttggaactgctgaaccagttggatggatttgattctaggggagatgtgaaagttatcatggccacaaaccgaatagaaactttggatccagcacttatcagaccaggccgcattgacaggaagattgagttccccctgcctgatgaaaagacgaagaagcgcatctttcagattcacacaagcaggatgacgctggctgatgatgtaaccctggacgacctgatcatggctaaagatgacctctctggtgctgacatcaaggcaatctgtacagaagctggtctgatggccttaagagaacgtagaatgaaagtaacaaatgaagacttcaaaaaatctaaagaaaatgttctttataagaaacaggaaggcacccctgaggggctgtatctctaatgaaccatggctgtcatcaggaaaatggttgggagatttctcaatccctgaaagggatgaggttgggggagttgcccagaggaatccctgttcccactgatttttattagcaaaacatcctgtgtcttttggagtacgatgtgtaagtgcccattgggtggcctgttggtcactgtgcagcagtctgcttcccaataaagcgtgctctttcacaaacacttcctgtttctgcagtctccacacacacctaccgctcaacagcagcctgtgggtggacccagctacagggaagcctttggacaggaactcaggctgcggtcccaaggagtgtggacctcactatgcgttcgccacatcacacccccagagctggcgttcaacggtaattacagtgggaaatggtcactaccacagagccagggatattcgttgtttaaataataaaggctgcgttaatgtggctattgcttccaaaggaagtacagctttcctttttggaagttttgtggaccatgcatgttcttagcactctgagggcagaaaataactactggtgttcccaagagactgaggattcctagagatatcttgaaagcccttctgagcccttgggctcagaaatctcatccctttcaaggtgttcagaaacatgtcagaacttccccttccctttctccgtctatttccgtcatttctctttctgaacaaatcaggcctaaagctattaagtgggacagatcaaggtaagcgttcccttgacaggtggcctggtgtgggttgtagggcccacactgaatgaggagtgtgcattagttttctgttaatactataacaacaacactccaacaggggatcctcagagtcga

SEQ ID NO: 311441 - DNA, 1624 bp, Homo sapiens
acaacagcccaccacacagacaaaaaaggctagtgcgagccggcgtgatcggacgaggcggcagctcagtggtcaagggcaagatgggtcaaagtcagagtggtggtcatggtcctggaggtggcaagaaggatgacaaggacaagaaaaagaaatatgaacctcctgtaccaactagagtggggaaaaagaagaagaaaacaaagggaccagatgctgccagcaaactgccactggtgacacctcacactcagtgccggttaaaattactgaagttagagagaattaaagactatcttctcatggaggaagaattcattagaaatcaggaacaaatgaaaccattagaagaaaagcaagaggaggaaagatcaaaagtggatgatctgagggggaccccgatgtcagtaggaaccttggaagagattattgatgacaatcatgccatcgtgtctacatctgtgggctcagaacactacgtcagcattctttcatttgtagacaaggatctgctggaacctggctgctcggtcctgctcaaccacaaggtgcatgccgtgataggggtgctgatggatgacacggatcccctggtcacagtgatgaaggtagaaaaggccccccaggagacctatgcagatattggggggttggacaaccaaattcaggaaattaaggaatctgtggagcttcctctcacccatcctgaatattatgaagagatgggtataaagcctcctaagggggtcattctctatggtccacctggcacaggtaaaaccttgttagccaaagcagtagcaaaccaaacctcagccactttcttgagagtggttggctctgaacttattcagaagtacctaggtgatgggcccaaactcgtacgggaattgttccgagttgctgaagaacatgcaccgtccatcgtgtttattgatgaaattgacgccattgggacaaaaagatatgactccaattctggtggtgagagagaaattcagcgaacaatgttggaactgctgaaccagttggatggatttgattctaggggagatgtgaaagttatcatggccacaaaccgaatagaaactttggatccagcacttatcagaccaggccgcattgacaggaagattgagttccccctgcctgatgaaaagacgaagaagcgcatctttcagattcacacaagcaggatgacgctggctgatgatgtaaccctggacgacctgatcatggctaaagatgacctctctggtgctgacatcaaggcaatctgtacagaagctggtctgatggccttaagagaacgtagaatgaaagtaacaaatgaagacttcaaaaaatctaaagaaaatgttctttataagaaacaggaaggcacccctgaggggctgtatctctaatgaaccatggctgtcatcaggaaaatggttgggagatttctcaatccctgaaagggatgaggttgggggagttgcccagaggaatccctgttcccactgatttttattagcaaaacatcctgtgtcttttggagtacgatgtgtaagtgcccattgggtggcctgttggtcactgtgcagcagtctgcttcccaataaagcgtgctctttcacaaaca

SEQ ID NO: 311442 - DNA, 1578 bp, Homo sapiens
tggtacgcctccggatggttacgggatccaaggcaagatgggtcaaagtcagagtggtggtcatggtcctggaggtggcaagaaggatgacaaggacaagaaaaagaaatatgaacctcctgtaccaactagagtggggaaaaagaagaagaaaacaaagggaccagatgctgccagcaaactgccactggtgacacctcacactcagtgccggttaaaattactgaagttagagagaattaaagactatcttctcatggaggaagaattcattagaaatcaggaacaaatgaaaccattagaagaaaagcaagaggaggaaagatcaaaagtggatgatctgagggggaccccgatgtcagtaggaaccttggaagagattattgatgacaatcatgccatcgtgtctacatctgtgggctcagaacactacgtcagcattctttcatttgtagacaaggatctgctggaacctggctgctcggtcctgctcaaccacaaggtgcatgccgtgataggggtgctgatggatgacacggatcccctggtcacagtgatgaaggtagaaaaggccccccaggagacctatgcagatattggggggttggacaaccaaattcaggaaattaaggaatctgtggagcttcctctcacccatcctgaatattatgaagagatgggtataaagcctcctaagggggtcattctctatggtccacctggcacaggtaaaaccttgttagccaaagcagtagcaaaccaaacctcagccactttcttgagagtggttggctctgaacttattcagaagtacctaggtgatgggcccaaactcgtacgggaattgttccgagttgctgaagaacatgcaccgtccatcgtgtttattgatgaaattgacgccattgggacaaaaagatatgactccaattctggtggtgagagagaaattcagcgaacaatgttggaactgctgaaccagttggatggatttgattctaggggagatgtgaaagttatcatggccacaaaccgaatagaaactttggatccagcacttatcagaccaggccgcattgacaggaagattgagttccccctgcctgatgaaaagacgaagaagcgcatctttcagattcacacaagcaggatgacgctggctgatgatgtaaccctggacgacctgatcatggctaaagatgacctctctggtgctgacatcaaggcaatctgtacagaagctggtctgatggccttaagagaacgtagaatgaaagtaacaaatgaagacttcaaaaaatctaaagaaaatgttctttataagaaacaggaaggcacccctgaggggctgtatctctaatgaaccatggctgtcatcaggaaaatggttgggagatttctcaatccctgaaagggatgaggttgggggagttgcccagaggaatccctgttcccactgatttttattagcaaaacatcctgtgtcttttggagtacgatgtgtaagtgcccattgggtggcctgttggtcactgtgcagcagtctgcttcccaataaagcgtgctctttcacaaaca

SEQ ID NO: 311443 - DNA, 1570 bp, Homo sapiens
taggctagtacgggctggtggtgaatcggccgggtcaaagtcagagtggtggtcatggtcctggaggtggcaagaaggatgacaaggacaagaaaaagaaatatgaacctcctgtaccaactagagtggggaaaaagaagaagaaaacaaagggaccagatgctgccagcaaactgccactggtgacacctcacactcagtgccggttaaaattactgaagttagagagaattaaagactatcttctcatggaggaagaattcattagaaatcaggaacaaatgaaaccattagaagaaaagcaagaggaggaaagatcaaaagtggatgatctgagggggaccccgatgtcagtaggaaccttggaagagattattgatgacaatcatgccatcgtgtctacatctgtgggctcagaacactacgtcagcattctttcatttgtagacaaggatctgctggaacctggctgctcggtcctgctcaaccacaaggtgcatgccgtgataggggtgctgatggatgacacggatcccctggtcacagtgatgaaggtagaaaaggccccccaggagacctatgcagatattggggggttggacaaccaaattcaggaaattaaggaatctgtggagcttcctctcacccatcctgaatattatgaagagatgggtataaagcctcctaagggggtcattctctatggtccacctggcacaggtaaaaccttgttagccaaagcagtagcaaaccaaacctcagccactttcttgagagtggttggctctgaacttattcagaagtacctaggtgatgggcccaaactcgtacgggaattgttccgagttgctgaagaacatgcaccgtccatcgtgtttattgatgaaattgacgccattgggacaaaaagatatgactccaattctggtggtgagagagaaattcagcgaacaatgttggaactgctgaaccagttggatggatttgattctaggggagatgtgaaagttatcatggccacaaaccgaatagaaactttggatccagcacttatcagaccaggccgcattgacaggaagattgagttccccctgcctgatgaaaagacgaagaagcgcatctttcagattcacacaagcaggatgacgctggctgatgatgtaaccctggacgacctgatcatggctaaagatgacctctctggtgctgacatcaaggcaatctgtacagaagctggtctgatggccttaagagaacgtagaatgaaagtaacaaatgaagacttcaaaaaatctaaagaaaatgttctttataagaaacaggaaggcacccctgaggggctgtatctctaatgaaccatggctgtcatcaggaaaatggttgggagatttctcaatccctgaaagggatgaggttgggggagttgcccagaggaatccctgttcccactgatttttattagcaaaacatcctgtgtcttttggagtacgatgtgtaagtgcccattgggtggcctgttggtcactgtgcagcagtctgcttcccaataaagcgtgctctttcacaaaca

SEQ ID NO: 311444 - DNA, 1592 bp, Homo sapiens
aataaaaaaaacaatcggcagaggaggctggggtaatcggccgaggggcagacgggtcaaagtcagagtggtggtcatggtcctggaggtggcaagaaggatgacaaggacaagaaaaagaaatatgaacctcctgtaccaactagagtggggaaaaagaagaagaaaacaaagggaccagatgctgccagcaaactgccactggtgacacctcacactcagtgccggttaaaattactgaagttagagagaattaaagactatcttctcatggaggaagaattcattagaaatcaggaacaaatgaaaccattagaagaaaagcaagaggaggaaagatcaaaagtggatgatctgagggggaccccgatgtcagtaggaaccttggaagagattattgatgacaatcatgccatcgtgtctacatctgtgggctcagaacactacgtcagcattctttcatttgtagacaaggatctgctggaacctggctgctcggtcctgctcaaccacaaggtgcatgccgtgataggggtgctgatggatgacacggatcccctggtcacagtgatgaaggtagaaaaggccccccaggagacctatgcagatattggggggttggacaaccaaattcaggaaattaaggaatctgtggagcttcctctcacccatcctgaatattatgaagagatgggtataaagcctcctaagggggtcattctctatggtccacctggcacaggtaaaaccttgttagccaaagcagtagcaaaccaaacctcagccactttcttgagagtggttggctctgaacttattcagaagtacctaggtgatgggcccaaactcgtacgggaattgttccgagttgctgaagaacatgcaccgtccatcgtgtttattgatgaaattgacgccattgggacaaaaagatatgactccaattctggtggtgagagagaaattcagcgaacaatgttggaactgctgaaccagttggatggatttgattctaggggagatgtgaaagttatcatggccacaaaccgaatagaaactttggatccagcacttatcagaccaggccgcattgacaggaagattgagttccccctgcctgatgaaaagacgaagaagcgcatctttcagattcacacaagcaggatgacgctggctgatgatgtaaccctggacgacctgatcatggctaaagatgacctctctggtgctgacatcaaggcaatctgtacagaagctggtctgatggccttaagagaacgtagaatgaaagtaacaaatgaagacttcaaaaaatctaaagaaaatgttctttataagaaacaggaaggcacccctgaggggctgtatctctaatgaaccatggctgtcatcaggaaaatggttgggagatttctcaatccctgaaagggatgaggttgggggagttgcccagaggaatccctgttcccactgatttttattagcaaaacatcctgtgtcttttggagtacgatgtgtaagtgcccattgggtggcctgttggtcactgtgcagcagtctgcttcccaataaagcgtgctctttcacaaaca

SEQ ID NO: 311445 - DNA, 2023 bp, Homo sapiens
gaaaaattagctaggtcgaggcccgggtgtgaatcggccgaggaacttccggcagcggcagctcaagtggccaaggcaagatgggtcaaagtcagagtggtggtcatggtcctggaggtggcaagaaggatgacaaggacaagaaaaagaaatatgaacctcctgtaccaactagagtggggaaaaagaagaagaaaacaaagggaccagatgctgccagcaaactgccactggtgacacctcacactcagtgccggttaaaattactgaagttagagagaattaaagactatcttctcatggaggaagaattcattagaaatcaggaacaaatgaaaccattagaagaaaagcaagaggaggaaagatcaaaagtggatgatctgagggggaccccgatgtcagtaggaaccttggaagagattattgatgacaatcatgccatcgtgtctacatctgtgggctcagaacactacgtcagcattctttcatttgtagacaaggatctgctggaacctggctgctcggtcctgctcaaccacaaggtgcatgccgtgataggggtgctgatggatgacacggatcccctggtcacagtgatgaaggtagaaaaggccccccaggagacctatgcagatattggggggttggacaaccaaattcaggaaattaaggaatctgtggagcttcctctcacccatcctgaatattatgaagagatgggtataaagcctcctaagggggtcattctctatggtccacctggcacaggtaaaaccttgttagccaaagcagtagcaaaccaaacctcagccactttcttgagagtggttggctctgaacttattcagaagtacctaggtgatgggcccaaactcgtacgggaattgttccgagttgctgaagaacatgcaccgtccatcgtgtttattgatgaaattgacgccattgggacaaaaagatatgactccaattctggtggtgagagagaaattcagcgaacaatgttggaactgctgaaccagttggatggatttgattctaggggagatgtgaaagttatcatggccacaaaccgaatagaaactttggatccagcacttatcagaccaggttaaatttgctttggtttcatcatggagattaatgtgtttatatatttgtgtttaagtgtgctttgggaggcctataaaatgatacataaaaaagcaaatactgcagtgaaacttaggataatttacaaaaaaataggtcctcttgagatgagggttaaaacagagcatgatatggtctgtgcaccttggccctttgaattccagtcttatgtcttgtcttttcttttccataacattccctttttagcctcaagaacttgctgctttttctggaagaaataattcatgtgatggtaggatttgtcctttttacattcaggtagcatcagaagaaacagtgatttgtttgctgtcttttgtaatgtttttaacacaataggtctgcccagtttcactcaggaattgctcctttcatttatttctgaaggtatcaaagcagagagagtttcttttaaatgaagagaattcaaatgtagaaatctacaaactacaaaaatatatgtttactttttaaaatttagacatccttcccacagaattctgtccgactgaaacttcgtatgtaaggagatgggctgaggcctctgagccatggccgagcctggggtttggatgttggtgtgacttcaaatctctttgtacctgcaggccgcattgacaggaagattgagttccccctgcctgatgaaaagacgaagaagcgcatctttcagattcacacaagcaggatgacgctggctgatgatgtaaccctggacgacctgatcatggctaaagatgacctctctggtgctgacatcaaggtgagagcctagccgtgtcagcttatttctgggaatgtggccgtcaatcaggaaagagtctatatgtgctcttgggatggtggttggcctggacaggtgggtgtc

SEQ ID NO: 311446 - DNA, 1565 bp, Homo sapiens
agagagagagagagagagtcagagatgagagatgagtaggatcataggatcacgtggaagagtggcaagaaggatgacaaggacaagaaaaagaaatatgaacctcctgtaccaactagagtggggaaaaagaagaagaaaacaaagggaccagatgctgccagcaaactgccactggtgacacctcacactcagtgccggttaaaattactgaagttagagagaattaaagactatcttctcatggaggaagaattcattagaaatcaggaacaaatgaaaccattagaagaaaagcaagaggaggaaagatcaaaagtggatgatctgagggggaccccgatgtcagtaggaaccttggaagagattattgatgacaatcatgccatcgtgtctacatctgtgggctcagaacactacgtcagcattctttcatttgtagacaaggatctgctggaacctggctgctcggtcctgctcaaccacaaggtgcatgccgtgataggggtgctgatggatgacacggatcccctggtcacagtgatgaaggtagaaaaggccccccaggagacctatgcagatattggggggttggacaaccaaattcaggaaattaaggaatctgtggagcttcctctcacccatcctgaatattatgaagagatgggtataaagcctcctaagggggtcattctctatggtccacctggcacaggtaaaaccttgttagccaaagcagtagcaaaccaaacctcagccactttcttgagagtggttggctctgaacttattcagaagtacctaggtgatgggcccaaactcgtacgggaattgttccgagttgctgaagaacatgcaccgtccatcgtgtttattgatgaaattgacgccattgggacaaaaagatatgactccaattctggtggtgagagagaaattcagcgaacaatgttggaactgctgaaccagttggatggatttgattctaggggagatgtgaaagttatcatggccacaaaccgaatagaaactttggatccagcacttatcagaccaggccgcattgacaggaagattgagttccccctgcctgatgaaaagacgaagaagcgcatctttcagattcacacaagcaggatgacgctggctgatgatgtaaccctggacgacctgatcatggctaaagatgacctctctggtgctgacatcaaggcaatctgtacagaagctggtctgatggccttaagagaacgtagaatgaaagtaacaaatgaagacttcaaaaaatctaaagaaaatgttctttataagaaacaggaaggcacccctgaggggctgtatctctaatgaaccatggctgtcatcaggaaaatggttgggagatttctcaatccctgaaagggatgaggttgggggagttgcccagaggaatccctgttcccactgatttttattagcaaaacatcctgtgtcttttggagtacgatgtgtaagtgcccattgggtggcctgttggtcactgtgcagcagtctgcttcccaataaagcgtgctctttcacaaaca

SEQ ID NO: 311447 - DNA, 1513 bp, Homo sapiens
  misc_feature (21)..(21): n is a, c, g, or t
  misc_feature (23)..(23): n is a, c, g, or t
cgcgttacctccgcatgggcnanggcaagatgggtcaaagtcagagtggtggtcatggtcctggaggtggcaagaaggatgacaaggacaagaaaaagaaatatgaacctcctgtaccaactagagtggggaaaaagaagaagaaaacaaagggaccagatgctgccagcaaactgccactggtgacacctcacactcagtgccggttaaaattactgaagttagagagaattaaagactatcttctcatggaggaagaattcattagaaatcaggaacaaatgaaaccattagaagaaaagcaagaggaagagattattgatgacaatcatgccatcgtgtctacatctgtgggctcagaacactacgtcagcattctttcatttgtagacaaggatctgctggaacctggctgctcggtcctgctcaaccacaaggtgcatgccgtgataggggtgctgatggatgacacggatcccctggtcacagtgatgaaggtagaaaaggccccccaggagacctatgcagatattggggggttggacaaccaaattcaggaaattaaggaatctgtggagcttcctctcacccatcctgaatattatgaagagatgggtataaagcctcctaagggggtcattctctatggtccacctggcacaggtaaaaccttgttagccaaagcagtagcaaaccaaacctcagccactttcttgagagtggttggctctgaacttattcagaagtacctaggtgatgggcccaaactcgtacgggaattgttccgagttgctgaagaacatgcaccgtccatcgtgtttattgatgaaattgacgccattgggacaaaaagatatgactccaattctggtggtgagagagaaattcagcgaacaatgttggaactgctgaaccagttggatggatttgattctaggggagatgtgaaagttatcatggccacaaaccgaatagaaactttggatccagcacttatcagaccaggccgcattgacaggaagattgagttccccctgcctgatgaaaagacgaagaagcgcatctttcagattcacacaagcaggatgacgctggctgatgatgtaaccctggacgacctgatcatggctaaagatgacctctctggtgctgacatcaaggcaatctgtacagaagctggtctgatggccttaagagaacgtagaatgaaagtaacaaatgaagacttcaaaaaatctaaagaaaatgttctttataagaaacaggaaggcacccctgaggggctgtatctctaatgaaccatggctgtcatcaggaaaatggttgggagatttctcaatccctgaaagggatgaggttgggggagttgcccagaggaatccctgttcccactgatttttattagcaaaacatcctgtgtcttttggagtacgatgtgtaagtgcccattgggtggcctgttggtcactgtgcagcagtctgcttcccaataaagcgtgctctttcacaaaca

SEQ ID NO: 311448 - DNA, 1031 bp, Homo sapiens
tcggtacccccaatcaacatccaagccccccaggagacctatgcagatattggggggttggacaaccaaattcaggaaattaaggaatctgtggagcttcctctcacccatcctgaatattatgaagagatgggtataaagcctcctaagggggtcattctctatggtccacctggcacaggtaaaaccttgttagccaaagcagtagcaaaccaaacctcagccactttcttgagagtggttggctctgaacttattcagaagtacctaggtgatgggcccaaactcgtacgggaattgttccgagttgctgaagaacatgcaccgtccatcgtgtttattgatgaaattgacgccattgggacaaaaagatatgactccaattctggtggtgagagagaaattcagcgaacaatgttggaactgctgaaccagttggatggatttgattctaggggagatgtgaaagttatcatggccacaaaccgaatagaaactttggatccagcacttatcagaccaggccgcattgacaggaagattgagttccccctgcctgatgaaaagacgaagaagcgcatctttcagattcacacaagcaggatgacgctggctgatgatgtaaccctggacgacctgatcatggctaaagatgacctctctggtgctgacatcaaggcaatctgtacagaagctggtctgatggccttaagagaacgtagaatgaaagtaacaaatgaagacttcaaaaaatctaaagaaaatgttctttataagaaacaggaaggcacccctgaggggctgtatctctaatgaaccatggctgtcatcaggaaaatggttgggagatttctcaatccctgaaagggatgaggttgggggagttgcccagaggaatccctgttcccactgatttttattagcaaaacatcctgtgtcttttggagtacgatgtgtaagtgcccattgggtggcctgttggtcactgtgcagcagtctgcttcccaataaagcgtgctctttcacaaaca

SEQ ID NO: 311449 - DNA, 1170 bp, Homo sapiens
tgtatttcccacagttctggaggctgagaagcccaagatcaaggcactggcattgatgtctagtgagggctgctctctgcttccgagatggcacctattctgcagaggagacaaatgctcaggggacaaacaaaagagcaaaaagggcctacactagttccctgcagcattttttataaggaatacatgctgtataaggcctttttctctttttagaaggaactcatgctgtataaggctctgcctcatgcctttagccctttccaaaaggcctcatctcttagccacacagtagggattaagtttcaacacataaatttggggaaatacattcagaccatggcaaggggtgctgaatttattttttccgagcataattgagggagtgccatgtgagttgaaacaggaatgtttgttaaggtgttttgtcacaatgaggtctttgctgtaattccccttgagcaggcgatcagttgagtcttcattccttccctttttttttttccaaagatatgactccaattctggtggtgagagagaaattcagcgaacaatgttggaactgctgaaccagttggatggatttgattctaggggagatgtgaaagttatcatggccacaaaccgaatagaaactttggatccagcacttatcagaccaggccgcattgacaggaagattgagttccccctgcctgatgaaaagacgaagaagcgcatctttcagattcacacaagcaggatgacgctggctgatgatgtaaccctggacgacctgatcatggctaaagatgacctctctggtgctgacatcaaggcaatctgtacagaagctggtctgatggccttaagagaacgtagaatgaaagtaacaaatgaagacttcaaaaaatctaaagaaaatgttctttataagaaacaggaaggcacccctgaggggctgtatctctaatgaaccatggctgtcatcaggaaaatggttgggagatttctcaatccctgaaagggatgaggttgggggagttgcccagaggaatccctgttcccactgatttttattagcaaaacatcctgtgtcttttggagtacgatgtgtaagtgcccattgggtggcctgttggtcactgtgcagcagtctgcttcccaataaagcgtgctctttcacaaaca

SEQ ID NO: 311450 - DNA, 932 bp, Homo sapiens
tgagcaaggctcagcctcaagattcacagcatctcagacgcagcctaggccgcaccaggatgtcggacaccgaggagcaggaatatgaggaggagcagccggaagaggaggctgcggaggaggaggaggaagcccccgaagagccggagccggtggcagagccagaagaggaacgccccaaaccaagccgccccgtggtgcctcctttgatcccgccaaagatcccagaaggggagcgcgttgacttcgatgacatccaccgcaagcgcatggagaaagacctgctggagctgcagacactcatcgatgtacatttcgagcagcggaagaaggaggaagaggagctggttgccttgaaggagcgcattgagcggcgccggtcagagagagccgagcaacagcgcttcagaactgagaaggaacgcgaacgtcaggctaagctggcggaggagaagatgaggaaggaagaggaagaggccaagaagcgggcagaggatgatgccaagaaaaagaaggtgctgtccaacatgggggcccattttggcggctacctggtcaaggcagaacagaagcgtggtaagcggcagacggggcgggagatgaaggtgcgcatcctctccgagcgtaagaagcctctggacattgactacatgggggaggaacagctccgggagaaagcccaggagctgtcggactggatccaccagctggagtctgagaagttcgacctgatggcgaagctgaaacagcagaaatatgagatcaacgtgctgtacaaccgcatcagccacgcccagaagttccggaagggggcagggaagggccgcgttggaggccgctggaagtgaggatgccgccccggacagtggcacctgggaagcctgggagtgtttgtcccatcggtagcttgaaataaacgctcccctcagaca

SEQ ID NO: 311451 - DNA, 899 bp, Homo sapiens
tgagcaaggctcagcctcaagattcacagcatctcagacgcagcctaggccgcaccaggatgtcggacaccgaggagcaggaatatgaggaggagcagccggaagaggaggctgcggaggaggaggaggaagaagaggaacgccccaaaccaagccgccccgtggtgcctcctttgatcccgccaaagatcccagaaggggagcgcgttgacttcgatgacatccaccgcaagcgcatggagaaagacctgctggagctgcagacactcatcgatgtacatttcgagcagcggaagaaggaggaagaggagctggttgccttgaaggagcgcattgagcggcgccggtcagagagagccgagcaacagcgcttcagaactgagaaggaacgcgaacgtcaggctaagctggcggaggagaagatgaggaaggaagaggaagaggccaagaagcgggcagaggatgatgccaagaaaaagaaggtgctgtccaacatgggggcccattttggcggctacctggtcaaggcagaacagaagcgtggtaagcggcagacggggcgggagatgaaggtgcgcatcctctccgagcgtaagaagcctctggacattgactacatgggggaggaacagctccgggagaaagcccaggagctgtcggactggatccaccagctggagtctgagaagttcgacctgatggcgaagctgaaacagcagaaatatgagatcaacgtgctgtacaaccgcatcagccacgcccagaagttccggaagggggcagggaagggccgcgttggaggccgctggaagtgaggatgccgccccggacagtggcacctgggaagcctgggagtgtttgtcccatcggtagcttgaaataaacgctcccctcagaca

SEQ ID NO: 311452 - DNA, 640 bp, Homo sapiens
tgagcaaggctcagcctcaagattcacagcatctcagacgcagcctaggccgcaccaggatgtcggacaccgaggagcaggaatatgaggagagaggaggctgcggaggaggaggaggaagcccccgaagagccggagccggtggcagagccaggaggagaagatgaggaaggaagaggaagaggccaagaagcgggcagaggatgatgccaagaaaaagaaggtgctgtccaacatgggggcccattttggcggctacctggtcaaggcagaacagaagcgtggtaagcggcagacggggcgggagatgaaggtgcgcatcctctccgagcgtaagaagcctctggacattgactacatgggggaggaacagctccgggagaaagcccaggagctgtcggactggatccaccagctggagtctgagaagttcgacctgatggcgaagctgaaacagcagaaatatgagatcaacgtgctgtacaaccgcatcagccacgcccagaagttccggaagggggcagggaagggccgcgttggaggccgctggaagtgaggatgccgccccggacagtggcacctgggaagcctgggagtgtttgtcccatcggtagcttgaaataaacgctcccctcagaca

SEQ ID NO: 311453 - DNA, 798 bp, Homo sapiens
atgggatggggacacgcccaggagctcttgggaggggaggcgaggagtgtggcactttggcggggaaggggcggctcagccctcgggccctcgcccgccctctccgggtctggagcgtctcctcgcgccatccctgcaccgccagggggaacgtgcccatcgcagccgaggccagagggacccccgtccagcagagactggaaccctggtctctggccaccgcccccatccctcccccagctcctaacgccttctcttctgtgcccccatctccagaggaggctgcggaggaggaggaggaagcccccgaagagccggagccggtggcagagccagaagaggaacgccccaaaccaagccgccccgtggtgcctcctttgatcccgccaaagatcccagaaggggagcgcgttgacttcgatgacatccaccgcaagcgcatggagaaagacctgctggagctgcagacactcatcgatgtacatttcgagcagcggaagaaggaggaagaggagctggttgccttgaaggagcgcattgagcggcgccggtcagagagagccgagcaacagcgcttcagaactgagaaggaacgcgaacgtcaggctaagctggcggaggagaagatgaggaaggaagaggaagaggccaagaagcgggcagaggatgatgccaagaaaaagaaggtgctgtccaacatgggggcccattttggcggctacctggtcaagcagaacagaagcgtggtaagcggcagatccgctagcctcggggatcctgctagagatcgaccatcag

SEQ ID NO: 311454 - DNA, 407 bp, Homo sapiens
accctggcccctgactcataaacattcatcagctcccccatgaacaccctgcactcgcccccaaatatcagctcccacatgtcagcgaggctttgaccaccagccgctgccccccagtcatagaacccaaaagaggtgacagttgttttgctcactgcttcctctgggcagggagggctaatattttggggaatgggcttcctgaattgagggcctggggcccatttcagagactggaggggcccctttttcctgataccacctcattcttctacagccggaagggggcagggaagggccgcgttggaggccgctggaagtgaggatgccgccccggacagtggcacctgggaagcctgggagtgtttgtcccatcggtagcttgaaataaacgctcccctcagaca

SEQ ID NO: 311455 - DNA, 260 bp, Homo sapiens
tgagcaaggctcagcctcaagattcacagcatctcagacgcagcctaggccgcaccaggatgtcggacaccgaggagcaggaatatgaggaggagcagccggaagaggaggctgcggaggaggaggaggaaggaagaggacagaggccaagaagcggggagaggatgcgcaccttcatctcccgcccggtgcgttacgagtctgtctgctgaaaggacgcaacgggcccctgtgaaagcctctaaccggatatctactgc

SEQ ID NO: 311456 - DNA, 1070 bp, Homo sapiens
atgggatggggacacgcccaggagctcttgggaggggaggcgaggagtgtggcactttggcggggaaggggcggctcagccctcgggccctcgcccgccctctccgggtctggagcgtctcctcgcgccatccctgcaccgccagggggaacgtgcccatcgcagccgaggccagagggacccccgtccagcagagactggaaccctggtctctggccaccgcccccatccctcccccagctcctaacgccttctcttctgtgcccccatctccagaggaggctgcggaggaggaggaggaagaagaggaacgccccaaaccaagccgccccgtggtgcctcctttgatcccgccaaagatcccagaaggggagcgcgttgacttcgatgacatccaccgcaagcgcatggagaaagacctgctggagctgcagacactcatcgatgtacatttcgagcagcggaagaaggaggaagaggagctggttgccttgaaggagcgcattgagcggcgccggtcagagagagccgagcaacagcgcttcagaactgagaaggaacgcgaacgtcaggctaagctggcggaggagaagatgaggaaggaagaggaagaggccaagaagcgggcagaggatgatgccaagaaaaagaaggtgctgtccaacatgggggcccattttggcggctacctggtcaaggcagaacagaagcgtggtaagcggcagacggggcgggagatgaaggtgcgcatcctctccgagcgtaagaagcctctggacattgactacatgggggaggaacagctccgggagaaagcccaggagctgtcggactggatccaccagctggagtctgagaagttcgacctgatggcgaagctgaaacagcagaaatatgagatcaacgtgctgtacaaccgcatcagccacgcccagaagttccggaagggggcagggaagggccgcgttggaggccgctggaagtgaggatgccgccccggacagtggcacctgggaagcctgggagtgtttgtcccatcggtagcttgaaataaacgctcccctcagaca

SEQ ID NO: 311457 - DNA, 1024 bp, Homo sapiens
ccccagctcctcctctctcacacccaggagtccagacccaggagtccaggcccccagcccctcctccctcacacccaggagtctaggtcgccccctccttggggccccaccccactgggcctcttctctctggtccttaggccgcaccaggatgtcggacaccgaggagcaggaatatgaggaggagcagccggaagaggaggctgcggaggaggaggaggaagcccccgaagagccggagccggtggcagagccagaagaggaacgccccaaaccaagccgccccgtggtgcctcctttgatcccgccaaagatcccagaaggggagcgcgttgacttcgatgacatccaccgcaagcgcatggagaaagacctgctggagctgcagacactcatcgatgtacatttcgagcagcggaagaaggaggaagaggagctggttgccttgaaggagcgcattgagcggcgccggtcagagagagccgagcaacagcgcttcagaactgagaaggaacgcgaacgtcaggctaagctggcggaggagaagatgaggaaggaagaggaagaggccaagaagcgggcagaggatgatgccaagaaaaagaaggtgctgtccaacatgggggcccattttggcggctacctggtcaaggcagaacagaagcgtggtaagcggcagacggggcgggagatgaaggtgcgcatcctctccgagcgtaagaagcctctggacattgactacatgggggaggaacagctccgggagaaagcccaggagctgtcggactggatccaccagctggagtctgagaagttcgacctgatggcgaagctgaaacagcagaaatatgagatcaacgtgctgtacaaccgcatcagccacgcccagaagttccggaagggggcagggaagggccgcgttggaggccgctggaagtgaggatgccgccccggacagtggcacctgggaagcctgggagtgtttgtcccatcggtagcttgaaataaacgctcccctcagaca

SEQ ID NO: 311458 - DNA, 1104 bp, Homo sapiens
gcttaggctaggtagaggctgggtgttaatcggccgaggggcgaggagtgtggcactttggcggggaaggggcggctcagccctcgggccctcgcccgccctctccgggtctggagcgtctcctcgcgccatccctgcaccgccagggggaacgtgcccatcgcagccgaggccagagggacccccgtccagcagagactggaaccctggtctctggccaccgcccccatccctcccccagctcctaacgccttctcttctgtgcccccatctccagaggaggctgcggaggaggaggaggaagcccccgaagagccggagccggtggcagagccagaagaggaacgccccaaaccaagccgccccgtggtgcctcctttgatcccgccaaagatcccagaaggggagcgcgttgacttcgatgacatccaccgcaagcgcatggagaaagacctgctggagctgcagacactcatcgatgtacatttcgagcagcggaagaaggaggaagaggagctggttgccttgaaggagcgcattgagcggcgccggtcagagagagccgagcaacagcgcttcagaactgagaaggaacgcgaacgtcaggctaagctggcggaggagaagatgaggaaggaagaggaagaggccaagaagcgggcagaggatgatgccaagaaaaagaaggtgctgtccaacatgggggcccattttggcggctacctggtcaaggcagaacagaagcgtggtaagcggcagacggggcgggagatgaaggtgcgcatcctctccgagcgtaagaagcctctggacattgactacatgggggaggaacagctccgggagaaagcccaggagctgtcggactggatccaccagctggagtctgagaagttcgacctgatggcgaagctgaaacagcagaaatatgagatcaacgtgctgtacaaccgcatcagccacgcccagaagttccggaagggggcagggaagggccgcgttggaggccgctggaagtgaggatgccgccccggacagtggcacctgggaagcctgggagtgtttgtcccatcggtagcttgaaataaacgctcccctcagaca

SEQ ID NO: 311459 - DNA, 1241 bp, Homo sapiens
gcttaggctaggtagaggctgggtgttaatcggccgaggggcgaggagtgtggcactttggcggggaaggggcggctcagccctcgggccctcgcccgccctctccgggtctggagcgtctcctcgcgccatccctgcaccgccagggggaacgtgcccatcgcagccgaggccagagggacccccgtccagcagagactggaaccctggtctctggccaccgcccccatccctcccccagctcctaacgccttctcttctgtgcccccatctccagaggaggctgcggaggaggaggaggaagcccccgaagagccggagccggtggcagagccagaagaggaacgccccaaaccaagcccgcctcagctgggaccctccacgttcaggagcctcccggggctggcggctacctcactggacggcacatcccggaggtgggaggtggctcagggaggtcgggccactcatggtctctgtgtttctggccactcagccgccccgtggtgcctcctttgatcccgccaaagatcccagaaggggagcgcgttgacttcgatgacatccaccgcaagcgcatggagaaagacctgctggagctgcagacactcatcgatgtacatttcgagcagcggaagaaggaggaagaggagctggttgccttgaaggagcgcattgagcggcgccggtcagagagagccgagcaacagcgcttcagaactgagaaggaacgcgaacgtcaggctaagctggcggaggagaagatgaggaaggaagaggaagaggccaagaagcgggcagaggatgatgccaagaaaaagaaggtgctgtccaacatgggggcccattttggcggctacctggtcaaggcagaacagaagcgtggtaagcggcagacggggcgggagatgaaggtgcgcatcctctccgagcgtaagaagcctctggacattgactacatgggggaggaacagctccgggagaaagcccaggagctgtcggactggatccaccagctggagtctgagaagttcgacctgatggcgaagctgaaacagcagaaatatgagatcaacgtgctgtacaaccgcatcagccacgcccagaagttccggaagggggcagggaagggccgcgttggaggccgctggaagtgaggatgccgccccggacagtggcacctgggaagcctgggagtgtttgtcccatcggtagcttgaaataaacgctcccctcagaca

SEQ ID NO: 311460 - DNA, 800 bp, Homo sapiens
cgactacatacttcctggaggaggaggaggaagaagaggaacgccccaaaccaagccgccccgtggtgcctcctttgatcccgccaaagatcccagaaggggagcgcgttgacttcgatgacatccaccgcaagcgcatggagaaagacctgctggagctgcagacactcatcgatgtacatttcgagcagcggaagaaggaggaagaggagctggttgccttgaaggagcgcattgagcggcgccggtcagagagagccgagcaacagcgcttcagaactgagaaggaacgcgaacgtcaggctaagctggcggaggagaagatgaggaaggaagaggaagaggccaagaagcgggcagaggatgatgccaagaaaaagaaggtgctgtccaacatgggggcccattttggcggctacctggtcaaggcagaacagaagcgtggtaagcggcagacggggcgggagatgaaggtgcgcatcctctccgagcgtaagaagcctctggacattgactacatgggggaggaacagctccgggagaaagcccaggagctgtcggactggatccaccagctggagtctgagaagttcgacctgatggcgaagctgaaacagcagaaatatgagatcaacgtgctgtacaaccgcatcagccacgcccagaagttccggaagggggcagggaagggccgcgttggaggccgctggaagtgaggatgccgccccggacagtggcacctgggaagcctgggagtgtttgtcccatcggtagcttgaaataaacgctcccctcagaca

SEQ ID NO: 311461 - DNA, 1037 bp, Homo sapiens
atgggatggggacacgcccaggagctcttgggaggggaggcgaggagtgtggcactttggcggggaaggggcggctcagccctcgggccctcgcccgccctctccgggtctggagcgtctcctcgcgccatccctgcaccgccagggggaacgtgcccatcgcagccgaggccagagggacccccgtccagcagagactggaaccctggtctctggccaccgcccccatccctcccccagctcctaacgccttctcttctgtgcccccatctccagaggaggctgcggaggaggaggaggaagaagaggaacgccccaaaccaagccgccccgtggtgcctcctttgatcccgccaaagatcccagaaggggagcgcgttgacttcgatgacatccaccgcaagcgcatggagaaagacctgctggagctgcagacactcatcgatgtacatttcgagcagcggaagaaggaggaagaggagctggttgccttgaaggagcgcattgagcggcgccggtcagagagagccgagcaacagcgcttcagaactgaggagaagatgaggaaggaagaggaagaggccaagaagcgggcagaggatgatgccaagaaaaagaaggtgctgtccaacatgggggcccattttggcggctacctggtcaaggcagaacagaagcgtggtaagcggcagacggggcgggagatgaaggtgcgcatcctctccgagcgtaagaagcctctggacattgactacatgggggaggaacagctccgggagaaagcccaggagctgtcggactggatccaccagctggagtctgagaagttcgacctgatggcgaagctgaaacagcagaaatatgagatcaacgtgctgtacaaccgcatcagccacgcccagaagttccggaagggggcagggaagggccgcgttggaggccgctggaagtgaggatgccgccccggacagtggcacctgggaagcctgggagtgtttgtcccatcggtagcttgaaataaacgctcccctcagaca

SEQ ID NO: 311462 - DNA, 1066 bp, Homo sapiens
tgagcaaggctcagcctcaagattcacagcatctcagacgcagcctaggccgcaccaggatgtcggacaccgaggagcaggaatatgaggaggagcagccggaagaggaggctgcggaggaggaggaggaagcccccgaagagccggagccggtggcagagccagaagaggaacgccccaaaccaagccgccccgtggtgcctcctttgatcccgccaaagatcccagaaggggagcgcgttgacttcgatgacatccaccgcaagcgcatggagaaagacctgctggagctgcagacactcatcgatgtacatttcgagcagcggaagaaggaggaagaggagctggttgccttgaaggagcgcattgagcggcgccggtcagagagagccgagcaacagcgcttcagaactgagaaggaacgcgaacgtcaggctaagctggcggaggagaagatgaggaaggaagaggaagaggccaagaagcgggcagaggatgatgccaagaaaaagaaggtgctgtccaacatgggggcccattttggcggctacctggtcaaggcagaacagaagcgtggtaagcggcagacggggcgggagatgaaggtgcgcatcctctccgagcgtaagaagcctctggacattgactacatgggggaggaacagctccgggagaaagcccaggagctgtcggactggatccaccagctggagtctgagaagttcgacctgatggcgaagctgaaacagcagaaatatgagatcaacgtgctgtacaaccgcatcagccacgcccagaagttccggaagggggcagggaagggccgcgttggaggccgctggaagtgaggatgccgccccggacagtggcacctgggaagcctgggagtgtttgtcccatcggtagcttgaaataaacgctcccctcagacaacccgctgggttctctgatgttattatggttgagatgcagctggtctctcctggttaattgacttcttattaccaacaagttacttgaaagagtgtcaccaataatcattaaagtacggcaggctgaaccttca

SEQ ID NO: 311463 - DNA, 1226 bp, Homo sapiens
tgagcaaggctcagcctcaagattcacagcatctcagacgcagcctaggccgcaccaggatgtcggacaccgaggagcaggaatatgaggaggagcagccggaagaggaggctgcggaggaggaggaggaagcccccgaagagccggagccggtggcagagccagaagaggaacgccccaaaccaagccgccccgtggtgcctcctttgatcccgccaaagatcccagaaggggagcgcgttgacttcgatgacatccaccgcaagcgcatggagaaagacctgctggagctgcagacactcatcgatgtacatttcgagcagcggaagaaggaggaagaggagctggttgccttgaaggagcgcattgagcggcgccggtcagagagagccgagcaacagcgcttcagaactgagaaggaacgcgaacgtcaggctaagctggcggaggagaagatgaggaaggaagaggaagaggccaagaagcgggcagaggatgatgccaagaaaaagaaggtgctgtccaacatgggggcccattttggcggctacctggtcaaggcagaacagaagcgtggtaagcggcagacggggcgggagatgaaggtgcgcatcctctccgagcgtaagaagcctctggacattgactacatgggggaggaacagctccgggagaaagcccaggagctgtcggactggatccaccagctggagtctgagaagttcgacctgatggcgaagctgaaacagcagaaatatgagatcaacgtgctgtacaaccgcatcagccacgcccagaagttccggaagggggcagggaagggccgcgttggaggccgctggaagtgaggatgccgccccggacagtggcacctgggaagcctgggagtgtttgtcccatcggtagcttgaaataaacgctcccctcagacataaaaaaaacaaaaaaaaactaaaccaaaaacaacatgtgccgacacggaccagcgcccacaaaacagcctacaaagaacaacgctaaagggcgacgcagcggcaccaaagactacagacgcaacggcgcacagcgctggcacagaaggagagaccggagccgacgcaaagggcgcggaaccgaccaaaaaaaaagcccggcgggaacgcgcagcctgagaaacaccaaaaggaaccagagggccagaggggatccacaagaggcgacaagagcgatataatcccccgacgggg

SEQ ID NO: 311464 - DNA, 932 bp, Homo sapiens
tgagcaaggctcagcctcaagattcacagcatctcagacgcagcctaggccgcaccaggatgtcggacaccgaggagcaggaatatgaggaggagcagccggaagaggaggctgcggaggaggaggaggaagcccccgaagagccggagccggtggcagagccagaagaggaacgccccaaaccaagccgccccgtggtgcctcctttgatcccgccaaagatcccagaaggggagcgcgttgacttcgatgacatccaccgcaagcgcatggagaaagacctgctggagctgcagacactcatcgatgtacatttcgagcagcggaagaaggaggaagaggagctggttgccttgaaggagcgcattgagcggcgccggtcagagagagccgagcaacagcgcttcagaactgagaaggaacgcgaacgtcaggctaagctggcggaggagaagatgaggaaggaagaggaagaggccaagaagcgggcagaggatgatgccaagaaaaagaaggtgctgtccaacatgggggcccattttggcggctacctggtcaaggcagaacagaagcgtggtaagcggcagacggggcgggagatgaaggtgcgcatcctctccgagcgtaagaagcctctggacattgactacatgggggaggaacagctccgggagaaagcccaggagctgtcggactggatccaccagctggagtctgagaagttcgacctgatggcgaagctgaaacagcagaaatatgagatcaacgtgctgtacaaccgcatcagccacgcccagaagttactgcgtctcgctctgtcacccaggctggagtgcagtggagtgatctcagctcactgcaacttccatctcccgggttcaagcgattctcctgcctcagccccctgagtagctgggattacaggtgcgcgc

SEQ ID NO: 311465 - DNA, 887 bp, Homo sapiens
gcttaggctaggtagaggctgggtgttaatcggccgaggggcgaggagtgtggcactttggcggggaaggggcggctcagccctcgggccctcgcccgccctctccgggtctggagcgtctcctcgcgccatccctgcaccgccagggggaacgtgcccatcgcagccgaggccagagggacccccgtccagcagagactggaaccctggtctctggccaccgcccccatccctcccccagctcctaacgccttctcttctgtgcccccatctccagaggaggctgcggaggaggaggaggaagaagaggaacgccccaaaccaagccgccccgtggtgcctcctttgatcccgccaaagatcccagaaggggagcgcgttgacttcgatgaggagaagatgaggaaggaagaggaagaggccaagaagcgggcagaggatgatgccaagaaaaagaaggtgctgtccaacatgggggcccattttggcggctacctggtcaaggcagaacagaagcgtggtaagcggcagacggggcgggagatgaaggtgcgcatcctctccgagcgtaagaagcctctggacattgactacatgggggaggaacagctccgggagaaagcccaggagctgtcggactggatccaccagctggagtctgagaagttcgacctgatggcgaagctgaaacagcagaaatatgagatcaacgtgctgtacaaaccgcatagcacgccagaaggttcggaagggggcaggaagggccgcgttggaggcgctgaagtgagatgcgcccgaccgtggacctggaacctggatgttgccatcgcgggctgaataagcgccctcagaaaaaaaaaaagggggggtctaaaacccggggcccg

SEQ ID NO: 311466 - DNA, 1081 bp, Homo sapiens
gcttaggctaggtagaggctgggtgttaatcggccgaggggcgaggagtgtggcactttggcggggaaggggcggctcagccctcgggccctcgcccgccctctccgggtctggagcgtctcctcgcgccatccctgcaccgccagggggaacgtgcccatcgcagccgaggccagagggacccccgtccagcagagactggaaccctggtctctggccaccgcccccatccctcccccagctcctaacgccttctcttctgtgcccccatctccagaggaggctgcggaggaggaggaggaagaagaggaacgccccaaaccaagcccgcctcagctgggaccctccacgttcaggagcctcccggggctggcggctacctcactggacggcacatcccggaggtgggaggtggctcagggaggtcgggccactcatggtctctgtgtttctggccactcagccgccccgtggtgcctcctttgatcccgccaaagatcccagaaggggagcgcgttgacttcgatgacatccaccgcaagcgcatggagaaagacctgctggagctgcagacactcatcgatgtacatttcgagcagcggaagaaggaggaagaggagctggttgccttgaaggagcgcattgagcggcgccggtcagagagagccgagcaacagcgcttcagaactgagaaggaacgcgaacgtcaggctaagctggcgctggagtctgagaagttcgacctgatggcgaagctgaaacagcagaaatatgagatcaacgtgctgtacaaccgcatcagccacgcccagaagttccggaagggggcagggaagggccgcgttggaggccgctggaagtgaggatgccgccccggacagtggcacctgggaagcctgggagtgtttgtcccatcggtagcttgaaataaacgctcccctcagacaacccgctgggttctctgatgttattatggttgagatgcagctggtctctcctggttaattgacttcttattaccaacaagttacttgaaagagtgtcaccaataatcattaaagtacggcaggctgaaccttca

SEQ ID NO: 311467 - DNA, 895 bp, Homo sapiens
gcttaggctaggtagaggctgggtgttaatcggccgaggggcgaggagtgtggcactttggcggggaaggggcggctcagccctcgggccctcgcccgccctctccgggtctggagcgtctcctcgcgccatccctgcaccgccagggggaacgtgcccatcgcagccgaggccagagggacccccgtccagcagagactggaaccctggtctctggccaccgcccccatccctcccccagctcctaacgccttctcttctgtgcccccatctccagaggaggctgcggaggaggaggaggaagcccccgaagagccggagccggtggcagagccagaagaggaacgccccaaaccaagcccgcctcagctgggaccctccacgttcaggagcctcccggggctggcggctacctcactggacggcacatcccggaggtgggaggtggctcagggaggtcgggccactcatggtctctgtgtttctggccactcagccgccccgtggtgcctcctttgatcccgccaaagatcccagaaggggagcgcgttgacttcgatgtaagtgacaagagacccctccgcaggcgcagttgctagtctttaaggggcctttgtgtcaatcatgaaaaggcgccggccgggcgcggggcctcatgcctgtaatcccagcactttgggaggctgaggtgacccacctgaggtcaggagttcgagaccagcctggttaatatggtgaaaccccgtctctactaaaaatacaaaaattagccgggcgtggtggcaggtgtctgtaatcccagctactcgggaggctgaggcaggaaaatcgcttgaacctgggaggcggaggtggcggtgagccgagatcgcgccatttcactccagcctgggag

SEQ ID NO: 311468 - DNA, 1114 bp, Homo sapiens
tgagcaaggctcagcctcaagattcacagcatctcagacgcagcctaggccgcaccaggatgtcggacaccgaggagcaggaatatgaggaggagcagccggaagaggaggctgcggaggaggaggaggaagcccccgaagagccggagccggtggcagagccagaagaggaacgccccaaaccaagccgccccgtggtgcctcctttgatcccgccaaagatcccagaaggggagcgcgttgacttcgatgacatccaccgcaagcgcatggagaaagacctgctggagctgcagacactcatcgatgtacatttcgagcagcggaagaaggaggaagaggagctggttgccttgaaggagcgcattgagcggcgccggtcagagagagccgagcaacagcgcttcagaactgagaaggaacgcgaacgtcaggctaagctggcggaggagaagatgaggaaggaagaggaagaggccaagaagcgggcagaggatgatgccaagaaaaagaaggtgctgtccaacatgggggcccattttggcggctacctggtcaaggcagaacagaagcgtggtaagcggcagacggggcgggagatgaaggtgcgcatcctctccgagcgtaagaagcctctggacattgactacatgggggaggaacagctccgggcccggtctgcctggctgcctccatcacagccctcctgccctgccagggagaaagcccaggagctgtcggactggatccaccagctggagtctgagaagttcgacctgatggcgaagctgaaacagcagaaatatgagatcaacgtgctgtacaaccgcatcagccacgcccagaagttccggaagggggcagggaagggccgcgttggaggccgctggaagtgaggatgccgccccggacagtggcacctgggaagcctgggagtgtttgtcccatcggtagcttgaaataaacgctcccctcagacaacccgctgggttctctgatgttattatggttgagatgcagctggtctctcctggttaattgacttcttattaccaacaagttacttgaaagagtgtcaccaataatcattaaagtacggcaggctgaaccttca

SEQ ID NO: 311469 - DNA, 509 bp, Homo sapiens
tcagacacagcctaggccgcaccaggatgtcggacaccgaggagcaggaatatgaggaggagcagccggaagaggaggctgcggaggaggaggaggaagcccccgaagagccggagccggtggcagagccagaagaggaacgccccaaaccaagccgccccgtggtgcctcctttgatcccgccaaagatcccagaaggggagcgcgttgacttcgatgacatccaccgcaagcgcatggagaaagacctgctggagctgcagacactcatcgatgtacatttcgagcagcggaagaaggaggaagaggagctggttgccttgaaggagcgcattgagcggcgccggtcagagagagccgagcaacagcgcttcagaactgagaaggaacgcgaacgtcaggctaagctggcgaggagaagatgaggaaggaagaggaagcagcactaaaagcactctgagtcaagatgagtgggaaaccatctcaataaacacattttggataaaaaa

SEQ ID NO: 311470 - DNA, 1103 bp, Homo sapiens
atgggatggggacacgcccaggagctcttgggaggggaggcgaggagtgtggcactttggcggggaaggggcggctcagccctcgggccctcgcccgccctctccgggtctggagcgtctcctcgcgccatccctgcaccgccagggggaacgtgcccatcgcagccgaggccagagggacccccgtccagcagagactggaaccctggtctctggccaccgcccccatccctcccccagctcctaacgccttctcttctgtgcccccatctccagaggaggctgcggaggaggaggaggaagcccccgaagagccggagccggtggcagagccagaagaggaacgccccaaaccaagccgccccgtggtgcctcctttgatcccgccaaagatcccagaaggggagcgcgttgacttcgatgacatccaccgcaagcgcatggagaaagacctgctggagctgcagacactcatcgatgtacatttcgagcagcggaagaaggaggaagaggagctggttgccttgaaggagcgcattgagcggcgccggtcagagagagccgagcaacagcgcttcagaactgagaaggaacgcgaacgtcaggctaagctggcggaggagaagatgaggaaggaagaggaagaggccaagaagcgggcagaggatgatgccaagaaaaagaaggtgctgtccaacatgggggcccattttggcggctacctggtcaaggcagaacagaagcgtggtaagcggcagacggggcgggagatgaaggtgcgcatcctctccgagcgtaagaagcctctggacattgactacatgggggaggaacagctccgggagaaagcccaggagctgtcggactggatccaccagctggagtctgagaagttcgacctgatggcgaagctgaaacagcagaaatatgagatcaacgtgctgtacaaccgcatcagccacgcccagaagttccggaagggggcagggaagggccgcgttggaggccgctggaagtgaggatgccgccccggacagtggcacctgggaagcctgggagtgtttgtcccatcggtagcttgaaataaacgctcccctcagaca

SEQ ID NO: 311471 - DNA, 1071 bp, Homo sapiens
tgagcaaggctcagcctcaagattcacagcatctcagacgcagcctaggccgcaccaggatgtcggacaccgaggagcaggaatatgaggaggagcagccggaagaggaggctgcggaggaggaggaggaagcccccgaagagccggagccggtggcagagccagaagaggaacgccccaaaccaagccgccccgtggtgcctcctttgatcccgccaaagatcccagaaggggagcgcgttgacttcgatgacatccaccgcaagcgcatggagaaagacctgctggagctgcagacactcatcgatgtacatttcgagcagcggaagaaggaggaagaggagctggttgccttgaaggagcgcattgagcggcgccggtcagagagagccgagcaacagcgcttcagaactgagaaggaacgcgaacgtcaggctaagctggcggttcaagcgaatcttctgcctcagcctccccagtagctgggactacaggatattaagacccagagaagggggccaggtgcggtggctcacgcctgtaatcccagcactccgggaggccgaggcaggcggatcacttgaggaggagaagatgaggaaggaagaggaagaggccaagaagcgggcagaggatgatgccaagaaaaagaaggtgctgtccaacatgggggcccattttggcggctacctggtcaaggcagaacagaagcgtggtaagcggcagacggggcgggagatgaaggtgcgcatcctctccgagcgtaagaagcctctggacattgactacatgggggaggaacagctccgggagaaagcccaggagctgtcggactggatccaccagctggagtctgagaagttcgacctgatggcgaagctgaaacagcagaaatatgagatcaacgtgctgtacaaccgcatcagccacgcccagaagttccggaagggggcagggaagggccgcgttggaggccgctggaagtgaggatgccgccccggacagtggcacctgggaagcctgggagtgtttgtcccatcggtagcttgaaataaacgctcccctcagaca

SEQ ID NO: 311472 - DNA, 1075 bp, Homo sapiens
  misc_feature (950)..(950): n is a, c, g, or t
  misc_feature (953)..(953): n is a, c, g, or t
  misc_feature (967)..(967): n is a, c, g, or t
  misc_feature (972)..(972): n is a, c, g, or t
  misc_feature (974)..(974): n is a, c, g, or t
  misc_feature (977)..(977): n is a, c, g, or t
tgagcaaggctcagcctcaagattcacagcatctcagacgcagcctaggccgcaccaggatgtcggacaccgaggagcaggaatatgaggaggagcagccggaagaggaggctgcggaggaggaggaggaagcccccgaagagccggagccggtggcagagccagaagaggaacgccccaaaccaagccgccccgtggtgcctcctttgatcccgccaaagatcccagaaggggagcgcgttgacttcgatgacatccaccgcaagcgcatggagaaagacctgctggagctgcagacactcatcgatgtacatttcgagcagcggaagaaggaggaagaggagctggttgccttgaaggagcgcattgagcggcgccggtcagagagagccgagcaacagcgcttcagaactgagaaggaacgcgaacgtcaggctaagctggcggaggagaagatgaggaaggaagaggaagaggccaagaagcgggcagaggatgatgccaagaaaaagaaggtgctgtccaacatgggggcccattttggcggctacctggtcaaggcagaacagaagcgtggtaagcggcagacggggcgggagatgaaggtgcgcatcctctccgagcgtaagaagcctctggacattgactacatgggggaggaacagctccgggagaaagcccaggagctgtcggactggatccaccagctggagtctgagaagttcgacctgatggcgaagctgaaacagcagaaatatgagatcaacgtgctgtacaaccgcatcagccacgcccagaagttccggaagggggcagggaagggccgcgttggaggccgctggaagtgaggatgccgccccggacagtggcacctgggaagcctgggagtgtttgtcccatcggtagcttgaaataaacgctcccctcagacaaaaaaaaaaaaaaaaatnaanagaaaggacacaanaaatntnccnaaagggttaaaaataattacaggtggcttttaaattttttccttgagggggggggccccggcaacccaatatttcgccctttataggggaggtcggtt

SEQ ID NO: 311473 - DNA, 1208 bp, Homo sapiens
gcttaggctaggtagaggctgggtgttaatcggccgaggggcgaggagtgtggcactttggcggggaaggggcggctcagccctcgggccctcgcccgccctctccgggtctggagcgtctcctcgcgccatccctgcaccgccagggggaacgtgcccatcgcagccgaggccagagggacccccgtccagcagagactggaaccctggtctctggccaccgcccccatccctcccccagctcctaacgccttctcttctgtgcccccatctccagaggaggctgcggaggaggaggaggaagcccccgaagagccggagccggtggcagagccagaagaggaacgccccaaaccaagcccgcctcagctgggaccctccacgttcaggagcctcccggggctggcggctacctcactggacggcacatcccggaggtgggaggtggctcagggaggtcgggccactcatggtctctgtgtttctggccactcagccgccccgtggtgcctcctttgatcccgccaaagatcccagaaggggagcgcgttgacttcgatgacatccaccgcaagcgcatggagaaagacctgctggagctgcagacactcatcgatgtacatttcgagcagcggaagaaggaggaagaggagctggttgccttgaaggagcgcattgagcggcgccggtcagagagagccgagcaacagcgcttcagaactgaggagaagatgaggaaggaagaggaagaggccaagaagcgggcagaggatgatgccaagaaaaagaaggtgctgtccaacatgggggcccattttggcggctacctggtcaaggcagaacagaagcgtggtaagcggcagacggggcgggagatgaaggtgcgcatcctctccgagcgtaagaagcctctggacattgactacatgggggaggaacagctccgggagaaagcccaggagctgtcggactggatccaccagctggagtctgagaagttcgacctgatggcgaagctgaaacagcagaaatatgagatcaacgtgctgtacaaccgcatcagccacgcccagaagttccggaagggggcagggaagggccgcgttggaggccgctggaagtgaggatgccgccccggacagtggcacctgggaagcctgggagtgtttgtcccatcggtagcttgaaataaacgctcccctcagaca

SEQ ID NO: 311474 - DNA, 1353 bp, Homo sapiens
tgagcaaggctcagcctcaagattcacagcatctcagacgcagcctaggccgcaccaggatgtcggacaccgaggagcaggaatatgaggaggagcagccggaagaggaggctgcggaggaggaggaggaagcccccgaagagccggagccggtggcagagccagaagaggaacgccccaaaccaagccgccccgtggtgcctcctttgatcccgccaaagatcccagaaggggagcgcgttgacttcgatgacatccaccgcaagcgcatggagaaagacctgctggagctgcagacactcatcgatgtacatttcgagcagcggaagaaggaggaagaggagctggttgccttgaaggagcgcattgagcggcgccggtcagagagagccgagcaacagcgcttcagaactgagaaggaacgcgaacgtcaggctaagctggcggaggagaagatgaggaaggaagaggaagaggccaagaagcgggcagaggatgatgccaagaaaaagaaggtgctgtccaacatgggggcccattttggcggctacctggtcaaggcagaacagaagcgtggtaagcggcagacggggcgggagatgaaggtgcgcatcctctccgagcgtaagaagcctctggacattgactacatgggggaggaacagctccgggagaaagcccaggagctgtcggactggatccaccagctggagtctgagaagttcgacctgatggcgaagctgaaacagcagaaatatgagatcaacgtgctgtacaaccgcatcagccacgcccagaagttccggaagggggcagggaagggccgcgttggaggccgctggaagtgaggatgccgccccggacagtggcacctgggaagcctgggagtgtttgtcccatgtagtcaatgtccagaggcttcttacgctcggagaggatgcgcaccttcatctcccgccccgtctgccgcttaccacgcttctgttctgccttgaccaggtagccgccaaatgggcccccatgttggacagcaccttctttttcttggcatcatcctctgcccgcttcttggcctcttcctcttccttcctcatcttctcctccgccagcttagcctgacgttcgcgttccttctcagttctgaagcgctgttgctcggctctctctgaccggcgccgctcaatgcgctccttcaaggcaaccagctcctcttcctccttcttccgctgctcgaaatgtacatcgatgagtgtctgcagctccagcaggtctttctccatgcgcttgcggtggatgtcatcgaagtcaacgcgctccccttctggatctttggcgggactagttctagatcgc

SEQ ID NO: 311475 - DNA, 980 bp, Homo sapiens
tgagcaaggctcagcctcaagattcacagcatctcagacgcagcctaggccgcaccaggatgtcggacaccgaggagcaggaatatgaggaggagcagccggaagaggaggctgcggaggaggaggaggaagcccccgaagagccggagccggtggcagagccagaagaggaacgccccaaaccaagccgccccgtggtgcctcctttgatcccgccaaagatcccagaaggggagcgcgttgacttcgatgacatccaccgcaagcgcatggagaaagacctgctggagctgcagacactcatcgatgtacatttcgagcagcggaagaaggaggaagaggagctggttgccttgaaggagcgcattgagcggcgccggtcagagagagccgagcaacagcgcttcagaactgagaaggaacgcgaacgtcaggctaagctggcggaggagaagatgaggaaggaagaggaagaggccaagaagcgggcagaggatgatgccaagaaaaagaaggtgctgtccaacatgggggcccattttggcggctacctggtcaaggcagaacagaagcgtggtaagcggcagacggggcgggagatgaaggtgcgcatcctctccgagcgtaagaagcctctggacattgactacatgggggaggaacagctccgggcccggtctgcctggctgcctccatcacagccctcctgccctgccagggagaaagcccaggagctgtcggactggatccaccagctggagtctgagaagttcgacctgatggcgaagctgaaacagcagaaatatgagatcaacgtgctgtacaaccgcatcagccacgcccagaagttccggaagggggcagggaagggccgcgttggaggccgctggaagtgaggatgccgccccggacagtggcacctgggaagcctgggagtgtttgtcccatcggtagcttgaaataaacgctcccctcagaca

SEQ ID NO: 311476 - DNA, 627 bp, Homo sapiens
tgagcaaggctcagcctcaagattcacagcatctcagacgcagcctaggccgcaccaggatgtcggacaccgaggagcaggaatatgaggaggagcagccggaagaggaggctgcggaggaggaggaggaagcccccgaagagccggagccggtggcagagccagaagaggaacgccccaaaccaagccgccccgtggtgcctcctttgatcccgccaaagatcccagaaggggagcgcgttgacttcgatgacatccaccgcaagcgcatggagaaagacctgctggagctgcagacactcatcgatgtacatttcgagcagcggaagaaggaggaagaggagctggttgccttgaaggagcgcattgagcggcgccggtcagagagagccgagcaacagcgcttcagaactgagaaggaacgcgaacgtcaggctaagctggcggaggagaagatgaggaaggaagaggaagaggccaagaagcgggcagaggatgatgccaagaaaaagaaggtgctgtccaacatgggggcccattttggcggctacctggtcaagcagaacagaagcgtggtaagcggcagatccgctagcctcggggatcctgctagagatcgaccatcag

SEQ ID NO: 311477 - DNA, 1494 bp, Homo sapiens
agaaaaaagtccgggagagactagctcagatctgatctgtaccacctgggggttcccagcccatagctctgtaggccttcaaggaggaagaggaggggaagggggggaaggggctgaggctcggggactccagcctgaagtccaagcatgtgcggaagcctagaccctcccaccttaccacaaacttggctccaagtcccctctatgctgacgcatccttgccctcctcctcctccccactgccctccactagcccatcctccctcctccctcctcccctcgacacacatttatcactagtgacatctcagccccccctaccccaatccagggacacaggagggacacagtagggttagactgagggccactgatgtggcttcaccctcagtgcttgggcaattcccaagttacagcatctcagtccccagagaaggccatgctgccactgtagccgccaagggccccctggagtgcagggcacagaggaggaagggagaggatgtgagctgcaggaggcagctgaagccaagccttgggcaggctctcaggtattacatacctggtggggaggagggttctcccttccctaggctggatccctcacttgctcctagtgcctggaaccttaggtttagagagccactctactccttgaagtctcttgatgcaccttacctggggccctttccttatccctctctgcagcattcccagagatggtccactggagggtttcagcaccacagagaggctgatgattcacaaatctcatgcagttacacctcattccttctgacagcaatttgaaggggctgaaagggggctaatccctaaggaccagtggttggtagcctacgtaagactccctggtgggtaaatttcactcagaccatttgctgtgatctacgaatctcctatatgcctttctaaactcaactctgtgcttagactctggtacattccactgcagccataccagcctatgctgtccctctaacacgtgtacaacacacaagccatgccctgtttggaatgttcttccccaaaatatcactgccagtgaccttgcttcaggtctttattcaaaaactgacctcatccttaccctgatattccagaataccattctgctttattatttgtcttccacacttagcactattcaacataaagcactagaatataagctccacgagggtggaaacttttgctcttatttgctgttctattctgcagcacatcaaacagtgcctggcacacagcaggtgctcaataaatatttattaaatgaatatgttcaggatgctcagaggaagatcccaccaatcatcaaaccaggaaggaagggatctggtctccacttgtgtgtggctgagatgtgttctgagatggcccagtgtccgagttttattccctcacctactgagaacagggacctgccctttgacagctgaatcttgggaggcaacagtctgatgcaaaaaaaaaaaa

SEQ ID NO: 311478 - DNA, 608 bp, Homo sapiens
gctgtacccctcggttttcgggatggctccctcccggcaaccccgccggtcctctcagagaggtccaccgggagagcggggccccccgggtcccccgggaccgccgggagtgcctggatccgacggcatcgacggtgacaatgggccccctggaaaagctggccctccgggacccaagggcgagcctggcaaagctgggccagatgggccagacgggaagcccgggattgatggtttaactggagccaagggggagcctggccccatggggatccctggagtcaagggccagcccgggcttcctggtcctcctggccttccgggccctggttttgctggacctcctgtaagtcctcagggatggggcaggatccccagaactcccagggaaggaggggacaacagaaaggcttcgagggaatggccaccatgggaaggagccagcttgctgtgatagtgtcaggaataagtggacctgccagagacccagggccagcccactctgggcctgtccactggctctgcaattctctggtccttaaagcctcagtctgtcagtctctctggggttggcaaaaaaaaaaaaaaagtaaaagtggagaaacggg

SEQ ID NO: 311479 - DNA, 2838 bp, Homo sapiens
agcgccgggagactctgccgtcggtgcgtgcgcggacacgcacccgtcccccttggtctcgccgccagccatggccgccgctacggcctccccccgcagcctccttgttctcctccaggtggtagtgctcgctctggcgcagattagaggtccaccgggagagcggggccccccgggtcccccgggaccgccgggagtgcctggatccgacggcatcgacggtgacaatgggccccctggaaaagctggccctccgggacccaagggcgagcctggcaaagctgggccagatgggccagacgggaagcccgggattgatggtttaactggagccaagggggagcctggccccatggggatccctggagtcaagggccagcccgggcttcctggtcctcctggccttccgggccctggttttgctggacctcctgggcctcctggacctgttggcctccctggtgagattggaatccgaggccccaagggggaccctggaccagatggaccatcggggcccccaggaccccctgggaaacctggtcgcccgggaaccatccagggtctggaaggcagtgcggatttcctgtgtccaaccaactgtccacccggaatgaaaggtcccccagggctgcagggagtgaaggggcatgcgggcaaacgcgggattctgggtgatcctggccaccaggggaagccgggtcccaagggagatgtgggtgcctctggagagcaaggcatccctggaccaccgggtccccagggcatcaggggctacccaggcatggcagggcccaagggagagacgggccctcatggatataaaggcatggtgggcgctatcggtgccactgggccaccgggtgaggaaggtcctaggggaccgccaggccgagctggggagaagggtgacgagggcagcccaggtattcgtggaccccaggggatcacaggcccgaaaggagcaacgggccccccaggcatcaacggcaaggatgggaccccaggcacgcctggcatgaagggcagtgcaggacaggcgggacagcccggaagtccaggccaccagggcctagcgggtgtgccaggccagcctgggacaaaaggaggccctggagaccagggtgagccgggcccgcagggccttcctggattctctggtccccctgggaaagagggagagccagggcctcgaggagaaattggtccccagggcatcatgggacagaagggtgaccaaggcgagaggggtccagtggggcaaccaggccctcagggaaggcagggccctaagggggagcagggcccccccggaattccagggccccaaggcttgccaggcgtcaaaggagacaagggctccccagggaagaccgggccccgcggcaaagtgggtgacccaggggtggccggcctccccggagagaaaggcgagaagggcgagtccggcgagccggggcccaagggacagcaaggagtacgtggagaacccggctaccctggccccagcggggatgcgggcgccccaggggttcagggctaccctggtccccccggccctcgaggactggccgggaaccgaggcgtgccaggacagcccgggagacagggcgtggagggccgggatgccactgaccagcacatcgtggatgtggcgctgaagatgctgcaagagcaactggcagaggtcgccgtgagtgccaagcgggaagccctgggtgcggtgggcatgatgggtcctccaggacctcctgggccccctgggtacccaggcaagcagggcccccatgggcaccctggccctcggggcgttcctggcatcgtgggagccgtgggtcagatcggcaacacggggcccaagggaaaacgtggagagaagggtgatccaggagaagtgggacgggggcaccccgggatgcctgggcccccagggatcccaggactccctggccggcctggccaggcaatcaacggcaaggatggagatcgagggtccccaggggctccaggagaggcaggtcgacctggcctgccaggccccgtggggctgccgggcttctgtgaacctgccgcctgccttggagcttcggcctatgcctctgcccgccttacagagcctggatccatcaaggggccttgagcatcaggcccagacagagcctggcaggcatcctggcgggaaggaccaggtcccctctgggtggacatgcacccatccccagtccaggaaaccatctcccccaggaccttctgtctgggactcaggagtcctaaggaaaaggaattctaaaacatgggggaaggggaggtagagcactgatgggtgaaaaagtgaggccaacacacagggcaagtggtgtcgatggagtcgaagcgctgaaggaatagggcggctttccttccagcgagcatcattcggctgttaccaaaacaaacatcttaatctgcacctttctccactggccatcttgtccttgggtcagtgggacatgggcacctcgggaggcccgggccctgcccagctacagttccacccctcagcttgaggaccaatgactgaggtctatgccagttcctgatcccatctcactctctggacctaccaggtgactgctgctgggtgactcccctgaggcggctatacccttaagccagccccactacttccttccctgcctcccagctcagtatttaaacatcatctcccttctctttctcgcataactccccacccctttctccccgatccacccaggcctttctgtaaataaaagctcccaagttgggtacaaaccaggatattggagttactctatcctggagttaactaggatagag

SEQ ID NO: 311480 - DNA, 2774 bp, Homo sapiens
agcgccgggagactctgccgtcggtgcgtgcgcggacacgcacccgtcccccttggtctcgccgccagccatggccgccgctacggcctccccccgcagcctccttgttctcctccaggtggtagtgctcgctctggcgcagattagaggtccaccgggagagcggggccccccgggtcccccgggaccgccgggagtgcctggatccgacggcatcgacggtgacaatgggccccctggaaaagctggccctccgggacccaagggcgagcctggcaaagctgggccagatgggccagacgggaagcccgggattgatggtttaactggagccaagggggagcctggccccatggggatccctggagtcaagggccagcccgggcttcctggtcctcctggccttccgggccctggttttgctggacctcctgggcctcctggacctgttggcctccctggtgagattggaatccgaggccccaagggggaccctggaccagatggaccatcggggcccccaggaccccctgggaaacctggtcgcccgggaaccatccagggtctggaaggcagtgcggatttcctgtgtccaaccaactgtccacccggaatgaaaggtcccccagggctgcagggagtgaaggggcatgcgggcaaacgcgggattctgggtgatcctggccaccaggggaagccgggtcccaagggagatgtgggtgcctctggagagcaaggcatccctggaccaccgggtccccagggcatcaggggctacccaggcatggcagggcccaagggagagacgggccctcatggatataaaggcatggtgggcgctatcggtgccactgggccaccgggtgaggaaggtcctaggggaccgccaggccgagctggggagaagggtgacgagggcagcccaggtattcgtggaccccaggggatcacaggcccgaaaggagcaacgggccccccaggcatcaacggcaaggatgggaccccaggcacgcctggcatgaagggcagtgcaggacaggcgggacagcccggaagtccaggccaccagggcctagcgggtgtgccaggccagcctgggacaaaaggaggccctggagaccagggtgagccgggcccgcagggccttcctggattctctggtccccctgggaaagagggagagccagggcctcgaggagaaattggtccccagggcatcatgggacagaagggtgaccaaggcgagaggggtccagtggggcaaccaggccctcagggaaggcagggccctaagggggagcagggcccccccggaattccagggccccaaggcttgccaggcgtcaaaggagacaagggctccccagggaagaccgggccccgcggcaaagtgggtgacccaggggtggccggcctccccggagagaaaggcgagaagggcgagtccggcgagccggggcccaagggacagcaaggagtacgtggagaacccggctaccctggccccagcggggatgcgggcgccccaggggttcagggctaccctggtccccccggccctcgaggactggccgggaaccgaggcgtgccaggacagcccgggagacagggcgtggagggccgggatgccactgaccagcacatcgtggatgtggcgctgaagatgctgcaagagcaactggcagaggtcgccgtgagtgccaagcgggaagccctgggtgcggtgggcatgatgggtcctccaggacctcctgggccccctgggtacccaggcaagcagggcccccatgggcaccctggccctcggggcgttcctggcatcgtgggagccgtgggtcagatcggcaacacggggcccaagggaaaacgtggagagaagggtgatccaggagaagtgggacgggggcaccccgggatgcctgggcccccagggatcccaggactccctggccggcctggccaggcaatcaacggcaaggatggagatcgagggtccccaggggctccaggagaggcaggtcgacctggcctgccaggccccgtggggctgccgggcttctgtgaacctgccgcctgccttggagcttcggcctatgcctctgcccgccttacagagcctggatccatcaaggggccttgagcatcaggcccagacagagcctggcaggcatcctggcgggaaggaccaggtcccctctgggtggacatgcacccatccccagtccaggaaaccatctcccccaggaccttctgtctgggactcaggagtcctaaggaaaaggaattctaaaacatgggggaaggggaggtagagcactgatgggtgaaaaagtgaggccaacacacagggcaagtggtgtcgatggagtcgaagcgctgaaggaatagggcggctttccttccagcgagcatcattcggctgttaccaaaacaaacatcttaatctgcacctttctccactggccatcttgtccttgggtcagtgggacatgggcacctcgggaggcccgggccctgcccagctacagttccacccctcagcttgaggaccaatgactgaggtctatgccagttcctgatcccatctcactctctggacctaccaggtgactgctgctgggtgactcccctgaggcggctatacccttaagccagccccactacttccttccctgcctcccagctcagtatttaacttatttccttttttttggtaatcccccccttttccgacaacccggctttgttcataaaggccccgtggggaaccggag

SEQ ID NO: 311481 - DNA, 1695 bp, Homo sapiens
acagggacccaaaaccatggaacaggtggtctgggaaaccttccctgatgaagcaaattagctgagacccaggggagagccagggcctcgaggagaaattggtccccagggcatcatgggacagaagggtgaccaaggcgagaggggtccagtggggcaaccaggccctcagggaaggcagggccctaagggggagcagggcccccccggaattccagggccccaaggcttgccaggcgtcaaaggagacaagggctccccagggaagaccgggccccgcggcaaagtgggtgacccaggggtggccggcctccccggagagaaaggcgagaagggcgagtccggcgagccggggcccaagggacagcaaggagtacgtggagaacccggctaccctggccccagcggggatgcgggcgccccaggggttcagggctaccctggtccccccggccctcgaggactggccgggaaccgaggcgtgccaggacagcccgggagacagggcgtggagggccgggatgccactgaccagcacatcgtggatgtggcgctgaagatgctgcaagagcaactggcagaggtcgccgtgagtgccaagcgggaagccctgggtgcggtgggcatgatgggtcctccaggacctcctgggccccctgggtacccaggcaagcagggcccccatgggcaccctggccctcggggcgttcctggcatcgtgggagccgtgggtcagatcggcaacacggggcccaagggaaaacgtggagagaagggtgatccaggagaagtgggacgggggcaccccgggatgcctgggcccccagggatcccaggactccctggccggcctggccaggcaatcaacggcaaggatggagatcgagggtccccaggggctccaggagaggcaggtcgacctggcctgccaggccccgtggggctgccgggcttctgtgaacctgccgcctgccttggagcttcggcctatgcctctgcccgccttacagagcctggatccatcaaggggccttgagcatcaggcccagacagagcctggcaggcatcctggcgggaaggaccaggtcccctctgggtggacatgcacccatccccagtccaggaaaccatctcccccaggaccttctgtctgggactcaggagtcctaaggaaaaggaattctaaaacatgggggaaggggaggtagagcactgatgggtgaaaaagtgaggccaacacacagggcaagtggtgtcgatggagtcgaagcgctgaaggaatagggcggctttccttccagcgagcatcattcggctgttaccaaaacaaacatcttaatctgcacctttctccactggccatcttgtccttgggtcagtgggacatgggcacctcgggaggcccgggccctgcccagctacagttccacccctcagcttgaggaccaatgactgaggtctatgccagttcctgatcccatctcactctctggacctaccaggtgactgctgctgggtgactcccctgaggcggctatacccttaagccagccccactacttccttccctgcctcccagctcagtatttaaacatcatctcccttctctttctcgcataactccccacccctttctccccgatccacccaggcctttctgtaaataaaagctcccaagttgggtacaaaccagga

SEQ ID NO: 311482 - DNA, 2696 bp, Homo sapiens
acgtctcccttccgagggccgccgggggctgcgggcgcgcggagaggtccaccgggagagcggggccccccgggtcccccgggaccgccgggagtgcctggatccgacggcatcgacggtgacaatgggccccctggaaaagctggccctccgggacccaagggcgagcctggcaaagctgggccagatgggccagacgggaagcccgggattgatggtttaactggagccaagggggagcctggccccatggggatccctggagtcaagggccagcccgggcttcctggtcctcctggccttccgggccctggttttgctggacctcctgggcctcctggacctgttggcctccctggtgagattggaatccgaggccccaagggggaccctggaccagatggaccatcggggcccccaggaccccctgggaaacctggtcgcccgggaaccatccagggtctggaaggcagtgcggatttcctgtgtccaaccaactgtccacccggaatgaaaggtcccccagggctgcagggagtgaaggggcatgcgggcaaacgcgggattctgggtgatcctggccaccaggggaagccgggtcccaagggagatgtgggtgcctctggagagcaaggcatccctggaccaccgggtccccagggcatcaggggctacccaggcatggcagggcccaagggagagacgggccctcatggatataaaggcatggtgggcgctatcggtgccactgggccaccgggtgaggaaggtcctaggggaccgccaggccgagctggggagaagggtgacgagggcagcccaggtattcgtggaccccaggggatcacaggcccgaaaggagcaacgggccccccaggcatcaacggcaaggatgggaccccaggcacgcctggcatgaagggcagtgcaggacaggcgggacagcccggaagtccaggccaccagggcctagcgggtgtgccaggccagcctgggacaaaaggaggccctggagaccagggtgagccgggcccgcagggccttcctggattctctggtccccctgggaaagagggagagccagggcctcgaggagaaattggtccccagggcatcatgggacagaagggtgaccaaggcgagaggggtccagtggggcaaccaggccctcagggaaggcagggccctaagggggagcagggcccccccggaattccagggccccaaggcttgccaggcgtcaaaggagacaagggctccccagggaagaccgggccccgcggcaaagtgggtgacccaggggtggccggcctccccggagagaaaggcgagaagggcgagtccggcgagccggggcccaagggacagcaaggagtacgtggagaacccggctaccctggccccagcggggatgcgggcgccccaggggttcagggctaccctggtccccccggccctcgaggactggccgggaaccgaggcgtgccaggacagcccgggagacagggcgtggagggccgggatgccactgaccagcacatcgtggatgtggcgctgaagatgctgcaagagcaactggcagaggtcgccgtgagtgccaagcgggaagccctgggtgcggtgggcatgatgggtcctccaggacctcctgggccccctgggtacccaggcaagcagggcccccatgggcaccctggccctcggggcgttcctggcatcgtgggagccgtgggtcagatcggcaacacggggcccaagggaaaacgtggagagaagggtgatccaggagaagtgggacgggggcaccccgggatgcctgggcccccagggatcccaggactccctggccggcctggccaggcaatcaacggcaaggatggagatcgagggtccccaggggctccaggagaggcaggtcgacctggcctgccaggccccgtggggctgccgggcttctgtgaacctgccgcctgccttggagcttcggcctatgcctctgcccgccttacagagcctggatccatcaaggggccttgagcatcaggcccagacagagcctggcaggcatcctggcgggaaggaccaggtcccctctgggtggacatgcacccatccccagtccaggaaaccatctcccccaggaccttctgtctgggactcaggagtcctaaggaaaaggaattctaaaacatgggggaaggggaggtagagcactgatgggtgaaaaagtgaggccaacacacagggcaagtggtgtcgatggagtcgaagcgctgaaggaatagggcggctttccttccagcgagcatcattcggctgttaccaaaacaaacatcttaatctgcacctttctccactggccatcttgtccttgggtcagtgggacatgggcacctcgggaggcccgggccctgcccagctacagttccacccctcagcttgaggaccaatgactgaggtctatgccagttcctgatcccatctcactctctggacctaccaggtgactgctgctgggtgactcccctgaggcggctatacccttaagccagccccactacttccttccctgcctcccagctcagtatttaaacatcatctcccttctctttctcgcataactccccacccctttctccccgatccacccaggcctttctgtaaataaaagctcccaagttgggtacaaaccagga

SEQ ID NO: 311483 - DNA, 2586 bp, Homo sapiens
agcgccgggagactctgccgtcggtgcgtgcgcggacacgcacccgtcccccttggtctcgccgccagccatggccgccgctacggcctccccccgcagcctccttgttctcctccaggtggtagtgctcgctctggcgcagattagaggtccaccgggagagcggggccccccgggtcccccgggaccgccgggagtgcctggatccgacggcatcgacgggcctcctggacctgttggcctccctggtgagattggaatccgaggccccaagggggaccctggaccagatggaccatcggggcccccaggaccccctgggaaacctggtcgcccgggaaccatccagggtctggaaggcagtgcggatttcctgtgtccaaccaactgtccacccggaatgaaaggtcccccagggctgcagggagtgaaggggcatgcgggcaaacgcgggattctgggtgatcctggccaccaggggaagccgggtcccaagggagatgtgggtgcctctggagagcaaggcatccctggaccaccgggtccccagggcatcaggggctacccaggcatggcagggcccaagggagagacgggccctcatggatataaaggcatggtgggcgctatcggtgccactgggccaccgggtgaggaaggtcctaggggaccgccaggccgagctggggagaagggtgacgagggcagcccaggtattcgtggaccccaggggatcacaggcccgaaaggagcaacgggccccccaggcatcaacggcaaggatgggaccccaggcacgcctggcatgaagggcagtgcaggacaggcgggacagcccggaagtccaggccaccagggcctagcgggtgtgccaggccagcctgggacaaaaggaggccctggagaccagggtgagccgggcccgcagggccttcctggattctctggtccccctgggaaagagggagagccagggcctcgaggagaaattggtccccagggcatcatgggacagaagggtgaccaaggcgagaggggtccagtggggcaaccaggccctcagggaaggcagggccctaagggggagcagggcccccccggaattccagggccccaaggcttgccaggcgtcaaaggagacaagggctccccagggaagaccgggccccgcggcaaagtgggtgacccaggggtggccggcctccccggagagaaaggcgagaagggcgagtccggcgagccggggcccaagggacagcaaggagtacgtggagaacccggctaccctggccccagcggggatgcgggcgccccaggggttcagggctaccctggtccccccggccctcgaggactggccgggaaccgaggcgtgccaggacagcccgggagacagggcgtggagggccgggatgccactgaccagcacatcgtggatgtggcgctgaagatgctgcaagagcaactggcagaggtcgccgtgagtgccaagcgggaagccctgggtgcggtgggcatgatgggtcctccaggacctcctgggccccctgggtacccaggcaagcagggcccccatgggcaccctggccctcggggcgttcctggcatcgtgggagccgtgggtcagatcggcaacacggggcccaagggaaaacgtggagagaagggtgatccaggagaagtgggacgggggcaccccgggatgcctgggcccccagggatcccaggactccctggccggcctggccaggcaatcaacggcaaggatggagatcgagggtccccaggggctccaggagaggcaggtcgacctggcctgccaggccccgtggggctgccgggcttctgtgaacctgccgcctgccttggagcttcggcctatgcctctgcccgccttacagagcctggatccatcaaggggccttgagcatcaggcccagacagagcctggcaggcatcctggcgggaaggaccaggtcccctctgggtggacatgcacccatccccagtccaggaaaccatctcccccaggaccttctgtctgggactcaggagtcctaaggaaaaggaattctaaaacatgggggaaggggaggtagagcactgatgggtgaaaaagtgaggccaacacacagggcaagtggtgtcgatggagtcgaagcgctgaaggaatagggcggctttccttccagcgagcatcattcggctgttaccaaaacaaacatcttaatctgcacctttctccactggccatcttgtccttgggtcagtgggacatgggcacctcgggaggcccgggccctgcccagctacagttccacccctcagcttgaggaccaatgactgaggtctatgccagttcctgatcccatctcactctctggacctaccaggtgactgctgctgggtgactcccctgaggcggctatacccttaagccagccccactacttccttccctgcctcccagctcagtatttaaacatcatctcccttctctttctcgcataactccccacccctttctccccgatccacccaggcctttctgtaaataaaagctcccaagttgggtacaaaccagga

SEQ ID NO: 311484 - DNA, 370 bp, Homo sapiens
ctcccaaagctcactgattgggagctgggggtaggggacaatcacagaatctctgcctctggggcagagtcctttctcctatggtgttttggcctcattttctccatctgaaaagtttccccaccttcaaaattctgggcctgagacaagaggtgcccctaatgtcttgactttctcctgttcacaggactccctggccggcctggccaggcaatcaacggcaaggatggagatcgagggtccccaggggctccaggagaggcaggtcgacctggcctgccaggccccgtggggctgccgggcttctgtgaacctgccgcctgccttggagcttcggcctatgcctctgcccgccttacagagcctggat

SEQ ID NO: 311485 - DNA, 373 bp, Homo sapiens
gatctcagtttccctacctgcatctgggtagaagccatggccctctggctggagctttaatttgtatctttggttatctgtctatcccagggcagtgcaggacaggcgggacagcccggaagtccaggccaccagggcctagcggtaagtgtcaggtggagccacaggggctggccaggggctagtggctgatgaggttagaatccacacacacccggggctcttgctcaatcaccacctcttgccttgttaccaactctgtggcccctggcctggcgaaggcttcattacttggacaattactctagccttctctttggccattccagtcctccatgttggctaaatgggatctgaccatttctgcactata

SEQ ID NO: 311486 - DNA, 900 bp, Homo sapiens
tcctgccctgcagtctggaatagagctgctgcccaactcgctcatcccccttcacgtttctctaaaagccccaaccttcctcccacacgtgcccaaatccaagaggcatcagcttggagcccccagccctggtagtgggtctcacagctggcacctcatgacatcagcatgtctgtaccttcttgcatgttgctgtcaccctctccagcccggccagggttattctcatgctcctgtgatttgtttttggtttttatttttgaggaaaagggggctcttttcccaaagattgcaaggcttaggggacctggacagaagagaggagagtgaggagagcctttgggagcggcctgccagggcctgtgtgtgcccacttggggtagtgtgagccgtagtgtgctgtctcaccaacttgtatcttgcagggtgacaatgggccccctggaaaagctggccctccgggacccaagggcgagcctggcaaagctgggccagatgggccagacgggaagcccgggattgatggtttaactggagccaagggggagcctggccccatggggatccctggagtcaagggccagcccgggcttcctggtcctcctggccttccgggccctggttttgctggacctcctgtaagtcctcagggatggggcaggatccccagaactcccagggaaggaggggacaacagaaaggcttcgagggaatggccaccatgggaaggagccagcttgctgtgatagtgtcaggaataagtggacctgccagagacccagggccagcccactctgggcctgtccactggctctgcaattctctggtccttaaagcctcagtctgtcagtctctctggggttggcaaaaaaaaaaaaaaagtaaaagtggagaaacggg

SEQ ID NO: 311487 - DNA, 2799 bp, Homo sapiens
agcgccgggagactctgccgtcggtgcgtgcgcggacacgcacccgtcccccttggtctcgccgccagccatggccgccgctacggcctccccccgcagcctccttgttctcctccaggtggtagtgctcgctctggcgcagattagaggtccaccgggagagcggggccccccgggtcccccgggaccgccgggagtgcctggatccgacggcatcgacggtgacaatgggccccctggaaaagctggccctccgggacccaagggcgagcctggcaaagctgggccagatgggccagacgggaagcccgggattgatggtttaactggagccaagggggagcctggccccatggggatccctggagtcaagggccagcccgggcttcctggtcctcctggccttccgggccctggttttgctggacctcctgggcctcctggacctgttggcctccctggtgagattggaatccgaggccccaagggggaccctggaccagatggaccatcggggcccccaggaccccctgggaaacctggtcgcccgggaaccatccagggtctggaaggcagtgcggatttcctgtgtccaaccaactgtccacccggaatgaaaggtcccccagggctgcagggagtgaaggggcatgcgggcaaacgcgggattctgggtgatcctggccaccaggggaagccgggtcccaagggagatgtgggtgcctctggagagcaaggcatccctggaccaccgggtccccagggcatcaggggctacccaggcatggcagggcccaagggagagacgggccctcatggatataaaggcatggtgggcgctatcggtgccactgggccaccgggtgaggaaggtcctaggggaccgccaggccgagctggggagaagggtgacgagggcagcccaggtattcgtggaccccaggggatcacaggcccgaaaggagcaacgggccccccaggcatcaacggcaaggatgggaccccaggcacgcctggcatgaagggcagtgcaggacaggcgggacagcccggaagtccaggccaccagggcctagcgggtgtgccaggccagcctgggacaaaaggaggccctggagaccagggtgagccgggcccgcagggccttcctggattctctggtccccctgggaaagagggagagccagggcctcgaggagaaattggtccccagggcatcatgggacagaagggtgaccaaggcgagaggggtccagtggggcaaccaggccctcagggaaggcagggccctaagggggagcagggcccccccggaattccagggccccaaggcttgccaggcgtcaaaggagacaagggctccccagggaagaccgggccccgcggcaaagtgggtgacccaggggtggccggcctccccggagagaaaggcgagaagggcgagtccggcgagccggggcccaagggacagcaaggagtacgtggagaacccggctaccctggccccagcggggatgcgggcgccccaggggttcagggctaccctggtccccccggccctcgaggactggccgggaaccgaggcgtgccaggacagcccgggagacagggcgtggagggccgggatgccactgaccagcacatcgtggatgtggcgctgaagatgctgcaagagcaactggcagaggtcgccgtgagtgccaagcgggaagccctgggtgcggtgggcatgatgggtcctccaggacctcctgggccccctgggtacccaggcaagcagggcccccatgggcaccctggccctcggggcgttcctggcatcgtgggagccgtgggtcagatcggcaacacggggcccaagggaaaacgtggagagaagggtgatccaggagaagtgggacgggggcaccccgggatgcctgggcccccagggatcccaggactccctggccggcctggccaggcaatcaacggcaaggatggagatcgagggtccccaggggctccaggagaggcaggtcgacctggcctgccaggccccgtggggctgccgggcttctgtgaacctgccgcctgccttggagcttcggcctatgcctctgcccgccttacagagcctggatccatcaaggggccttgagcatcaggcccagacagagcctggcaggcatcctggcgggaaggaccaggtcccctctgggtggacatgcacccatccccagtccaggaaaccatctcccccaggaccttctgtctgggactcaggagtcctaaggaaaaggaattctaaaacatgggggaaggggaggtagagcactgatgggtgaaaaagtgaggccaacacacagggcaagtggtgtcgatggagtcgaagcgctgaaggaatagggcggctttccttccagcgagcatcattcggctgttaccaaaacaaacatcttaatctgcacctttctccactggccatcttgtccttgggtcagtgggacatgggcacctcgggaggcccgggccctgcccagctacagttccacccctcagcttgaggaccaatgactgaggtctatgccagttcctgatcccatctcactctctggacctaccaggtgactgctgctgggtgactcccctgaggcggctatacccttaagccagccccactacttccttccctgcctcccagctcagtatttaaacatcatctcccttctctttctcgcataactccccacccctttctccccgatccacccaggcctttctgtaaataaaagctcccaagttgggtacaaaccagga

SEQ ID NO: 311488 - DNA, 3244 bp, Homo sapiens
agcgccgggagactctgccgtcggtgcgtgcgcggacacgcacccgtcccccttggtctcgccgccagccatggccgccgctacggcctccccccgcagcctccttgttctcctccaggtggtagtgctcgctctggcgcagattagaggtccaccgggagagcggggccccccgggtcccccgggaccgccgggagtgcctggatccgacggcatcgacggtgacaatgggccccctggaaaagctggccctccgggacccaagggcgagcctggcaaagctgggccagatgggccagacgggaagcccgggattgatggtttaactggagccaagggggagcctggccccatggggatccctggagtcaagggccagcccgggcttcctggtcctcctggccttccgggccctggttttgctggacctcctgggcctcctggacctgttggcctccctggtgagattggaatccgaggccccaagggggaccctggaccagatggaccatcggggcccccaggaccccctgggaaacctggtcgcccgggaaccatccagggtctggaaggcagtgcggatttcctgtgtccaaccaactgtccacccggaatgaaaggtcccccagggctgcagggagtgaaggggcatgcgggcaaacgcgggattctgggtgatcctggccaccaggggaagccgggtcccaagggagatgtgggtgcctctggagagcaaggcatccctggaccaccgggtccccagggcatcaggggctacccaggcatggcagggcccaagggagagacgggccctcatggatataaaggcatggtgggcgctatcggtgccactgggccaccgggtgaggaaggtcctaggggaccgccaggccgagctggggagaagggtgacgagggcagcccaggtattcgtggaccccaggggatcacaggcccgaaaggagcaacgggccccccaggcatcaacggcaaggatgggaccccaggcacgcctggcatgaagggcagtgcaggacaggcgggacagcccggaagtccaggccaccagggcctagcgggtgtgccaggccagcctgggacaaaaggaggccctggagaccagggtgagccgggcccgcagggccttcctggattctctggtccccctgggaaagagggagagccagggcctcgaggagaaattggtccccagggcatcatgggacagaagggtgaccaaggcgagaggggtccagtggggcaaccaggccctcagggaaggcagggccctaagggggagcagggcccccccggaattccagggccccaaggcttgccaggcgtcaaaggagacaagggctccccagggaagaccgggccccgcggcaaagtgggtgacccaggggtggccggcctccccggagagaaaggcgagaagggcgagtccggcgagccggggcccaagggacagcaaggagtacgtggagaacccggctaccctggccccagcggggatgcgggcgccccaggggttcagggctaccctggtccccccggccctcgaggactggccgggaaccgaggcgtgccaggacagcccgggagacagggcgtggagggccgggatgccactgaccagcacatcgtggatgtggcgctgaagatgctgcaagagcaactggcagaggtcgccgtgagtgccaagcgggaagccctgggtgcggtgggcatgatgggtcctccaggacctcctgggccccctgggtacccaggcaagcagggcccccatgggcaccctggccctcggggcgttcctggcatcgtgggagccgtgggtcagatcggcaacacggggcccaagggaaaacgtggagagaagggtgatccaggagaagtgggacgggggcaccccgggatgcctgggcccccagggatcccaggactccctggccggcctggccaggcaatcaacggcaaggatggagatcgagggtccccaggggctccaggagaggcaggtcgacctggcctgccaggccccgtggggctgccgggcttctgtgaacctgccgcctgccttggagcttcggcctatgcctctgcccgccttacagagcctggatccatcaaggggccttgagcatcaggcccagacagagcctggcaggcatcctggcgggaaggaccaggtcccctctgggtggacatgcacccatccccagtccaggaaaccatctcccccaggaccttctgtctgggactcaggagtcctaaggaaaaggaattctaaaacatgggggaaggggaggtagagcactgatgggtgaaaaagtgaggccaacacacagggcaagtggtgtcgatggagtcgaagcgctgaaggaatagggcggctttccttccagcgagcatcattcggctgttaccaaaacaaacatcttaatctgcacctttctccactggccatcttgtccttgggtcagtgggacatgggcacctcgggaggcccgggccctgcccagctacagttccacccctcagcttgaggaccaatgactgaggtctatgccagttcctgatcccatctcactctctggacctaccaggtgactgctgctgggtgactcccctgaggcggctatacccttaagccagccccactacttccttccctgcctcccagctcagtatttaaacatcatctcccttctctttctcgcataactccccacccctttctccccgatccacccaggcctttctgtaaataaaagctcccaagttgggtacaaaccaggaaaaaaaaaaaaaaaaaaaaaaaaaaaaaaaaaaaaaaaaaaaaaaaaaaaaaaaaaaaaaaaagggggggggcgcgccgcaaaagaccccccggggggggcgccacacgtagtatccagcgcgagacacccaccgtttcttgtgtggtaacacagggggcgccccaattagggggaggcgcgactaatctataaagcgccgcggcggcggcagcgcgcgcggtcttacaacaccacgccatgcggacgcgggcggaacaaaacgcggcccccgccgggggagaccaccctgtggaggaacaaggaccacccccacctctctgcggcgggggcgggagcagcccaactagggggagcaccaacacctcctcccccacggagatacttctaccacgcccccccaggagcggcccattactaactccccttccacgcgggtgcttccg

SEQ ID NO: 311489 - DNA, 2731 bp, Homo sapiens
tatagccgccgacagacaaggagctgctgttcagtccgccggccgcagctcacagcgaggcctcatccccctcctctcctttcccctccttgtggggtaggaggcgactcaacccctcaccctgcctctggcacatctggacgcttcttcagggtgacaatgggccccctggaaaagctggccctccgggacccaagggcgagcctggcaaagctgggccagatgggccagacgggaagcccgggattgatggtttaactggagccaagggggagcctggccccatggggatccctggagtcaagggccagcccgggcttcctggtcctcctggccttccgggccctggttttgctggacctcctgggcctcctggacctgttggcctccctggtgagattggaatccgaggccccaagggggaccctggaccagatggaccatcggggcccccaggaccccctgggaaacctggtcgcccgggaaccatccagggtctggaaggcagtgcggatttcctgtgtccaaccaactgtccacccggaatgaaaggtcccccagggctgcagggagtgaaggggcatgcgggcaaacgcgggattctgggtgatcctggccaccaggggaagccgggtcccaagggagatgtgggtgcctctggagagcaaggcatccctggaccaccgggtccccagggcatcaggggctacccaggcatggcagggcccaagggagagacgggccctcatggatataaaggcatggtgggcgctatcggtgccactgggccaccgggtgaggaaggtcctaggggaccgccaggccgagctggggagaagggtgacgagggcagcccaggtattcgtggaccccaggggatcacaggcccgaaaggagcaacgggccccccaggcatcaacggcaaggatgggaccccaggcacgcctggcatgaagggcagtgcaggacaggcgggacagcccggaagtccaggccaccagggcctagcgggtgtgccaggccagcctgggacaaaaggaggccctggagaccagggtgagccgggcccgcagggccttcctggattctctggtccccctgggaaagagggagagccagggcctcgaggagaaattggtccccagggcatcatgggacagaagggtgaccaaggcgagaggggtccagtggggcaaccaggccctcagggaaggcagggccctaagggggagcagggcccccccggaattccagggccccaaggcttgccaggcgtcaaaggagacaagggctccccagggaagaccgggccccgcggcaaagtgggtgacccaggggtggccggcctccccggagagaaaggcgagaagggcgagtccggcgagccggggcccaagggacagcaaggagtacgtggagaacccggctaccctggccccagcggggatgcgggcgccccaggggttcagggctaccctggtccccccggccctcgaggactggccgggaaccgaggcgtgccaggacagcccgggagacagggcgtggagggccgggatgccactgaccagcacatcgtggatgtggcgctgaagatgctgcaagagcaactggcagaggtcgccgtgagtgccaagcgggaagccctgggtgcggtgggcatgatgggtcctccaggacctcctgggccccctgggtacccaggcaagcagggcccccatgggcaccctggccctcggggcgttcctggcatcgtgggagccgtgggtcagatcggcaacacggggcccaagggaaaacgtggagagaagggtgatccaggagaagtgggacgggggcaccccgggatgcctgggcccccagggatcccaggactccctggccggcctggccaggcaatcaacggcaaggatggagatcgagggtccccaggggctccaggagaggcaggtcgacctggcctgccaggccccgtggggctgccgggcttctgtgaacctgccgcctgccttggagcttcggcctatgcctctgcccgccttacagagcctggatccatcaaggggccttgagcatcaggcccagacagagcctggcaggcatcctggcgggaaggaccaggtcccctctgggtggacatgcacccatccccagtccaggaaaccatctcccccaggaccttctgtctgggactcaggagtcctaaggaaaaggaattctaaaacatgggggaaggggaggtagagcactgatgggtgaaaaagtgaggccaacacacagggcaagtggtgtcgatggagtcgaagcgctgaaggaatagggcggctttccttccagcgagcatcattcggctgttaccaaaacaaacatcttaatctgcacctttctccactggccatcttgtccttgggtcagtgggacatgggcacctcgggaggcccgggccctgcccagctacagttccacccctcagcttgaggaccaatgactgaggtctatgccagttcctgatcccatctcactctctggacctaccaggtgactgctgctgggtgactcccctgaggcggctatacccttaagccagccccactacttccttccctgcctcccagctcagtatttaaacatcatctcccttctctttctcgcataactccccacccctttctccccgatccacccaggcctttctgtaaataaaagctcccaagttgggtacaaaccagga

SEQ ID NO: 311490 - DNA, 3004 bp, Homo sapiens
tcctgccctgcagtctggaatagagctgctgcccaactcgctcatcccccttcacgtttctctaaaagccccaaccttcctcccacacgtgcccaaatccaagaggcatcagcttggagcccccagccctggtagtgggtctcacagctggcacctcatgacatcagcatgtctgtaccttcttgcatgttgctgtcaccctctccagcccggccagggttattctcatgctcctgtgatttgtttttggtttttatttttgaggaaaagggggctcttttcccaaagattgcaaggcttaggggacctggacagaagagaggagagtgaggagagcctttgggagcggcctgccagggcctgtgtgtgcccacttggggtagtgtgagccgtagtgtgctgtctcaccaacttgtatcttgcagggtgacaatgggccccctggaaaagctggccctccgggacccaagggcgagcctggcaaagctgggccagatgggccagacgggaagcccgggattgatggtttaactggagccaagggggagcctggccccatggggatccctggagtcaagggccagcccgggcttcctggtcctcctggccttccgggccctggttttgctggacctcctgggcctcctggacctgttggcctccctggtgagattggaatccgaggccccaagggggaccctggaccagatggaccatcggggcccccaggaccccctgggaaacctggtcgcccgggaaccatccagggtctggaaggcagtgcggatttcctgtgtccaaccaactgtccacccggaatgaaaggtcccccagggctgcagggagtgaaggggcatgcgggcaaacgcgggattctgggtgatcctggccaccaggggaagccgggtcccaagggagatgtgggtgcctctggagagcaaggcatccctggaccaccgggtccccagggcatcaggggctacccaggcatggcagggcccaagggagagacgggccctcatggatataaaggcatggtgggcgctatcggtgccactgggccaccgggtgaggaaggtcctaggggaccgccaggccgagctggggagaagggtgacgagggcagcccaggtattcgtggaccccaggggatcacaggcccgaaaggagcaacgggccccccaggcatcaacggcaaggatgggaccccaggcacgcctggcatgaagggcagtgcaggacaggcgggacagcccggaagtccaggccaccagggcctagcgggtgtgccaggccagcctgggacaaaaggaggccctggagaccagggtgagccgggcccgcagggccttcctggattctctggtccccctgggaaagagggagagccagggcctcgaggagaaattggtccccagggcatcatgggacagaagggtgaccaaggcgagaggggtccagtggggcaaccaggccctcagggaaggcagggccctaagggggagcagggcccccccggaattccagggccccaaggcttgccaggcgtcaaaggagacaagggctccccagggaagaccgggccccgcggcaaagtgggtgacccaggggtggccggcctccccggagagaaaggcgagaagggcgagtccggcgagccggggcccaagggacagcaaggagtacgtggagaacccggctaccctggccccagcggggatgcgggcgccccaggggttcagggctaccctggtccccccggccctcgaggactggccgggaaccgaggcgtgccaggacagcccgggagacagggcgtggagggccgggatgccactgaccagcacatcgtggatgtggcgctgaagatgctgcaagagcaactggcagaggtcgccgtgagtgccaagcgggaagccctgggtgcggtgggcatgatgggtcctccaggacctcctgggccccctgggtacccaggcaagcagggcccccatgggcaccctggccctcggggcgttcctggcatcgtgggagccgtgggtcagatcggcaacacggggcccaagggaaaacgtggagagaagggtgatccaggagaagtgggacgggggcaccccgggatgcctgggcccccagggatcccaggactccctggccggcctggccaggcaatcaacggcaaggatggagatcgagggtccccaggggctccaggagaggcaggtcgacctggcctgccaggccccgtggggctgccgggcttctgtgaacctgccgcctgccttggagcttcggcctatgcctctgcccgccttacagagcctggatccatcaaggggccttgagcatcaggcccagacagagcctggcaggcatcctggcgggaaggaccaggtcccctctgggtggacatgcacccatccccagtccaggaaaccatctcccccaggaccttctgtctgggactcaggagtcctaaggaaaaggaattctaaaacatgggggaaggggaggtagagcactgatgggtgaaaaagtgaggccaacacacagggcaagtggtgtcgatggagtcgaagcgctgaaggaatagggcggctttccttccagcgagcatcattcggctgttaccaaaacaaacatcttaatctgcacctttctccactggccatcttgtccttgggtcagtgggacatgggcacctcgggaggcccgggccctgcccagctacagttccacccctcagcttgaggaccaatgactgaggtctatgccagttcctgatcccatctcactctctggacctaccaggtgactgctgctgggtgactcccctgaggcggctatacccttaagccagccccactacttccttccctgcctcccagctcagtatttaaacatcatctcccttctctttctcgcataactccccacccctttctccccgatccacccaggcctttctgtaaataaaagctcccaagttgggtacaaaccagga

SEQ ID NO: 311491 - DNA, 2676 bp, Homo sapiens
tatagccgccgacagacaaggagctgctgttcagtccgccggccgcagctcacagcgaggcctcatccccctcctctcctttcccctccttgtggggtaggaggcgactcaacccctcaccctgcctctggcacatctggacgcttcttcagggtgacaatgggccccctggaaaagctggccctccgggacccaagggcgagcctggcaaagctgggccagatgggccagacgggaagcccgggattgatggtttaactggagccaagggggagcctggccccatggggatccctggagtcaagggccagcccgggcttcctggtcctcctggccttccgggccctggttttgctggacctcctgggcctcctggacctgttggcctccctggtgagattggaatccgaggccccaagggggaccctggaccagatggaccatcggggcccccaggaccccctgggaaacctggtcgcccgggaaccatccagggtctggaaggcagtgcggatttcctgtgtccaaccaactgtccacccggaatgaaaggtcccccagggctgcagggagtgaaggggcatgcgggcaaacgcgggattctgggtgatcctggccaccaggggaagccgggtcccaagggagatgtgggtgcctctggagagcaaggcatccctggaccaccgggtccccagggcatcaggggctacccaggcatggcagggcccaagggagagacgggccctcatggatataaaggcatggtgggcgctatcggtgccactgggccaccgggtgaggaaggtcctaggggaccgccaggccgagctggggagaagggtgacgagggcagcccaggtattcgtggaccccaggggatcacaggcccgaaaggagcaacgggccccccaggcatcaacggcaaggatgggaccccaggcacgcctggcatgaagggcagtgcaggacaggcgggacagcccggaagtccaggccaccagggcctagcgggtgtgccaggccagcctgggacaaaaggaggccctggagaccagggtgagccgggcccgcagggccttcctggattctctggtccccctgggaaagagggagagccagggcctcgaggagaaattggtccccagggcatcatgggacagaagggtgaccaaggcgagaggggtccagtggggcaaccaggccctcagggaaggcagggccctaagggggagcagggcccccccggaattccagggccccaaggcttgccaggcgtcaaaggagacaagggctccccagggaagaccgggccccgcggcaaagtgggtgacccaggggtggccggcctccccggagagaaaggcgagaagggcgagtccggcgagccggggcccaagggacagcaaggagtacgtggagaacccggctaccctggccccagcggggatgcgggcgccccaggggttcagggctaccctggtccccccggccctcgaggactggccgggaaccgaggcgtgccaggacagcccgggagacagggcgtggagagcaactggcagaggtcgccgtgagtgccaagcgggaagccctgggtgcggtgggcatgatgggtcctccaggacctcctgggccccctgggtacccaggcaagcagggcccccatgggcaccctggccctcggggcgttcctggcatcgtgggagccgtgggtcagatcggcaacacggggcccaagggaaaacgtggagagaagggtgatccaggagaagtgggacgggggcaccccgggatgcctgggcccccagggatcccaggactccctggccggcctggccaggcaatcaacggcaaggatggagatcgagggtccccaggggctccaggagaggcaggtcgacctggcctgccaggccccgtggggctgccgggcttctgtgaacctgccgcctgccttggagcttcggcctatgcctctgcccgccttacagagcctggatccatcaaggggccttgagcatcaggcccagacagagcctggcaggcatcctggcgggaaggaccaggtcccctctgggtggacatgcacccatccccagtccaggaaaccatctcccccaggaccttctgtctgggactcaggagtcctaaggaaaaggaattctaaaacatgggggaaggggaggtagagcactgatgggtgaaaaagtgaggccaacacacagggcaagtggtgtcgatggagtcgaagcgctgaaggaatagggcggctttccttccagcgagcatcattcggctgttaccaaaacaaacatcttaatctgcacctttctccactggccatcttgtccttgggtcagtgggacatgggcacctcgggaggcccgggccctgcccagctacagttccacccctcagcttgaggaccaatgactgaggtctatgccagttcctgatcccatctcactctctggacctaccaggtgactgctgctgggtgactcccctgaggcggctatacccttaagccagccccactacttccttccctgcctcccagctcagtatttaaacatcatctcccttctctttctcgcataactccccacccctttctccccgatccacccaggcctttctgtaaataaaagctcccaagttgggtacaaaccagga

SEQ ID NO: 311492 - DNA, 1573 bp, Homo sapiens
agcgccgggagactctgccgtcggtgcgtgcgcggacacgcacccgtcccccttggtctcgccgccagccatggccgccgctacggcctccccccgcagcctccttgttctcctccaggtggtagtgctcgctctggcgcagattagaggtccaccgggagagcggggccccccgggtcccccgggaccgccgggagtgcctggatccgacggcatcgacggtgacaatgggccccctggaaaagctggccctccgggacccaagggcgagcctggcaaagctgggccagatgggccagacgggaagcccgggattgatggtttaactggagccaagggggagcctggccccatggggatccctggagtcaagggccagcccgggcttcctggtcctcctggccttccgggccctggttttgctggacctcctgggcctcctggacctgttggcctccctggtgagattggaatccgaggccccaagggggaccctggaccagatggaccatcggggcccccaggaccccctgggaaacctggtcgcccgggaaccatccagggtctggaaggcagtgcggatttcctgtgtccaaccaactgtccacccggaatgaaaggtcccccagggctgcagggagtgaaggggcatgcgggcaaacgcgggattctgggtgatcctggccaccaggggaagccggtgagtgcaagggctgaggagccactctactccttgaagtctcttgatgcaccttacctggggccctttccttatccctctctgcagcattcccagagatggtccactggagggtttcagcaccacagagaggctgatgattcacaaatctcatgcagttacacctcattccttctgacagcaatttgaaggggctgaaagggggctaatccctaaggaccagtggttggtagcctacgtaagactccctggtgggtaaatttcactcagaccatttgctgtgatctacgaatctcctatatgcctttctaaactcaactctgtgcttagactctggtacattccactgcagccataccagcctatgctgtccctctaacacgtgtacaacacacaagccatgccctgtttggaatgttcttccccaaaatatcactgccagtgaccttgcttcaggtctttattcaaaaactgacctcatccttaccctgatattccagaataccattctgctttattatttgtcttccacacttagcactattcaacataaagcactagaatataagctccacgagggtggaaacttttgctcttatttgctgttctattctgcagcacatcaaacagtgcctggcacacagcaggtgctcaataaatatttattaaatgaatatgttcaggatgctcagaggaagatcccaccaatcatcaaaccaggaaggaagggatctggtctccacttgtgtgtggctgagatgtgttctgagatggcccagtgtccgagttttattccctcacctactgagaacagggacctgccctttgacagctgaatcttgggaggcaacagtctgatgcaaaaaaaaaaaa

SEQ ID NO: 311493 - DNA, 680 bp, Homo sapiens
  misc_feature (1)..(1): n is a, c, g, or t
ngagacagtgcctcactctgtcacccaggctggagtgtagtggcatgatctgggctcactgcaacctcctcctcctggattcaagcaattctcttgcttcagcctcccaagtagctgagactacaagcacccaccatcacacccagctaattttgtatttttcagtagagacggggtttcgccacattggccgtgttggtcttgaactcctggcctcaagcgatccgcctacctcagcctcccaaagtgctaggattacaggcataagccactgagcccagccctagttcagtatcttttatgtaaattacaaacatctgcaacattatgtatcatatgcagatacttattgcatttcttttattagtggtgaaagtgttctatgcatttattggctcttgaatttcctcatctatgaattgtcattcatacacctacttttctgcttcgtttttacatatgtctttgcctattaaagatattatccctctgttttatattttctctcattcttgtattgccttttaaattttgttatgatgtttcattaataaacagtgttttgttttcctctataatcaaatctagattttccctttgtgatttccgacaccacttccattcttagaagtacttttccattcataaagtagtaaaataaaatagttttttctctaaac

SEQ ID NO: 311494 - DNA, 3544 bp, Homo sapiens
gagcgcagcagcagggccgggtcctgcgcctcgggggtcggcgtccaggctcggagcgcggcacggagacggcggcagcgctggactaggtggcaggccctgcatcatggaaactctttctaatgcaagtggtacttttgccatacgccttttaaagatactgtgtcaagataacccttcgcacaacgtgttctgttctcctgtgagcatctcctctgccctggccatggttctcctaggggcaaagggaaacaccgcaacccagatggcccaggcactgtctttaaacacagaggaagacattcatcgggctttccagtcgcttctcactgaagtgaacaaggctggcacacagtacctgctgagaacggccaacaggctctttggagagaaaacttgtcagttcctctcaacgtttaaggaatcctgtcttcaattctaccatgctgagctgaaggagctttcctttatcagagctgcagaagagtccaggaaacacatcaacacctgggtctcaaaaaagaccgaaggtaaaattgaagagttgttgccgggtagctcaattgatgcagaaaccaggctggttcttgtcaatgccatctacttcaaaggaaagtggaatgaaccgtttgacgaaacatacacaagggaaatgccctttaaaataaaccaggaggagcaaaggccagtgcagatgatgtatcaggaggccacgtttaagctcgcccacgtgggcgaggtgcgcgcgcagctgctggagctgccctacgccaggaaggagctgagcctgctggtgctgctgcctgacgacggcgtggagctcagcacggtggaaaaaagtctcacttttgagaaactcacagcctggaccaagccagactgtatgaagagtactgaggttgaagttctccttccaaaatttaaactacaagaggattatgacatggaatctgtgcttcggcatttgggaattgttgatgccttccaacagggcaaggctgacttgtcggcaatgtcagcggagagagacctgtgtctgtccaagttcgtgcacaagagttttgtggaggtgaatgaagaaggcaccgaggcagcggcagcgtcgagctgctttgtagttgcagagtgctgcatggaatctggccccaggttctgtgctgaccaccctttccttttcttcatcaggcacaacagagccaacagcattctgttctgtggcaggttctcatcgccataaagggtgcacttaccgtgcactcggccatttccctcttcctgtgtccccagatccccactacagctccaagaggatgggcctagaaagccaagtgcaaagatgagggcagattctttacctgtctgccctcatgatttgccagcatgaattcatgatgctccacactcgcttatgctacttaatcagaatcttgagaaaatagaccataatgattccctgttgtattaaaattgcagtccaaatcccataggatggcaagcaaagttcttctagaattccacatgcaattcactctggcgaccctgtgctttcctgacactgcgaatacattccttaacccgctgcctcagtggtaataaatggtgctagatattgctactattttatagatttcctggtgcttagccttataaaaaaggttgtaaaatgtacatttatattttatctttttttttttttttttctgagacgcagtctggctctctgtcgcccaggctggagtgcagtggctcgatctcggctcactgcaagctccgcctcccgggttcacgccattctcctgcctcagcctcccgagtagctgggactacaggcgcccgccaccacgcccggctaattttttgtatttttagtagagacggggtttcaccgtgttagccaggatggtgtcgatctcctgacctcgtgatccacccgcctcggcctcccaaagtgctgggattacaggcttgagccaccgcgcccggctatattttatcttttatctttttctttgacatttaccaatcaccaagcatgcaccaaacactgctttaggcactggggacacaaaggggacagagccatcctcctttgacacctggtcttcagttctgtgcccaacgtatatagttttgacaatgaccaggttggactgtttaatgtctttcaacttaccacgtaatcctcttgtagggatcacatctttctttatgatattgtatttctctacctctaacagtaaaaattccattcaacccttaaagctcacttcaaattcttctttgagaagtttttcctttctccgcaaccagatgtacatatttgaactctctttgtacttggagggcacttctttcgtggtagttcttttatttttattaatctctgtatccttagatagtcctccaacaaccaaaggttgggactctgtcttacatatctgggtgcccctcatagtgcagtaataagtaagttgattatatacgagctatgtaacttatattttttaatggttggatatcactgagtttttttttttaagaatttttttattgaggtaaacttcacataacataaaattaactattttaaagtgagaagttcagtgccacttagtattgttaacaatgttgcataaccaccacctttatttaaagttccaaaaaaaatgttctcctctaaaaggaaaccccatcccattaagcagatactctccattccttccttcctccagcccccagcaaccaccaatctgctttctgtctctatggatttatctattcttgctattttatataaatcgaattgtatgagaccttttgtgtctggcttctttcacttagtacaagtttttgagatttatttacatagtagcatgtatcaacacttcatttttatggccaaataaaattgtattatgtgtttatagcacaatttatttatccactcattcattgatggactttgggttgtttctgacttttggctattgggaatagtgctgctatgaatgtttgtgtacctgtatttgtttgaatgcctattttgcattctcttgggtatatatctaggagtggaactgctgggtcatatgttaattctatgtttagctttttgaggaacagacaaactgttttccacagcagttgaaccattccacattcccaccagcaatgtatgagaattccaatttctgtccacttcctcaccaacacttattattttccttttcctttttttaaaaaaaataagttatggccatcttagtgggtgtgaagtggtatctcattgtgttttttatttgcatttcctatgtaatgagctagaaactaaagtacaaactagatgggacatccagtccctttgatagataatgctgagtaaaaaatgagatgaaagacatttgtttgtttttagaacacgagtgacagtttgttaaaaagctttagaggaggaatgaaaacaaagtgaagtacacttagaaaagggccaagtggacatcttggatgtcaagtgcctagttcagtatctttttttttttttttt

SEQ ID NO: 311495 - DNA, 3199 bp, Homo sapiens
gagcgcagcagcagggccgggtcctgcgcctcgggggtcggcgtccaggctcggagcgcggcacggagacggcggcagcgctggactaggtggcaggccctgcatcatggaaactctttctaatgcaagtggtacttttgccatacgccttttaaagatactgtgtcaagataacccttcgcacaacgtgttctgttctcctgtgagcatctcctctgccctggccatggttctcctaggggcaaagggaaacaccgcaacccagatggcccaggcactgtctttaaacacagaggaagacattcatcgggctttccagtcgcttctcactgaagtgaacaaggctggcacacagtacctgctgagaacggccaacaggctctttggagagaaaacttgtcagttcctctcaacgtttaaggaatcctgtcttcaattctaccatgctgagctgaaggagctttcctttatcagagctgcagaagagtccaggaaacacatcaacacctgggtctcaaaaaagaccgaaggtaaaattgaagagttgttgccgggtagctcaattgatgcagaaaccaggctggttcttgtcaatgccatctacttcaaaggaaagtggaatgaaccgtttgacgaaacatacacaagggaaatgccctttaaaataaaccaggaggagcaaaggccagtgcagatgatgtatcaggaggccacgtttaagctcgcccacgtgggcgaggtgcgcgcgcagctgctggagctgccctacgccaggaaggagctgagcctgctggtgctgctgcctgacgacggcgtggagctcagcacggtggaaaaaagtctcacttttgagaaactcacagcctggaccaagccagactgtatgaagagtactgaggttgaagttctccttccaaaatttaaactacaagaggattatgacatggaatctgtgcttcggcatttgggaattgttgatgccttccaacagggcaaggctgacttgtcggcaatgtcagcggagagagacctgtgtctgtccaagttcgtgcacaagagttttgtggaggtgaatgaagaaggcaccgaggcagcggcagcgtcgagctgctttgtagttgcagagtgctgcatggaatctggccccaggttctgtgctgaccaccctttccttttcttcatcaggcacaacagagccaacagcattctgttctgtggcaggttctcatcgccataaagggtgcacttaccgtgcactcggccatttccctcttcctgtgtccccagatccccactacagctccaagaggatgggcctagaaagccaagtgcaaagatgagggcagattctttacctgtctgccctcatgatttgccagcatgaattcatgatgctccacactcgcttatgctacttaatcagaatcttgagaaaatagaccataatgattccctgttgtattaaaattgcagtccaaatcccataggatggcaagcaaagttcttctagaattccacatgcaattcactctggcgaccctgtgctttcctgacactgcgaatacattccttaacccgctgcctcagtggtaataaatggtgctagatattgctactattttatagatttcctggtgcttagccttataaaaaaggttgtaaaatgtacatttatattttatctttttttttttttttttctgagacgcagtctggctctctgtcgcccaggctggagtgcagtggctcgatctcggctcactgcaagctccgcctcccgggttcacgccattctcctgcctcagcctcccgagtagctgggactacaggcgcccgccaccacgcccggctaattttttgtatttttagtagagacggggtttcaccgtgttagccaggatggtgtcgatctcctgacctcgtgatccacccgcctcggcctcccaaagtgctgggattacaggcttgagccaccgcgcccggctatattttatcttttatctttttctttgacatttaccaatcaccaagcatgcaccaaacactgctttaggcactggggacacaaaggggacagagccatcctcctttgacacctggtcttcagttctgtgcccaacgtatatagttttgacaatgaccaggttggactgtttaatgtctttcaacttaccacgtaatcctcttgtagggatcacatctttctttatgatattgtatttctctacctctaacagtaaaaattccattcaacccttaaagctcacttcaaattcttctttgagaagtttttcctttctccgcaaccagatgtacatatttgaactctctttgtacttggagggcacttctttcgtggtagttcttttatttttattaatctctgtatccttagatagtcctccaacaaccaaaggttgggactctgtcttacatatctgggtgcccctcatagtgcagtaataagtaagttgattatatacgagctatgtaacttatattttttaatggttggatatcactgagtttttttttttaagaatttttttattgaggtaaacttcacataacataaaattaactattttaaagtgagaagttcagtgccacttagtattgttaacaatgttgcataaccaccacctttatttaaagttccaaaaaaaatgttctcctctaaaaggaaaccccatcccattaagcagatactctccattccttccttctcctggcctcaagcgatccgcctacctcagcctcccaaagtgctaggattacaggcataagccactgagcccagccctagttcagtatcttttatgtaaattacaaacatctgcaacattatgtatcatatgcagatacttattgcatttcttttattagtggtgaaagtgttctatgcatttattggctcttgaatttcctcatctatgaattgtcattcatacacctacttttctgcttcgtttttacatatgtctttgcctattaaagatattatccctctgttttatattttctctcattcttgtattgccttttaaattttgttatgatgtttcattaataaacagtgttttgttttcctctataatcaaatctagattttccctttgtgatttccgacaccacttccattcttagaagtacttttccattcataaagtagtaaaataaaatagttttttctctaaac

SEQ ID NO: 311496 - DNA, 1751 bp, Homo sapiens
gagcgcagcagcagggccgggtcctgcgcctcgggggtcggcgtccaggctcggagcgcggcacggagacggcggcagcgctggactaggtggcaggccctgcatcatggaaactctttctaatgcaagtggtacttttgccatacgccttttaaagatactgtgtcaagataacccttcgcacaacgtgttctgttctcctgtgagcatctcctctgccctggccatggttctcctaggggcaaagggaaacaccgcaacccagatggcccaggcactgtctttaaacacagaggaagacattcatcgggctttccagtcgcttctcactgaagtgaacaaggctggcacacagtacctgctgagaacggccaacaggctctttggagagaaaacttgtcagttcctctcaacgtttaaggaatcctgtcttcaattctaccatgctgagctgaaggagctttcctttatcagagctgcagaagagtccaggaaacacatcaacacctgggtctcaaaaaagaccgaaggtaaaattgaagagttgttgccgggtagctcaattgatgcagaaaccaggctggttcttgtcaatgccatctacttcaaaggaaagtggaatgaaccgtttgacgaaacatacacaagggaaatgccctttaaaataaaccaggaggagcaaaggccagtgcagatgatgtatcaggaggccacgtttaagctcgcccacgtgggcgaggtgcgcgcgcagctgctggagctgccctacgccaggaaggagctgagcctgctggtgctgctgcctgacgacggcgtggagctcagcacggtggaaaaaagtctcacttttgagaaactcacagcctggaccaagccagactgtatgaagagtactgaggttgaagttctccttccaaaatttaaactacaagaggattatgacatggaatctgtgcttcggcatttgggaattgttgatgccttccaacagggcaaggctgacttgtcggcaatgtcagcggagagagacctgtgtctgtccaagttcgtgcacaagagttttgtggaggtgaatgaagaaggcaccgaggcagcggcagcgtcgagctgctttgtagttgcagagtgctgcatggaatctggccccaggttctgtgctgaccaccctttccttttcttcatcaggcacaacagagccaacagcattctgttctgtggcaggttctcatcgccataaagggtgcacttaccgtgcactcggccatttccctcttcctgtgtccccagatccccactacagctccaagaggatgggcctagaaagccaagtgcaaagatgagggcagattctttacctgtctgccctcatgatttgccagcatgaattcatgatgctccacactcgcttatgctacttaatcagaatcttgagaaaatagaccataatgattccctgttgtattaaaattgcagtccaaatcccataggatggcaagcaaagttcttctagaattccacatgcaattcactctggcgaccctgtgctttcctgacactgcgaatacattccttaacccgctgcctcagtggtaataaatggtgctagatattgctactattttatagatttcctggtgcttagccttataaaaaaggttgtaaaatgtacatttatattttatctttttttttttttttttctgagacgcagtctgggcaacagagcgagactctggcttgaaaaaaataat

SEQ ID NO: 311497 - DNA, 3578 bp, Homo sapiens
aacacagccacaacagggaaaggaagagacccgcgggggtttaaaattcagagcacggaaggtgggcctgggttagggtcaggctcggagcgcggcacggagacggcggcagcgctggactaggtggcaggccctgcatcatggaaactctttctaatgcaagtggtacttttgccatacgccttttaaagatactgtgtcaagataacccttcgcacaacgtgttctgttctcctgtgagcatctcctctgccctggccatggttctcctaggggcaaagggaaacaccgcaacccagatggcccaggcactgtctttaaacacagaggaagacattcatcgggctttccagtcgcttctcactgaagtgaacaaggctggcacacagtacctgctgagaacggccaacaggctctttggagagaaaacttgtcagttcctctcaacgtttaaggaatcctgtcttcaattctaccatgctgagctgaaggagctttcctttatcagagctgcagaagagtccaggaaacacatcaacacctgggtctcaaaaaagaccgaaggtaaaattgaagagttgttgccgggtagctcaattgatgcagaaaccaggctggttcttgtcaatgccatctacttcaaaggaaagtggaatgaaccgtttgacgaaacatacacaagggaaatgccctttaaaataaaccaggaggagcaaaggccagtgcagatgatgtatcaggaggccacgtttaagctcgcccacgtgggcgaggtgcgcgcgcagctgctggagctgccctacgccaggaaggagctgagcctgctggtgctgctgcctgacgacggcgtggagctcagcacggtggaaaaaagtctcacttttgagaaactcacagcctggaccaagccagactgtatgaagagtactgaggttgaagttctccttccaaaatttaaactacaagaggattatgacatggaatctgtgcttcggcatttgggaattgttgatgccttccaacagggcaaggctgacttgtcggcaatgtcagcggagagagacctgtgtctgtccaagttcgtgcacaagagttttgtggaggtgaatgaagaaggcaccgaggcagcggcagcgtcgagctgctttgtagttgcagagtgctgcatggaatctggccccaggttctgtgctgaccaccctttccttttcttcatcaggcacaacagagccaacagcattctgttctgtggcaggttctcatcgccataaagggtgcacttaccgtgcactcggccatttccctcttcctgtgtccccagatccccactacagctccaagaggatgggcctagaaagccaagtgcaaagatgagggcagattctttacctgtctgccctcatgatttgccagcatgaattcatgatgctccacactcgcttatgctacttaatcagaatcttgagaaaatagaccataatgattccctgttgtattaaaattgcagtccaaatcccataggatggcaagcaaagttcttctagaattccacatgcaattcactctggcgaccctgtgctttcctgacactgcgaatacattccttaacccgctgcctcagtggtaataaatggtgctagatattgctactattttatagatttcctggtgcttagccttataaaaaaggttgtaaaatgtacatttatattttatctttttttttttttttttctgagacgcagtctggctctctgtcgcccaggctggagtgcagtggctcgatctcggctcactgcaagctccgcctcccgggttcacgccattctcctgcctcagcctcccgagtagctgggactacaggcgcccgccaccacgcccggctaattttttgtatttttagtagagacggggtttcaccgtgttagccaggatggtgtcgatctcctgacctcgtgatccacccgcctcggcctcccaaagtgctgggattacaggcttgagccaccgcgcccggctatattttatcttttatctttttctttgacatttaccaatcaccaagcatgcaccaaacactgctttaggcactggggacacaaaggggacagagccatcctcctttgacacctggtcttcagttctgtgcccaacgtatatagttttgacaatgaccaggttggactgtttaatgtctttcaacttaccacgtaatcctcttgtagggatcacatctttctttatgatattgtatttctctacctctaacagtaaaaattccattcaacccttaaagctcacttcaaattcttctttgagaagtttttcctttctccgcaaccagatgtacatatttgaactctctttgtacttggagggcacttctttcgtggtagttcttttatttttattaatctctgtatccttagatagtcctccaacaaccaaaggttgggactctgtcttacatatctgggtgcccctcatagtgcagtaataagtaagttgattatatacgagctatgtaacttatattttttaatggttggatatcactgagtttttttttttaagaatttttttattgaggtaaacttcacataacataaaattaactattttaaagtgagaagttcagtgccacttagtattgttaacaatgttgcataaccaccacctttatttaaagttccaaaaaaaatgttctcctctaaaaggaaaccccatcccattaagcagatactctccattccttccttcctccagcccccagcaaccaccaatctgctttctgtctctatggatttatctattcttgctattttatataaatcgaattgtatgagaccttttgtgtctggcttctttcacttagtacaagtttttgagatttatttacatagtagcatgtatcaacacttcatttttatggccaaataaaattgtattatgtgtttatagcacaatttatttatccactcattcattgatggactttgggttgtttctgacttttggctattgggaatagtgctgctatgaatgtttgtgtacctgtatttgtttgaatgcctattttgcattctcttgggtatatatctaggagtggaactgctgggtcatatgttaattctatgtttagctttttgaggaacagacaaactgttttccacagcagttgaaccattccacattcccaccagcaatgtatgagaattccaatttctgtccacttcctcaccaacacttattattttccttttcctttttttaaaaaaaataagttatggccatcttagtgggtgtgaagtggtatctcattgtgttttttatttgcatttcctatgtaatgagctagaaactaaagtacaaactagatgggacatccagtccctttgatagataatgctgagtaaaaaatgagatgaaagacatttgtttgtttttagaacacgagtgacagtttgttaaaaagctttagaggaggaatgaaaacaaagtgaagtacacttagaaaagggccaagtggacatcttggatgtcaagtgcctagttcagtatctttttttttttttttt

SEQ ID NO: 311498 - DNA, 1664 bp, Homo sapiens
ccttcctccagcccccagcaaccaccaatctgctttctgtctctatggatttatctattcatgctatttaatataaatcgaattgtatgagaccttttgtgtctggcttctttcacttagtacaagtttttgacatttaccaatcaccaagcatgcaccaaacactgctttaggcactggggacacaaaggggacagagccatcctcctttgacacctggtcttcagttctgtgcccaacgtatatagttttgacaatgaccaggttggactgtttaatgtctttcaacttaccacgtaatcctcttgtagggatcacatctttctttatgatattgtatttctctacctctaacagtaaaaattccattcaacccttaaagctcacttcaaattcttctttgagaagtttttcctttctccgcaaccagatgtacatatttgaactctctttgtacttggagggcacttctttcgtggtagttcttttatttttattaatctctgtatccttagatagtcctccaacaaccaaaggttgggactctgtcttacatatctgggtgcccctcatagtgcagtaataagtaagttgattatatacgagctatgtaacttatattttttaatggttggatatcactgagtttttttttttaagaatttttttattgaggtaaacttcacataacataaaattaactattttaaagtgagaagttcagtgccacttagtattgttaacaatgttgcataaccaccacctttatttaaagttccaaaaaaaatgttctcctctaaaaggaaaccccatcccattaagcagatactctccattccttccttcctccagcccccagcaaccaccaatctgctttctgtctctatggatttatctattcttgctattttatataaatcgaattgtatgagaccttttgtgtctggcttctttcacttagtacaagtttttgagatttatttacatagtagcatgtatcaacacttcatttttatggccaaataaaattgtattatgtgtttatagcacaatttatttatccactcattcattgatggactttgggttgtttctgacttttggctattgggaatagtgctgctatgaatgtttgtgtacctgtatttgtttgaatgcctattttgcattctcttgggtatatatctaggagtggaactgctgggtcatatgttaattctatgtttagctttttgaggaacagacaaactgttttccacagcagttgaaccattccacattcccaccagcaatgtatgagaattccaatttctgtccacttcctcaccaacacttattattttccttttcctttttttaaaaaaaataagttatggccatcttagtgggtgtgaagtggtatctcattgtgttttttatttgcatttcctatgtaatgagctagaaactaaagtacaaactagatgggacatccagtccctttgatagataatgctgagtaaaaaatgagatgaaagacatttgtttgtttttagaacacgagtgacagtttgttaaaaagctttagaggaggaatgaaaacaaagtgaagtacacttagaaaagggccaagtggacatcttggatgtcaagtgcctagttcagtatctttttttttttttttt

SEQ ID NO: 311499 - DNA, 273 bp, Homo sapiens
gtaagacccgggctgcgggaagaacccagggacacctttgcgggcagaactcgagtgccacttccacctctcatattcaccttctgagttggcgatgcggcagacgcacactgtgcaggcacttggcgttgggatcgaacttttgttcaaggctgacttttcccaatattgtctgcgtgatctgccaaactacacatctcagtcctctgttttttcatcgctagaaggagtgggcggcggttaaaatgccttttaaaataaatcaggtaggag

SEQ ID NO: 311500 - DNA, 238 bp, Homo sapiens
gatgcaagattttatcacaacctcttttctgagcttttctcacccttgtcattttttgtgtgttactgatctttaaacaagcgagatccattcaggcagaatggctacatcttttactcgcctgttttctgtcccctctctctcctctccccagccatcaaagagctatcttgataacttttaaaattatctttcacaacaggcactgtctttaaacacagaggaagacattcatcgg

SEQ ID NO: 311501 - DNA, 580 bp, Homo sapiens
cttctgacatgtccatgtatagtcacagaatgttagaactgggtgtgatcatgaagggttggatcaaacactccaattaaccatgtgagacaaacaccccttcagcctatcacatttcctgctggtcttgttctccaacctggtgtaatttttctactttgtaccaacctgctttcctcgagtgacttaggtatctttcaccatcctcaacttggtggatgttctcaaggtgtcagtaatcatgaataccactcatatgtgctgtttttatttctctacataacaacccaaactcagcaaagttgaaaacagaagtttgcttctcaactaatgatccaggatcatccaatgcatcaggttcttataaaaagcaactgaatgtagtctctacttttcttgaaaggtaaaattgaagagttgttgccgggtagctcaattgatgcagaaaccaggctggttcttgtcaatgccatctacttcaaaggaaagtggaatgaaccgtttgacgaaacatacacaagggaaatgccctttaaaataaaccaggtgggggaagctttttaaaatcctgctagtttga

SEQ ID NO: 311502 - DNA, 515 bp, Homo sapiens
ctcctctgcgccaattatgcttagtaccaccaggaacatttccatttctgtgaataaatgagacggtaaagaatgggagacgttcttcgcttaaagtctcagcagttgtttcccgcattcctgcttggagtatttaccacggatgctctcttcaggcagtgggttagcagggatgccctcagttcattgaaacagtaccacttgatctccagggaaagaaggggtgatctttgtttgcccacatcctcttttccagggatgcctagtgctttgttgaggggattcagcaggaatatctcctccaaaagcttctggaaactccccatgtgcccaatgtcagctcttcccgctttgagccgtccattctggttgcttctgacatgtccatgtatagtcacagaatgttagaactgggtgtgatcatgaagggttggatcaaacactccaattaaccatgtgagacaaacaccccttcagcctatcacatttcctgctggtcttgttctccaacctgg

SEQ ID NO: 311503 - DNA, 1618 bp, Homo sapiens
gagcgcagcagcagggccgggtcctgcgcctcgggggtcggcgtccaggctcggagcgcggcacggagacggcggcagcgctggactaggtggcaggccctgcatcatggaaactctttctaatgcaagtggtacttttgccatacgccttttaaagatactgtgtcaagataacccttcgcacaacgtgttctgttctcctgtgagcatctcctctgccctggccatggttctcctaggggcaaagggaaacaccgcaacccagatggcccaggcactgtctttaaacacagaggaagacattcatcgggctttccagtcgcttctcactgaagtgaacaaggctggcacacagtacctgctgagaacggccaacaggctctttggagagaaaacttgtcagttcctctcaacgtttaaggaatcctgtcttcaattctaccatgctgagctgaaggagctttcctttatcagagctgcagaagagtccaggaaacacatcaacacctgggtctcaaaaaagaccgaaggtaaaattgaagagttgttgccgggtagctcaattgatgcagaaaccaggctggttcttgtcaatgccatctacttcaaaggaaagtggaatgaaccgtttgacgaaacatacacaagggaaatgccctttaaaataaaccaggaggagcaaaggccagtgcagatgatgtatcaggaggccacgtttaagctcgcccacgtgggcgaggtgcgcgcgcagctgctggagctgccctacgccaggaaggagctgagcctgctggtgctgctgcctgacgacggcgtggagctcagcacggtggaaaaaagtctcacttttgagaaactcacagcctggaccaagccagactgtatgaagagtactgaggttgaagttctccttccaaaatttaaactacaagaggattatgacatggaatctgtgcttcggcatttgggaattgttgatgccttccaacagggcaaggctgacttgtcggcaatgtcagcggagagagacctgtgtctgtccaagttcgtgcacaagagttttgtggaggtgaatgaagaaggcaccgaggcagcggcagcgtcgagctgctttgtagttgcagagtgctgcatggaatctggccccaggttctgtgctgaccaccctttccttttcttcatcaggcacaacagagccaacagcattctgttctgtggcaggttctcatcgccataaagggtgcacttaccgtgcactcggccatttccctcttcctgtgtccccagatccccactacagctccaagaggatgggcctagaaagccaagtgcaaagatgagggcagattctttacctgtctgccctcatgatttgccagcatgaattcatgatgctccacactcgcttatgctacttaatcagaatcttgagaaaatagaccataatgattccctgttgtattaaaattgcagtccaaatcccataggatggcaagcaaagttcttctagaattccacatgcaattcactctggcgaccctgtgctttcctgacactgcgaatacattccttaacccgctgcctcagtggtaataaatggtgctagatattgctacta

SEQ ID NO: 311504 - DNA, 991 bp, Homo sapiens
acttctccagcctccctgatgagggaaaaatgctttctctaagcaattctgattttaattaataccaatccaggggatgtcaggaacgacatctacattactctcttacaaggtgactttgacaagtacaacaagaccacacagaggaatgtggaagtcatcatgtgtgtgtgcgcggaggatggcaaaacgctgcctgtggctgtccctattgaagacatgcagaggatccatctgcgattcatgtttcgacatcggtcatctctggaatctaaagataaaggagaaaagaactttgccatgtcctatgtgaagctgatgaaagaagatgggactactctacacgatggattccatgacttagttgtcctcaagggggacagcaagaagatggaggatgccagcgcatacctgacccttccttcttatcgacaccatgtggaaaacaagggggccacgctgagcaggagctccagcagtgttggggggctttctgtcagctcccgggatgtgttctccatttccaccctggtgtgctccacaaagctcactcagaatgtgggcttgcatgagttgctgaagtggcgtatgacgcctcaactggaagaatcatgagacggtcttgaatcatcacaatctgatgaaagccactacaaatacccatccttatgcaggtgggggctttgaaatacattccatgtggttctgcatgatgtagcaaatggaactgatgggaaggtaccagaccagtctgtatgagtgacgacggagccctctgggaactccgaagcgaacgtacgcatacatcaagagcaacgcagccttaaaagacgaggcgggaaatggcagtgatccaagaacagaagactgacaaaggaagagacgctgaaaaaaggacacgagaaacgcccagagggcactaccatgacgacagggagacaaaggatatgggaggtcaacgaggaaacacacacgtcactacatgtcacaa

SEQ ID NO: 311505 - DNA, 3418 bp, Homo sapiens
ggcttccccacgggaggacgcgaggccccggcccagccatggccccctggcgcaaagctgacaaggagcggcacggcgtggccatatacaacttccaaggcagcggagccccccagctctccctgcagatcggcgatgtggtgcgaatacaggagacgtgtggagactggtataggggatacctcataaagcacaaaatgttacagggcatttttcctaagtcatttatccacatcaaggaagtgacagttgagaaaagaagaaatactgagaacatcattcctgcagaaattcctctggcacaagaagtgacaacgacactttgggaatggggaagcatctggaaacaactctatgtggccagcaaaaaggagcgttttctccaggtgcagtccatgatgtacgatctgatggagtggaggtcccagcttctctcaggaaccttacccaaggatgagctgaaggaactgaagcagaaagtcacgtccaaaattgactatggcaacaaaatccttgagcttgatttgattgtcagagatgaagacggaaatatcttggaccctgataataccagtgtcatcagcttgttccatgcacatgaggaagcaactgataaaatcacagagcgtatcaaagaagaaatgtcaaaagaccagccagattatgcaatgtattcccggatctcctcatcccccacccatagcctctatgtgtttgtgagaaactttgtgtgcagaattggggaagatgctgagctcttcatgtctctctacgaccccaacaagcaaacggtcataagtgagaactacctagtgcgatggggcagccggggcttccctaaggagattgagatgctcaacaatctgaaggtggtcttcacggatcttggaaacaaagacctcaacagggataaaatttacttgatttgtcaaatagtccgggtcggcaagatggatcttaaggatactggtgcaaagaagtgcacgcagggactgaggaggccctttggggtggcagttatggatataacagacatcatcaaggggaaagcagagagtgatgaagaaaagcagcacttcattccttttcacccggttacagctgagaatgacttcctacacagcctgctgggcaaagtcatagcctccaagggggacagtggagggcaaggcctctgggtgaccatgaagatgctggtgggtgacatcattcagattcgcaaggactatccacacctggtggacaggaccaccgtggtggccaggaagctgggattcccagagatcatcatgccaggggatgtcaggaacgacatctacattactctcttacaaggtgactttgacaagtacaacaagaccacacagaggaatgtggaagtcatcatgtgtgtgtgcgcggaggatggcaaaacgctgcctaatgcaatttgcgtgggagcaggggacaagcccatgaatgagtatcgctccgttgtgtactatcaagtcaaacagccacgctggatggaaacagtcaaggtggctgtccctattgaagacatgcagaggatccatctgcgattcatgtttcgacatcggtcatctctggaatctaaagataaaggagaaaagaactttgccatgtcctatgtgaagctgatgaaagaagatgggactactctacacgatggattccatgacttagttgtcctcaagggggacagcaagaagatggaggatgccagcgcatacctgacccttccttcttatcgacaccatgtggaaaacaagggggccacgctgagcaggagctccagcagtgttggggggctttctgtcagctcccgggatgtgttctccatttccaccctggtgtgctccacaaagctcactcagaatgtgggcttgctgggtttgctgaagtggcgtatgaagcctcaactgctacaggagaatttagaaaagttgaagattgtggatggagaggaagtggtgaagtttctccaggatactctggatgccctcttcaacatcatgatggagcattctcaaagtgatgaatatgacatcctcgtctttgatgccttgatttacataataggactcattgcagaccggaaatttcagcatttcaacaccgttctggaggcttacatccaacagcatttcagtgcgaccttggcttacaagaaattgatgacagtgctgaagacttacttggatacctccagcagaggggagcaatgtgagccaatcctaagaacgctgaaggctttggaatatgtgttcaagttcattgttcggtcgaggacattattttcacagctttatgaaggcaaagaacagatggagtttgaagaatccatgagacggctctttgaatccatcaacaatctgatgaaaagtcaatacaaaactaccatccttttgcaggtggcggctttgaaatacatcccatctgtcctgcatgatgtagaaatggtctttgatgcgaagttactcagccaactcctgtatgagttctacacctgcatccctcctgtgaaactccagaagcagaaagtacagtctatgaatgagatagtccagagcaacctctttaaaaagcaagaatgccgggacattctgcttcctgtcatcaccaaagagctgaaggagctgctggagcagaaggatgacatgcaacaccaggtcctggagaggaagtactgcgttgaattgctcaacagcatcttggaagtccttagctaccaggatgcggccttcacctaccaccatatccaagagatcatggtccagctgctgcggacagtgaaccggacagtcatcaccatgggccgggatcacattctgattagtcactttgtggcatgtatgacagccatcttaaaccagatgggtgaccagcactactccttctacattgagaccttccagaccagctctgaacttgtggacttcttgatggagaccttcatcatgttcaaggacctcattggaaagaacgtgtaccctggagactggatggccatgagcatggttcaaaacagggtcttcctgagagctatcaacaagtttgcagaaaccatgaaccagaagttcctagaacacacgaactttgagttccagctgtggaacaactattttcatctggcagtggcttttatcacccaggattctctgcagctggagcagttctcacacgccaaatacaacaaaatcctgaataagtatggggacatgagacggctaattggcttctccatccgtgatatgtggtacaagcttggtcagaacaaaatctgcttcatcccaggcatggtaggacctatattagagatgacacttatccctgaggctgagctccggaaagccaccataccaatcttcttcgacatgatgctgtgtgcttccgggggatcctcatagagtcgcgc

SEQ ID NO: 311506 - DNA, 3551 bp, Homo sapiens
ggcttccccacgggaggacgcgaggccccggcccagccatggccccctggcgcaaagctgacaaggagcggcacggcgtggccatatacaacttccaaggcagcggagccccccagctctccctgcagatcggcgatgtggtgcgaatacaggagacgtgtggagactggtataggggatacctcataaagcacaaaatgttacagggcatttttcctaagtcatttatccacatcaaggaagtgacagttgagaaaagaagaaatactgagaacatcattcctgcagaaattcctctggcacaagaagtgacaacgacactttgggaatggggaagcatctggaaacaactctatgtggccagcaaaaaggagcgttttctccaggtgcagtccatgatgtacgatctgatggagtggaggtcccagcttctctcaggaaccttacccaaggatgagctgaaggaactgaagcagaaagtcacgtccaaaattgactatggcaacaaaatccttgagcttgatttgattgtcagagatgaagacggaaatatcttggaccctgataataccagtgtcatcagcttgttccatgcacatgaggaagcaactgataaaatcacagagcgtatcaaagaagaaatgtcaaaagaccagccagattatgcaatgtattcccggatctcctcatcccccacccatagcctctatgtgtttgtgagaaactttgtgtgcagaattggggaagatgctgagctcttcatgtctctctacgaccccaacaagcaaacggtcataagtgagaactacctagtgcgatggggcagccggggcttccctaaggagattgagatgctcaacaatctgaaggtggtcttcacggatcttggaaacaaagacctcaacagggataaaatttacttgatttgtcaaatagtccgggtcggcaagatggatcttaaggatactggtgcaaagaagtgcacgcagggactgaggaggccctttggggtggcagttatggatataacagacatcatcaaggggaaagcagagagtgatgaagaaaagcagcacttcattccttttcacccggttacagctgagaatgacttcctacacagcctgctgggcaaagtcatagcctccaagggggacagtggagggcaaggcctctgggtgaccatgaagatgctggtgggtgacatcattcagattcgcaaggactatccacacctggtggacaggaccaccgtggtggccaggaagctgggattcccagagatcatcatgccaggggatgtcaggaacgacatctacattactctcttacaaggtgactttgacaagtacaacaagaccacacagaggaatgtggaagtcatcatgtgtgtgtgcgcggaggatggcaaaacgctgcctaatgcaatttgcgtgggagcaggggacaagcccatgaatgagtatcgctccgttgtgtactatcaagtcaaacagccacgctggatggaaacagtcaaggtggctgtccctattgaagacatgcagaggatccatctgcgattcatgtttcgacatcggtcatctctggaatctaaagataaaggagaaaagaactttgccatgtcctatgtgaagctgatgaaagaagatgggactactctacacgatggattccatgacttagttgtcctcaagggggacagcaagaagatggaggatgccagcgcatacctgacccttccttcttatcgacaccatgtggaaaacaagggggccacgctgagcaggagctccagcagtgttggggggctttctgtcagctcccgggatgtgttctccatttccaccctggtgtgctccacaaagctcactcagaatgtgggcttgctgggtttgctgaagtggcgtatgaagcctcaactgctacaggagaatttagaaaagttgaagattgtggatggagaggaagtggtgaagtttctccaggatactctggatgccctcttcaacatcatgatggagcattctcaaagtgatgaatatgacatcctcgtctttgatgccttgatttacataataggactcattgcagaccggaaatttcagcatttcaacaccgttctggaggcttacatccaacagcatttcagtgcgaccttggcttacaagaaattgatgacagtgctgaagacttacttggatacctccagcagaggggagcaatgtgagccaatcctaagaacgctgaaggctttggaatatgtgttcaagttcattgttcggtcgaggacattattttcacagctttatgaaggcaaagaacagatggagtttgaagaatccatgagacggctctttgaatccatcaacaatctgatgaaaagtcaatacaaaactaccatccttttgcaggtggcggctttgaaatacatcccatctgtcctgcatgatgtagaaatggtctttgatgcgaagttactcagccaactcctgtatgagttctacacctgcatccctcctgtgaaactccagaagcagaaagtacagtctatgaatgagatagtccagagcaacctctttaaaaagcaagaatgccgggacattctgcttcctgtcatcaccaaagagctgaaggagctgctggagcagaaggatgacatgcaacaccaggtcctggagaggaagtactgcgttgaattgctcaacagcatcttggaagtccttagctaccaggatgcggccttcacctaccaccatatccaagagatcatggtccagctgctgcggacagtgaaccggacagtcatcaccatgggccgggatcacattctgattagtcactttgtggcatgtatgacagccatcttaaaccagatgggtgaccagcactactccttctacattgagaccttccagaccagctctgaacttgtggacttcttgatggagaccttcatcatgttcaaggacctcattggaaagaacgtgtaccctggagactggatggccatgagcatggttcaaaacagggtcttcctgagagctatcaacaagtttgcagaaaccatgaaccagaagttcctagaacacacgaactttgagttccaggccctattcaggatgctggtccttggtgtctgcatcagttcatgtggtcagggaagaccaagagaggatttcaaattcaaatcagcaggtatttttgtttaagagcaattcttatgggcccagactattgcaacatgcttcaaggaactcagaagcaaagaacactgccctaccctcaaggatcttggaatcttgatagaaggctatacaaatccatcttccagcatccaggcttttgaagagggtgactaactttattgggcatctacttagaaaattttgattctcatcataatcttgtcaggttgtgatatacccatttccctggtgaataaactgagcttcagagaattgattgacttttctgttaaaggtcatctaaccaataaatggggctgctgcgattcaaccccaggcctgtctgcaaagcacatcctcttt

SEQ ID NO: 311507 - DNA, 2976 bp, Homo sapiens
ggcttccccacgggaggacgcgaggccccggcccagccatggccccctggcgcaaagctgacaaggagcggcacggcgtggccatatacaacttccaaggcagcggagccccccagctctccctgcagatcggcgatgtggtgcgaatacaggagacgtgtggagactggtataggggatacctcataaagcacaaaatgttacagggcatttttcctaagtcatttatccacatcaaggaagtgacagttgagaaaagaagaaatactgagaacatcattcctgcagaaattcctctggcacaagaagtgacaacgacactttgggaatggggaagcatctggaaacaactctatgtggccagcaaaaaggagcgttttctccaggtgcagtccatgatgtacgatctgatggagtggaggtcccagcttctctcaggaaccttacccaaggatgagctgaaggaactgaagcagaaagtcacgtccaaaattgactatggcaacaaaatccttgagcttgatttgattgtcagagatgaagacggaaatatcttggaccctgataataccagtgtcatcagcttgttccatgcacatgaggaagcaactgataaaatcacagagcgtatcaaagaagaaatgtcaaaagaccagccagattatgcaatgtattcccggatctcctcatcccccacccatagcctctatgtgtttgtgagaaactttgtgtgcagaattggggaagatgctgagctcttcatgtctctctacgaccccaacaagcaaacggtcataagtgagaactacctagtgcgatggggcagccggggcttccctaaggagattgagatgctcaacaatctgaaggtggtcttcacggatcttggaaacaaagacctcaacagggataaaatttacttgatttgtcaaatagtccgggtcggcaagatggatcttaaggatactggtgcaaagaagtgcacgcagggactgaggaggccctttggggtggcagttatggatataacagacatcatcaaggggaaagcagagagtgatgaagaaaagcagcacttcattccttttcacccggttacagctgagaatgacttcctacacagcctgctgggcaaagtcatagcctccaagggggacagtggagggcaaggcctctgggtgaccatgaagatgctggtgggtgacatcattcagattcgcaaggactatccacacctggtggacaggaccaccgtggtggccaggaagctgggattcccagagatcatcatgccaggggatgtcaggaacgacatctacattactctcttacaaggtgactttgacaagtacaacaagaccacacagaggaatgtggaagtcatcatgtgtgtgtgcgcggaggatggcaaaacgctgcctaatgcaatttgcgtgggagcaggggacaagcccatgaatgagtatcgctccgttgtgtactatcaagtcaaacagccacgctggatggaaacagtcaaggtggctgtccctattgaagacatgcagaggatccatctgcgattcatgtttcgacatcggtcatctctggaatctaaagataaaggagaaaagaactttgccatgtcctatgtgaagctgatgaaagaagatgggactactctacacgatggattccatgacttagttgtcctcaagggggacagcaagaagatggaggatgccagcgcatacctgacccttccttcttatcgacaccatgtggaaaacaagggggccacgctgagcaggagctccagcagtgttggggggctttctgtcagctcccgggatgtgttctccatttccaccctggtgtgctccacaaagctcactcagaatgtgggcttgctgggtttgctgaagtggcgtatgaagcctcaactgctacaggagaatttagaaaagttgaagattgtggatggagaggaagtggtgaagtttctccaggatactctggatgccctcttcaacatcatgatggagcattctcaaagtgatgaatatgacatcctcgtctttgatgccttgatttacataataggactcattgcagaccggaaatttcagcatttcaacaccgttctggaggcttacatccaacagcatttcagtgcgaccttggcttacaagaaattgatgacagtgctgaagacttacttggatacctccagcagaggggagcaatgtgagccaatcctaagaacgctgaaggctttggaatatgtgttcaagttcattgttcggtcgaggacattattttcacagctttatgaaggcaaagaacagatggagtttgaagaatccatgagacggctctttgaatccatcaacaatctgatgaaaagtcaatacaaaactaccatccttttgcaggtggcggctttgaaatacatcccatctgtcctgcatgatgtagaaatggtctttgatgcgaagttactcagccaactcctgtatgagttctacacctgcatccctcctgtgaaactccagaagcagaaagtacagtctatgaatgagatagtccagagcaacctctttaaaaagcaagaatgccgggacattctgcttcctgtcatcaccaaagagctgaaggagctgctggagcagaaggatgacatgcaacaccaggtcctggagaggaagtactgcgttgaattgctcaacagcatcttggaagtccttagctaccaggatgcggccttcacctaccaccatatccaagagatcatggtccagctgctgcggacagtgaaccggacagtcatcaccatgggccgggatcacattctgattaacccagctcgaaccctttaacctctgcccatcgtgctttaaaccaaggacccaaaattcaaatgctttcaggggccagtcaccaacataaatgagtatgcccaaccatgtcactcctctgctgaaacctgccaatggt

SEQ ID NO: 311508 - DNA, 551 bp, Homo sapiens
cattatagtagattccctcataccccttctcagccagtagtcccccggggtaatcactgtcctgacaaccatcattgtagatgggtttttgcctactctcaaatttcataagaatggaatagtgaagagtgtactttctgtgcctgatgtattttactgcatataatgcttgtgagaatcatcctcatttctgcctgtggaagtagtttgcactttagtccagctgtgtagtattctctagtgtgaacatgccaccatctgtgcatccattctgctgttgatgggcagttgggttcctccaacttctggctctcgtgagtaaaactactctagacgttttgagcatgacatgtggtggatgtgtgctctcattctcttatagatagttaggagtgggattgctggttcacctgtactttgtcttgtttctgaagtagtgcaacctttgttatttcttccagtttctccaggatactctggatgccctcttcaacatcatgatggagcattctcaaagtgatgaatatgacatcctcgtctttgatgccttg

SEQ ID NO: 311509 - DNA, 418 bp, Homo sapiens
tgtaggggggtgcagtggggagggccctttaactcattgtgttctgagctctgtttctgtctgctgaggtggctgtccctattgaagacatgcagaggatccatctgcgattcatgtttcgacatcggtcatctctggaatgtgagtaccatactgaatggcatctctgcacctccccctaaggggagaagaatggaagagctgggtggcccatgtatcattttctttcctgaccccacaatgctatttccagctaaagataaaggagaaaagaactttgccatgtcctatgtgaagctgatgaaagaagatgggactactctacacgatggattccatgacttagttgtcctcaaggtaccatgagttggaaggagctctgcactgaggggagtgcaggaagaaagggggtgatggc

SEQ ID NO: 311510 - DNA, 6052 bp, Homo sapiens
  misc_feature (3494)..(3494): n is a, c, g, or t
ggcttccccacgggaggacgcgaggccccggcccagccatggccccctggcgcaaagctgacaaggagcggcacggcgtggccatatacaacttccaaggcagcggagccccccagctctccctgcagatcggcgatgtggtgcgaatacaggagacgtgtggagactggtataggggatacctcataaagcacaaaatgttacagggcatttttcctaagtcatttatccacatcaaggaagtgacagttgagaaaagaagaaatactgagaacatcattcctgcagaaattcctctggcacaagaagtgacaacgacactttgggaatggggaagcatctggaaacaactctatgtggccagcaaaaaggagcgttttctccaggtgcagtccatgatgtacgatctgatggagtggaggtcccagcttctctcaggaaccttacccaaggatgagctgaaggaactgaagcagaaagtcacgtccaaaattgactatggcaacaaaatccttgagcttgatttgattgtcagagatgaagacggaaatatcttggaccctgataataccagtgtcatcagcttgttccatgcacatgaggaagcaactgataaaatcacagagcgtatcaaagaagaaatgtcaaaagaccagccagattatgcaatgtattcccggatctcctcatcccccacccatagcctctatgtgtttgtgagaaactttgtgtgcagaattggggaagatgctgagctcttcatgtctctctacgaccccaacaagcaaacggtcataagtgagaactacctagtgcgatggggcagccggggcttccctaaggagattgagatgctcaacaatctgaaggtggtcttcacggatcttggaaacaaagacctcaacagggataaaatttacttgatttgtcaaatagtccgggtcggcaagatggatcttaaggatactggtgcaaagaagtgcacgcagggactgaggaggccctttggggtggcagttatggatataacagacatcatcaaggggaaagcagagagtgatgaagaaaagcagcacttcattccttttcacccggttacagctgagaatgacttcctacacagcctgctgggcaaagtcatagcctccaagggggacagtggagggcaaggcctctgggtgaccatgaagatgctggtgggtgacatcattcagattcgcaaggactatccacacctggtggacaggaccaccgtggtggccaggaagctgggattcccagagatcatcatgccaggggatgtcaggaacgacatctacattactctcttacaaggtgactttgacaagtacaacaagaccacacagaggaatgtggaagtcatcatgtgtgtgtgcgcggaggatggcaaaacgctgcctaatgcaatttgcgtgggagcaggggacaagcccatgaatgagtatcgctccgttgtgtactatcaagtcaaacagccacgctggatggaaacagtcaaggtggctgtccctattgaagacatgcagaggatccatctgcgattcatgtttcgacatcggtcatctctggaatctaaagataaaggagaaaagaactttgccatgtcctatgtgaagctgatgaaagaagatgggactactctacacgatggattccatgacttagttgtcctcaagggggacagcaagaagatggaggatgccagcgcatacctgacccttccttcttatcgacaccatgtggaaaacaagggggccacgctgagcaggagctccagcagtgttggggggctttctgtcagctcccgggatgtgttctccatttccaccctggtgtgctccacaaagctcactcagaatgtgggcttgctgggtttgctgaagtggcgtatgaagcctcaactgctacaggagaatttagaaaagttgaagattgtggatggagaggaagtggtgaagtttctccaggatactctggatgccctcttcaacatcatgatggagcattctcaaagtgatgaatatgacatcctcgtctttgatgccttgatttacataataggactcattgcagaccggaaatttcagcatttcaacaccgttctggaggcttacatccaacagcatttcagtgcgaccttggcttacaagaaattgatgacagtgctgaagacttacttggatacctccagcagaggggagcaatgtgagccaatcctaagaacgctgaaggctttggaatatgtgttcaagttcattgttcggtcgaggacattattttcacagctttatgaaggcaaagaacagatggagtttgaagaatccatgagacggctctttgaatccatcaacaatctgatgaaaagtcaatacaaaactaccatccttttgcaggtggcggctttgaaatacatcccatctgtcctgcatgatgtagaaatggtctttgatgcgaagttactcagccaactcctgtatgagttctacacctgcatccctcctgtgaaactccagaagcagaaagtacagtctatgaatgagatagtccagagcaacctctttaaaaagcaagaatgccgggacattctgcttcctgtcatcaccaaagagctgaaggagctgctggagcagaaggatgacatgcaacaccaggtcctggagaggaagtactgcgttgaattgctcaacagcatcttggaagtccttagctaccaggatgcggccttcacctaccaccatatccaagagatcatggtccagctgctgcggacagtgaaccggacagtcatcaccatgggccgggatcacattctgattagtcactttgtggcatgtatgacagccatcttaaaccagatgggtgaccagcactactccttctacattgagaccttccagaccagctctgaacttgtggacttcttgatggagaccttcatcatgttcaaggacctcattggaaagaacgtgtaccctggagactggatggccatgagcatggttcaaaacagggtcttcctgagagctatcaacaagtttgcagaaaccatgaaccagaagttcctagaacacacgaactttgagttccagctgtggaacaactattttcatctggcagtggcttttatcacccaggattctctgcagctggagcagttctcacacgccaaatacaacaaaatcctgaataagtatggggacatgagacggctaattggcttctccatccgtgatatgtggtacaagcttggtcagaacaaaatctgcttcatcccaggcatggtaggacctatattagagatgacacttatccctgaggctgagctccggaaagccaccataccaatcttcttcgacatgatgctgtgtgaatatcaaagaagtggggatttcaaaaagtttgaaaacgaaatcatcctgaagctggaccacgaggtagaagggggccgaggcgacgagcagtacatgcagctnctggagtcaatcctgatggaatgtgctgcagagcacccaaccattgccaagtcggtggagaacttcgtgaacctggtcaaaggcctcctggagaagctgctggattaccggggtgtgatgacagatgagagcaaagacaaccgcatgagctgcactgtgaacctgctgaatttctacaaagataacaacagggaggagatgtacataaggtacctgtacaaactccgcgatcttcacctggactgtgacaattacacagaggctgcctacacgctccttctccacacctggcttctcaagtggtcggatgagcagtgtgcatcacaggtcatgcagacaggccagcagcacccccagacacaccggcagctgaaggagacgctctacgagaccatcataggctactttgacaaaggaaagatgtgggaagaggccataagtctgtgcaaggagctggcggaacagtacgagatggagatctttgactatgagctgctcagccagaacctgatccagcaggcaaaattctatgaaagcatcatgaaaatcctcaggcccaaaccagactactttgctgttggatactacggccagggattcccctccttcctgcggaacaaagtgttcatctaccgcgggaaggaatatgagcgaagagaagatttccagatgcagctgatgacccagttccccaatgcagagaagatgaacaccacctctgccccgggagatgatgtgaagaatgccccaggccagtatatccagtgcttcactgtccagcctgtcttggatgaacatcccaggttcaagaataagccagtgcctgaccagattataaacttctacaaatccaactacgtgcaaaggttccactactcccggcccgtgcgcagggggaccgtagacccagagaatgagtttgcttccatgtggattgagagaacctccttcgtgactgcatacaagctgccggggatcctgcgctggtttgaggtggtgcacatgtcgcagaccacaattagtcctctggagaatgccatagaaaccatgtccacggccaatgagaagatcctgatgatgataaaccagtaccagagtgatgagaccctccccatcaacccactctccatgctcctgaacgggattgtggaccctgctgtcatgggaggcttcgccaagtatgagaaggccttcttcactgaagagtatgtcagggaccaccctgaggaccaggacaagctgacccacctcaaggacctgattgcatggcagatccccttcttgggagctgggattaagatccatgagaaaagggtgtcagataacttgcgacccttccatgaccggatggaggaatgtttcaagaacctgaaaatgaaggtggagaaggagtacggtgtccgagagatgcctgactttgacgacaggagagtgggccgtcccaggtctatgctgcgctcatacagacagatgtccatcatctctctggcttccatgaattctgactgcagcacccccagcaagcctacctcagagagctttgacctggaattagcatcacccaagacgccgagagtggagcaggaggaaccgatctccccggggagcaccctgcctgaggtcaagctgcggaggtccaagaagaggacaaagagaagcagcgtagtttttgcggatgagaaagcagctgcagagtcggacctgaagcggctttccaggaagcatgagttcatgagtgacaccaacctctcggagcatgcggccatccccctcaaggcgtctgtcctctctcaaatgagctttgccagccagtccatgcctaccatcccagccctggcgctctcagtggcaggcatccctgggttggatgaggccaacacatctccccgcctcagccagaccttcctccaactctcagatggtgacaagaagacactcacacggaagaaggtcaatcagttcttcaagacaatgctggccagcaaatcggctgaagaaggcaaacagatcccagactcgctgtccacggacctgtgagctgctgctgactagggctgcatgggagagccagggaggggagtttctggaagaggaaagccatgcgtggaacatcgaagcctcagagagtgggagactgtccccatcagttgtccttacttagaggagacagagaggccaatcaggtcccagagcttgagtgctaacaagcccagcatcccctggggctgtgatcatggtggatgaggaagcctcaacgtagattcctgaactcaaggtaccagcaagaatgccttctcccagtgtgctctccccaacatcctaggcacagctttcataacccagtttcttaggtgtaagaaactgtttttatctcatttattaagtctcagaacttaacagaaaaggaagccttttaaatattctttttaattttattttagattaacagttttgtactttacatttttttatacaaccaaccagtttcttttctagccaatcatctctgaagagttgctgtttcttactgacaataaaaaatgttctcttggttcgaa

SEQ ID NO: 311511 - DNA, 6284 bp, Homo sapiens
  misc_feature (3494)..(3494): n is a, c, g, or t
ggcttccccacgggaggacgcgaggccccggcccagccatggccccctggcgcaaagctgacaaggagcggcacggcgtggccatatacaacttccaaggcagcggagccccccagctctccctgcagatcggcgatgtggtgcgaatacaggagacgtgtggagactggtataggggatacctcataaagcacaaaatgttacagggcatttttcctaagtcatttatccacatcaaggaagtgacagttgagaaaagaagaaatactgagaacatcattcctgcagaaattcctctggcacaagaagtgacaacgacactttgggaatggggaagcatctggaaacaactctatgtggccagcaaaaaggagcgttttctccaggtgcagtccatgatgtacgatctgatggagtggaggtcccagcttctctcaggaaccttacccaaggatgagctgaaggaactgaagcagaaagtcacgtccaaaattgactatggcaacaaaatccttgagcttgatttgattgtcagagatgaagacggaaatatcttggaccctgataataccagtgtcatcagcttgttccatgcacatgaggaagcaactgataaaatcacagagcgtatcaaagaagaaatgtcaaaagaccagccagattatgcaatgtattcccggatctcctcatcccccacccatagcctctatgtgtttgtgagaaactttgtgtgcagaattggggaagatgctgagctcttcatgtctctctacgaccccaacaagcaaacggtcataagtgagaactacctagtgcgatggggcagccggggcttccctaaggagattgagatgctcaacaatctgaaggtggtcttcacggatcttggaaacaaagacctcaacagggataaaatttacttgatttgtcaaatagtccgggtcggcaagatggatcttaaggatactggtgcaaagaagtgcacgcagggactgaggaggccctttggggtggcagttatggatataacagacatcatcaaggggaaagcagagagtgatgaagaaaagcagcacttcattccttttcacccggttacagctgagaatgacttcctacacagcctgctgggcaaagtcatagcctccaagggggacagtggagggcaaggcctctgggtgaccatgaagatgctggtgggtgacatcattcagattcgcaaggactatccacacctggtggacaggaccaccgtggtggccaggaagctgggattcccagagatcatcatgccaggggatgtcaggaacgacatctacattactctcttacaaggtgactttgacaagtacaacaagaccacacagaggaatgtggaagtcatcatgtgtgtgtgcgcggaggatggcaaaacgctgcctaatgcaatttgcgtgggagcaggggacaagcccatgaatgagtatcgctccgttgtgtactatcaagtcaaacagccacgctggatggaaacagtcaaggtggctgtccctattgaagacatgcagaggatccatctgcgattcatgtttcgacatcggtcatctctggaatctaaagataaaggagaaaagaactttgccatgtcctatgtgaagctgatgaaagaagatgggactactctacacgatggattccatgacttagttgtcctcaagggggacagcaagaagatggaggatgccagcgcatacctgacccttccttcttatcgacaccatgtggaaaacaagggggccacgctgagcaggagctccagcagtgttggggggctttctgtcagctcccgggatgtgttctccatttccaccctggtgtgctccacaaagctcactcagaatgtgggcttgctgggtttgctgaagtggcgtatgaagcctcaactgctacaggagaatttagaaaagttgaagattgtggatggagaggaagtggtgaagtttctccaggatactctggatgccctcttcaacatcatgatggagcattctcaaagtgatgaatatgacatcctcgtctttgatgccttgatttacataataggactcattgcagaccggaaatttcagcatttcaacaccgttctggaggcttacatccaacagcatttcagtgcgaccttggcttacaagaaattgatgacagtgctgaagacttacttggatacctccagcagaggggagcaatgtgagccaatcctaagaacgctgaaggctttggaatatgtgttcaagttcattgttcggtcgaggacattattttcacagctttatgaaggcaaagaacagatggagtttgaagaatccatgagacggctctttgaatccatcaacaatctgatgaaaagtcaatacaaaactaccatccttttgcaggtggcggctttgaaatacatcccatctgtcctgcatgatgtagaaatggtctttgatgcgaagttactcagccaactcctgtatgagttctacacctgcatccctcctgtgaaactccagaagcagaaagtacagtctatgaatgagatagtccagagcaacctctttaaaaagcaagaatgccgggacattctgcttcctgtcatcaccaaagagctgaaggagctgctggagcagaaggatgacatgcaacaccaggtcctggagaggaagtactgcgttgaattgctcaacagcatcttggaagtccttagctaccaggatgcggccttcacctaccaccatatccaagagatcatggtccagctgctgcggacagtgaaccggacagtcatcaccatgggccgggatcacattctgattagtcactttgtggcatgtatgacagccatcttaaaccagatgggtgaccagcactactccttctacattgagaccttccagaccagctctgaacttgtggacttcttgatggagaccttcatcatgttcaaggacctcattggaaagaacgtgtaccctggagactggatggccatgagcatggttcaaaacagggtcttcctgagagctatcaacaagtttgcagaaaccatgaaccagaagttcctagaacacacgaactttgagttccagctgtggaacaactattttcatctggcagtggcttttatcacccaggattctctgcagctggagcagttctcacacgccaaatacaacaaaatcctgaataagtatggggacatgagacggctaattggcttctccatccgtgatatgtggtacaagcttggtcagaacaaaatctgcttcatcccaggcatggtaggacctatattagagatgacacttatccctgaggctgagctccggaaagccaccataccaatcttcttcgacatgatgctgtgtgaatatcaaagaagtggggatttcaaaaagtttgaaaacgaaatcatcctgaagctggaccacgaggtagaagggggccgaggcgacgagcagtacatgcagctnctggagtcaatcctgatggaatgtgctgcagagcacccaaccattgccaagtcggtggagaacttcgtgaacctggtcaaaggcctcctggagaagctgctggattaccggggtgtgatgacagatgagagcaaagacaaccgcatgagctgcactgtgaacctgctgaatttctacaaagataacaacagggaggagatgtacataaggtacctgtacaaactccgcgatcttcacctggactgtgacaattacacagaggctgcctacacgctccttctccacacctggcttctcaagtggtcggatgagcagtgtgcatcacaggtcatgcagacaggccagcagcacccccagacacaccggcagctgaaggagacgctctacgagaccatcataggctactttgacaaaggaaagatgtgggaagaggccataagtctgtgcaaggagctggcggaacagtacgagatggagatctttgactatgagctgctcagccagaacctgatccagcaggcaaaattctatgaaagcatcatgaaaatcctcaggcccaaaccagactactttgctgttggatactacggccagggattcccctccttcctgcggaacaaagtgttcatctaccgcgggaaggaatatgagcgaagagaagatttccagatgcagctgatgacccagttccccaatgcagagaagatgaacaccacctctgccccgggagatgatgtgaagaatgccccaggccagtatatccagtgcttcactgtccagcctgtcttggatgaacatcccaggttcaagaataagccagtgcctgaccagattataaacttctacaaatccaactacgtgcaaaggttccactactcccggcccgtgcgcagggggaccgtagacccagagaatgagtttgcttccatgtggattgagagaacctccttcgtgactgcatacaagctgccggggatcctgcgctggtttgaggtggtgcacatgtcgcagaccacaattagtcctctggagaatgccatagaaaccatgtccacggccaatgagaagatcctgatgatgataaaccagtaccagagtgatgagaccctccccatcaacccactctccatgctcctgaacgggattgtggaccctgctgtcatgggaggcttcgccaagtatgagaaggccttcttcactgaagagtatgtcagggaccaccctgaggaccaggacaagctgacccacctcaaggacctgattgcatggcagatccccttcttgggagctgggattaagatccatgagaaaagggtgtcagataacttgcgacccttccatgaccggatggaggaatgtttcaagaacctgaaaatgaaggtggagaaggagtacggtgtccgagagatgcctgactttgacgacaggagagtgggccgtcccaggtctatgctgcgctcatacagacagatgtccatcatctctctggcttccatgaattctgactgcagcacccccagcaagcctacctcagagagctttgacctggaattagcatcacccaagacgccgagagtggagcaggaggaaccgatctccccggggagcaccctgcctgaggtcaagctgcggaggtccaagaagaggacaaagagaagcagcgtagtttttgcggatgagaaagcagctgcagagtcggacctgaagcggctttccaggaagcatgagttcatgagtgacaccaacctctcggagcatgcggccatccccctcaaggcgtctgtcctctctcaaatgagctttgccagccagtccatgcctaccatcccagccctggcgctctcagtggcaggcatccctgggttggatgaggccaacacatctccccgcctcagccagaccttcctccaactctcagatggtgacaagaagacactcacacggaagaaggtcaatcagttcttcaagacaatgctggccagcaaatcggctgaagaaggcaaacagatcccagactcgctgtccacggacctgtgagctgctgctgactagggctgcatgggagagccagggaggggagtttctggaagaggaaagccatgcgtggaacatcgaagcctcagagagtgggagactgtccccatcagttgtccttacttagaggagacagagaggccaatcaggtcccagagcttgagtgctaacaagcccagcatcccctggggctgtgatcatggtggatgaggaagcctcaacgtagattcctgaactcaaggtaccagcaagaatgccttctcccagtgtgctctccccaacatcctaggcacagctttcataacccagtttcttaggtgtaagaaactgtttttatctcatttattaagtctcagaacttaacagaaaaggaagccttttaaatattctttttaattttattttagattaacagttttgtactttacatttttttatacaaccaaccagtttcttttctagccaatcatctctgaagagttgctgtttcttactgacaataaaaaatgttctcttggttcgaataagccttgttgcctgattctgttggctgactctcctgggcccaggactgggcaggaagctccctggaaggaaggcaggcccaggggctgcagtgatgtgaaggagcctggtgatgcccttgcccaatgccaaatttccccacctcatctatgagaagattcttcaagaatctccatgactcttgttccttaggtgccaaaccctgggctaccagcatgttaaaaaagttgc

SEQ ID NO: 311512 - DNA, 2875 bp, Homo sapiens
ggcttccccacgggaggacgcgaggccccggcccagccatggccccctggcgcaaagctgacaaggagcggcacggcgtggccatatacaacttccaaggcagcggagccccccagctctccctgcagatcggcgatgtggtgcgaatacaggagacgtgtggagactggtataggggatacctcataaagcacaaaatgttacagggcatttttcctaagtcatttatccacatcaaggaagtgacagttgagaaaagaagaaatactgagaacatcattcctgcagaaattcctctggcacaagaagtgacaacgacactttgggaatggggaagcatctggaaacaactctatgtggccagcaaaaaggagcgttttctccaggtgcagtccatgatgtacgatctgatggagtggaggtcccagcttctctcaggaaccttacccaaggatgagctgaaggaactgaagcagaaagtcacgtccaaaattgactatggcaacaaaatccttgagcttgatttgattgtcagagatgaagacggaaatatcttggaccctgataataccagtgtcatcagcttgttccatgcacatgaggaagcaactgataaaatcacagagcgtatcaaagaagaaatgtcaaaagaccagccagattatgcaatgtattcccggatctcctcatcccccacccatagcctctatgtgtttgtgagaaactttgtgtgcagaattggggaagatgctgagctcttcatgtctctctacgaccccaacaagcaaacggtcataagtgagaactacctagtgcgatggggcagccggggcttccctaaggagattgagatgctcaacaatctgaaggtggtcttcacggatcttggaaacaaagacctcaacagggataaaatttacttgatttgtcaaatagtccgggtcggcaagatggatcttaaggatactggtgcaaagaagtgcacgcagggactgaggaggccctttggggtggcagttatggatataacagacatcatcaaggggaaagcagagagtgatgaagaaaagcagcacttcattccttttcacccggttacagctgagaatgacttcctacacagcctgctgggcaaagtcatagcctccaagggggacagtggagggcaaggcctctgggtgaccatgaagatgctggtgggtgacatcattcagattcgcaaggactatccacacctggtggacaggaccaccgtggtggccaggaagctgggattcccagagatcatcatgccaggggatgtcaggaacgacatctacattactctcttacaaggtgactttgacaagtacaacaagaccacacagaggaatgtggaagtcatcatgtgtgtgtgcgcggaggatggcaaaacgctgcctaatgcaatttgcgtgggagcaggggacaagcccatgaatgagtatcgctccgttgtgtactatcaagtcaaacagccacgctggatggaaacagtcaaggtggctgtccctattgaagacatgcagaggatccatctgcgattcatgtttcgacatcggtcatctctggaatctaaagataaaggagaaaagaactttgccatgtcctatgtgaagctgatgaaagaagatgggactactctacacgatggattccatgacttagttgtcctcaagggggacagcaagaagatggaggatgccagcgcatacctgacccttccttcttatcgacaccatgtggaaaacaagggggccacgctgagcaggagctccagcagtgttggggggctttctgtcagctcccgggatgtgttctccatttccaccctggtgtgctccacaaagctcactcagaatgtgggcttgctgggtttgctgaagtggcgtatgaagcctcaactgctacaggagaatttagaaaagttgaagattgtggatggagaggaagtggtgaagtttctccaggatactctggatgccctcttcaacatcatgatggagcattctcaaagtgatgaatatgacatcctcgtctttgatgccttgatttacataataggactcattgcagaccggaaatttcagcatttcaacaccgttctggaggcttacatccaacagcatttcagtgcgaccttggcttacaagaaattgatgacagtgctgaagacttacttggatacctccagcagaggggagcaatgtgagccaatcctaagaacgctgaaggctttggaatatgtgttcaagttcattgttcggtcgaggacattattttcacagctttatgaaggcaaagaacagatggagtttgaagaatccatgagacggctctttgaatccatcaacaatctgatgaaaagtcaatacaaaactaccatccttttgcaggtggcggctttgaaatacatcccatctgtcctgcatgatgtagaaatggtctttgatgcgaagttactcagccaactcctgtatgagttctacacctgcatccctcctgtgaaactccagaagcagaaagtacagtctatgaatgagatagtccagagcaacctctttaaaaagcaagaatgccgggacattctgcttcctgtcatcaccaaagagctgaaggagctgctggagcagaaggatgacatgcaacaccaggtcctggagaggaagtactgcgttgaattgctcaacagcatcttggaagtccttagctaccaggatgcggccttcacctaccaccatatccaagagatcatggtccagctgctgcggacagtgaaccggacagtcatcaccatgggccgggatcacattctgattggagcttgctgcaactgcggattcccatcctccacccc

SEQ ID NO: 311513 - DNA, 414 bp, Homo sapiens
ccaattgcctggatactctaggggtactatgttctcaaaggggcacaagaccagtctaccttctaaattgccttgtcaggaaagcctgtgcaaaagtcactcttacggagcccagaacacagaccttgattttaaatgcaccacaagggactctgccaggcctgaagtttactgtaatgaacctccctggacagtgcagggtcagatcgggtgtcagcagccggggatggctaccaggagcctcagcctcttcctgtctttcagcttctacaaatccaactacgtgcaaaggttccactactcccggcccgtgcgcagggggaccgtagacccagagaatgagtttgctgtgagtatcttccctacccttgatcattccctggagccacctggaggaaccagagcatgcatcgg

SEQ ID NO: 311514 - DNA, 368 bp, Homo sapiens
gaactaggatgatagctagatctgtttgactacaaactcatgctcttcccacaattacactatgctatagcagagttttgcaagccctttttggctgtggaatgcactcagggagcttttccagaagcctaataggtgaaatagacagaagttgagctggattggttgaaatgcgagtgcaaagctgccagtctcgtgtgctcttgtcccctggccaccctcccaccagacataaccactgaaacacctcagggatccacttggactcagaaaaggccagtttgcaaaacactgtctacatatccctttaacagactgcataggatttacctttttatttgagacagagttttgctcttgttgcccat

SEQ ID NO: 311515 - DNA, 4359 bp, Homo sapiens
ctctggccgctgggaagacgtcatcgcttccgccctacttcctcctcctgttggcggcggtgagaatccaatatggagtaaatcggtggagtcgagagatggggctcggacggggcgccctgcaccgcctcccaggcgcacctcccccggccgccgaccgctccccggaaccgtgattggcccggccccccgggggcgaccccggactgagcccccccacccgcggccggcgctctcctcctcctcgcagcagtccctgccgctccgaggcgcgcttgtttttctcctgctctcccccaccgccgtccccttcccaaatctcgccccctctgcccgctcccgagcccccggagcctccgcccgcctctccccacggcgctgcggcgttcactccccgcgcagcctgcctttgcaccccttcccccaaaccctatcccgcgccctgcttccccttctgctgcggcgccctcttcatctctagccgccccccctccccaaatcaggcgatctccggagatgtgaagaaggggggcgagcggacaggaagatgaagggagcaaagctgcccgccgcgggacaggcgtctaggtgaacaagaaaatgaccgaagaaacacacccagacgatgacagctatattgtgcgtgtcaaggctgtggttatgaccagagatgactccagcgggggatggttcccacaggaaggaggcgggatcagtcgcgtcggggtctgtaaggtcatgcaccccgaaggcaatggacgaagcggctttctcatccatggtgaacgacagaaagacaaactggtggtattggaatgctatgtaagaaaggacttggtctacaccaaagccaatccaacgtttcatcactggaaggtcgataataggaagtttggacttactttccaaagccctgctgatgcccgagcctttgacaggggagtaaggaaagcaatcgaagaccttatagaaggttcaacaacgtcatcttccaccatccataatgaagctgagcttggcgatgatgacgtttttacaacagctacagacagttcttctaattcctctcagaagagagagcaacctactcggacaatctcctctcccacatcctgtgagcaccggaggatttataccctgggccacctccacgactcataccccacagaccactatcacctcgatcagccgatgccaaggccctaccgccaggtgagcttcccggacgacgacgaggagatcgtgcgcatcaacccccgggagaagatctggatgacggggtacgaggattaccggcacgcacccgtcaggggcaagtacccggacccctcggaggacgcggactcctcctacgtgcgcttcgccaagggcgaggtccccaagcatgactacaactacccctacgtggactcctcagactttggcctaggcgaggaccccaaaggccgcgggggcagcgtgatcaagacgcagccctcccggggcaagtcgcggcggcggaaggaggacggagagcgctcgcggtgcgtgtactgcagggacatgttcaaccacgaggagaaccgccggggccactgccaggacgcccccgactccgtgagaacttgcatccgccgggtgagctgcatgtggtgcgcggacagcatgctctatcactgtatgtcggaccccgagggagactatacagacccttgctcgtgcgatactagcgacgagaagttttgcctccggtggatggctcttattgccttgtctttcctggccccctgtatgtgctgttacctgccccttcgggcctgctaccactgcggagtgatgtgcaggtgctgtggcgggaagcacaaagcggccgcgtgactcagtttccctcccttctccctccatccgcagccacaggggaactcgtctcttacatactctcatcttctcccccgctcccttccactccaaggagcgaggagggcaagcggcctcccagctccctggtacctcgaggcaccattccagccagggacgctgccgggtagactctccactccccctgccgcccacactgcagcagccacatccatacacacacgctcgcacagtgttctgaggaaggaaccttcgccacagactcctgtactattaacaatctgtaaccaagctaactgtctcatccatgtgttgatttcctgtttcctcctcccccgcctcttccagttcaaaggagtctgcaattggaactgctgattttcggtgggttttgtagttgatttttccaagagcgtcgaagactctctttctcttggttcaccttgcctgtcgctagcaagcatctggttcagcggaaatgggatgtgagaatgatgaaacccgacagaagtatctcagcctgcagtcagttattatgtataggaggtgagctagttaacaaacttgtaccacaaaacaatatcgctttaacttttctaaagccaaatttcccatgtaagctgcagtttctatctttagcccatcatcattttctgcccccccaaaatctgttgaaatgattcactgatgcaaaacattcacccgtaatagactgagaattgagccttaacttcagattaacttgtgagaatcaggaaaattccttcaactgcattgcatcctcttggaccagggctagaatggggatttcaggtttctatgagcctccccattacccctaaagtagaacattttttaaattgtgttgccaccacttctaaaaatttagcaatattagaataggatactagtgaagtaagaaattttgcttgttgttttgcaaaccaaatagtttcctcaaacacaaatcagtgttcccacgaacaagttccagttgagaaacactaaggttatggtgaataaaaccatagggagcttcttccccccaacccctggctattttatattaatggggagaggggatttttaaatgtcataaatttgaagagtggtgggttgcattttcttcatgggtttatgttttcgtttcattttggactcaatttcacatcaccaaattcctcatttatacttggggaaaaaacaaggccatatgtaaaaacccttccaatgcctaagtgtctttctcctgcaactccaaacccagactcgccactttgggtgcacaggtggttaggtcagccaactggttctgcctgtcgccttgccacggaggaggcttctaattagctggaaaagagtatttttctaatacgttgcaaggattagccaaatcttcttattgaagaaagaagaaaagtgaagagtggttacctatacctagcatagtacaatcagaacctcgtggagaccaccggggacaggcttgcggacgccggctgttcttcccgccacgatctttctgtggtagcggccagcagaagacatggcctgctccccactccctttccccactccttctttattgcacacaggacaccagtcttcaaggaaagggacttttttccagtctgccaatcatattgggaaagtgctagctgtgctcaccttcatggggctgtttccagctcgtccacaagctcatcgattttctttagtagattaccggtgtaaatacccagtgtgcttatgagtcagttagtagacgtcttcattcattggagtaactggtttaggctttccagtttggaaaaggagcagagagctgtccatctggattgatggaagaaaagagaacctcatccatgcctggagaacatctagaaaaccttcagccagcctccagtgctgtcgagagaccaccttcccccgacccggaggcacttccttggggtctttctctagggtctcttctctacaaagcacaacactaatgttcgtttccttagacctcagttcaagtgcccctatttatttcaataagaacgcacatatcccagctgttttttgtttgtcacctctatttagttgttacctgtttctctcttctttcaccccttgtccttttccacccttttaagagttacgcatactgacgtcaatcatttgagagaaattattcagattttatttttgtatctgtggtaacaaaacattaaccaaaagattttctgtccagaagcctccccgaccccccaagctatttgctcacattaacaaattaaagtgcctgaagcataattcattctttacctgtatactaaaaaccctgttgtattgatttttttataataagcctttttacctctgtgtaaaaaatatatatacaagtgtatgatgtacattttagttcttaacttttttttatggtttctaatatgtatgaccaatgtagccattgctttaaaatgtaccgtgtaaatataaacacatcctatcaga

SEQ ID NO: 311516 - DNA, 3942 bp, Homo sapiens
ctctggccgctgggaagacgtcatcgcttccgccctacttcctcctcctgttggcggcggtgagaatccaatatggagtaaatcggtggagtcgagagatggggctcggacggggcgccctgcaccgcctcccaggcgcacctcccccggccgccgaccgctccccggaaccgtgattggcccggccccccgggggcgaccccggactgagcccccccacccgcggccggcgctctcctcctcctcgcagcagtccctgccgctccgaggcgcgcttgtttttctcctgctctcccccaccgccgtccccttcccaaatctcgccccctctgcccgctcccgagcccccggagcctccgcccgcctctccccacggcgctgcggcgttcactccccgcgcagcctgcctttgcaccccttcccccaaaccctatcccgcgccctgcttccccttctgctgcggcgccctcttcatctctagccgccccccctccccaaatcaggcgatctccggagatgtgaagaaggggggcgagcggacaggaagatgaagggagcaaagctgcccgccgcgggacaggcgtctaggtgaacaagaaaatgaccgaagaaacacacccagacgatgacagctatattgtgcgtgtcaaggctgtggttatgaccagagatgactccagcgggggatggttcccacaggaaggaggcgggatcagtcgcgtcggggtctgtaaggtcatgcaccccgaaggcaatggacgaagcggctttctcatccatggtgaacgacagaaagacaaactggtggtattggaatgctatgtaagaaaggacttggtctacaccaaagccaatccaacgtttcatcactggaaggtcgataataggaagtttggacttactttccaaagccctgctgatgcccgagcctttgacaggggagtaaggaaagcaatcgaagaccttatagaaggttcaacaacgtcatcttccaccatccataatgaagctgagcttggcgatgatgacgtttttacaacagctacagacagttcttctaattcctctcagaagagagagcaacctactcggacaatctcctctcccacatcctgtgagcaccggaggatttataccctgggccacctccacgactcataccccacagaccactatcacctcgatcagccgatgccaaggccctaccgccaggtgagcttcccggacgacgacgaggagatcgtgcgcatcaacccccgggagaagatctggatgacggggtacgaggattaccggcacgcacccgtcaggggcaagtacccggacccctcggaggacgcggactcctcctacgtgcgcttcgccaagggcgaggtccccaagcatgactacaactacccctacgtggactcctcagactttggcctaggcgaggaccccaaaggccgcgggggcagcgtgatcaagacgcagccctcccggggcaagtcgcggcggcggaaggaggacggagagcgctcgcggtgcgtgtactgcagggacatgttcaaccacgaggagaaccgccggggccactgccaggacgcccccgactccgtgagaacttgcatccgccgggtgagctgcatgtggtgcgcggacagcatgctctatcactgtatgtcggaccccgagggagactatacagacccttgctcgtgcgatactagcgacgagaagttttgcctccggtggatggctcttattgccttgtctttcctggccccctgtatgtgctgttacctgccccttcgggcctgctaccactgcggagtgatgtgcaggtgctgtggcgggaagcacaaagcggccgcgtgactcagtttccctcccttctccctccatccgcagccacaggggaactcgtctcttacatactctcatcttctcccccgctcccttccactccaaggagcgaggagggcaagcggcctcccagctccctggtacctcgaggcaccattccagccagggacgctgccgggtagactctccactccccctgccgcccacactgcagcagccacatccatacacacacgctcgcacagtgttctgaggaaggaaccttcgccacagactcctgtactattaacaatctgtaaccaagctaactgtctcatccatgtgttgatttcctgtttcctcctcccccgcctcttccagttcaaaggagtctgcaattggaactgctgattttcggtgggttttgtagttgatttttccaagagcgtcgaagactctctttctcttggttcaccttgcctgtcgctagcaagcatctggttcagcggaaatgggatgtgagaatgatgaaacccgacagaagtatctcagcctgcagtcagttattatgtataggaggtgagctagttaacaaacttgtaccacaaaacaatatcgctttaacttttctaaagccaaatttcccatgtaagctgcagtttctatctttagcccatcatcattttctgcccccccaaaatctgttgaaatgattcactgatgcaaaacattcacccgtaatagactgagaattgagccttaacttcagattaacttgtgagaatcaggaaaattccttcaactgcattgcatcctcttggaccagggctagaatggggatttcaggtttctatgagcctccccattacccctaaagtagaacattttttaaattgtgttgccaccacttctaaaaatttagcaatattagaataggatactagtgaagtaagaaattttgcttgttgttttgcaaaccaaatagtttcctcaaacacaaatcagtgttcccacgaacaagttccagttgagaaacactaaggttatggtgaataaaaccatagggagcttcttccccccaacccctggctattttatattaatggggagaggggatttttaaatgtcataaatttgaagagtggtgggttgcattttcttcatgggtttatgttttcgtttcattttggactcaatttcacatcaccaaattcctcatttatacttggggaaaaaacaaggccatatgtaaaaacccttccaatgcctaagtgtctttctcctgcaactccaaacccagactcgccactttgggtgcacaggtggttaggtcagccaactggttctgcctgtcgccttgccacggaggaggcttctaattagctggaaaagagtatttttctaatacgttgcaaggattagccaaatcttcttattgaagaaagaagaaaagtgaagagtggttacctatacctagcatagtacaatcagaacctcgtggagaccaccggggacaggcttgcggacgccggctgttcttcccgccacgatctttctgtggtagcggccagcagaagacatggcctgctccccactccctttccccactccttctttattgcacacaggacaccagtcttcaaggaaagggacttttttccagtctgccaatcatattgggaaagtgctagctgtgctcaccttcatggggctgtttccagctcgtccacaagctcatcgattttctttagtagattaccggtgtaaatacccagtgtgcttatgagtcagttagtagacgtcttcattcattggagtaactggtttaggctttccagtttggaaaaggagcagagagctgtccatctggattgatggaagaaaagagaacctcatccatgcctggagaacatctagaaaaccttcagccagcctccagtgctgtcgagagaccaccttcccccgacccggaggcacttccttggggtctttctctagggtctcttctctacaaagcacaacactaatgttcgtttccttagacctcagttcaagtgcccctatttatttcaataagaacgcacatatcccagctgcgtttgaggggaaaagaccctg

SEQ ID NO: 311517 - DNA, 4507 bp, Homo sapiens
ctctggccgctgggaagacgtcatcgcttccgccctacttcctcctcctgttggcggcggtgagaatccaatatggagtaaatcggtggagtcgagagatggggctcggacggggcgccctgcaccgcctcccaggcgcacctcccccggccgccgaccgctccccggaaccgtgattggcccggccccccgggggcgaccccggactgagcccccccacccgcggccggcgctctcctcctcctcgcagcagtccctgccgctccgaggcgcgcttgtttttctcctgctctcccccaccgccgtccccttcccaaatctcgccccctctgcccgctcccgagcccccggagcctccgcccgcctctccccacggcgctgcggcgttcactccccgcgcagcctgcctttgcaccccttcccccaaaccctatcccgcgccctgcttccccttctgctgcggcgccctcttcatctctagccgccccccctccccaaatcaggcgatctccggagatgtgaagaaggggggcgagcggacaggaagatgaagggagcaaagctgcccgccgcgggacaggcgtctaggtgaacaagaaaatgaccgaagaaacacacccagacgatgacagctatattgtgcgtgtcaaggctgtggttatgaccagagatgactccagcgggggatggttcccacaggaaggaggcgggatcagtcgcgtcggggtctgtaaggtcatgcaccccgaaggcaatggacgaagcggctttctcatccatggtgaacgacagaaagacaaactggtggtattggaatgctatgtaagaaaggacttggtctacaccaaagccaatccaacgtttcatcactggaaggtcgataataggaagtttggacttactttccaaagccctgctgatgcccgagcctttgacaggggagtaaggaaagcaatcgaagaccttatagaaggttcaacaacgtcatcttccaccatccataatgaagctgagcttggcgatgatgacgtttttacaacagctacagacagttcttctaattcctctcagaagagagagcaacctactcggacaatctcctctcccacatcctgtgagcaccggaggatttataccctgggccacctccacgactcataccccacagaccactatcacctcgatcagccgatgccaaggccctaccgccaggtgagcttcccggacgacgacgaggagatcgtgcgcatcaacccccgggagaagatctggatgacggggtacgaggattaccggcacgcacccgtcaggggcaagtacccggacccctcggaggacgcggactcctcctacgtgcgcttcgccaagggcgaggtccccaagcatgactacaactacccctacgtggactcctcagactttggcctaggcgaggaccccaaaggccgcgggggcagcgtgatcaagacgcagccctcccggggcaagtcgcggcggcggaaggaggacggagagcgctcgcggtgcgtgtactgcagggacatgttcaaccacgaggagaaccgccggggccactgccaggacgcccccgactccgtgagaacttgcatccgccgggtgagctgcatgtggtgcgcggacagcatgctctatcactgtatgtcggaccccgagggagactatacagacccttgctcgtgcgatactagcgacgagaagttttgcctccggtggatggctcttattgccttgtctttcctggccccctgtatgtgctgttacctgccccttcgggcctgctaccactgcggagtgatgtgcaggtgctgtggcgggaagcacaaagcggccgcgtgactcagtttccctcccttctccctccatccgcagccacaggggaactcgtctcttacatactctcatcttctcccccgctcccttccactccaaggagcgaggagggcaagcggcctcccagctccctggtacctcgaggcaccattccagccagggacgctgccgggtagactctccactccccctgccgcccacactgcagcagccacatccatacacacacgctcgcacagtgttctgaggaaggaaccttcgccacagactcctgtactattaacaatctgtaaccaagctaactgtctcatccatgtgttgatttcctgtttcctcctcccccgcctcttccagttcaaaggagtctgcaattggaactgctgattttcggtgggttttgtagttgatttttccaagagcgtcgaagactctctttctcttggttcaccttgcctgtcgctagcaagcatctggttcagcggaaatgggatgtgagaatgatgaaacccgacagaagtatctcagcctgcagtcagttattatgtataggaggtgagctagttaacaaacttgtaccacaaaacaatatcgctttaacttttctaaagccaaatttcccatgtaagctgcagtttctatctttagcccatcatcattttctgcccccccaaaatctgttgaaatgattcactgatgcaaaacattcacccgtaatagactgagaattgagccttaacttcagattaacttgtgagaatcaggaaaattccttcaactgcattgcatcctcttggaccagggctagaatggggatttcaggtttctatgagcctccccattacccctaaagtagaacattttttaaattgtgttgccaccacttctaaaaatttagcaatattagaataggatactagtgaagtaagaaattttgcttgttgttttgcaaaccaaatagtttcctcaaacacaaatcagtgttcccacgaacaagttccagttgagaaacactaaggttatggtgaataaaaccatagggagcttcttccccccaacccctggctattttatattaatggggagaggggatttttaaatgtcataaatttgaagagtggtgggttgcattttcttcatgggtttatgttttcgtttcattttggactcaatttcacatcaccaaattcctcatttatacttggggaaaaaacaaggccatatgtaaaaacccttccaatgcctaagtgtctttctcctgcaactccaaacccagactcgccactttgggtgcacaggtggttaggtcagccaactggttctgcctgtcgccttgccacggaggaggcttctaattagctggaaaagagtatttttctaatacgttgcaaggattagccaaatcttcttattgaagaaagaagaaaagtgaagagtggttacctatacctagcatagtacaatcagaacctcgtggagaccaccggggacaggcttgcggacgccggctgttcttcccgccacgatctttctgtggtagcggccagcagaagacatggcctgctccccactccctttccccactccttctttattgcacacaggacaccagtcttcaaggaaagggacttttttccagtctgccaatcatattgggaaagtgctagctgtgctcaccttcatggggctgtttccagctcgtccacaagctcatcgattttctttagtagattaccggtgtaaatacccagtgtgcttatgagtcagttagtagacgtcttcattcattggagtaactggtttaggctttccagtttggaaaaggagcagagagctgtccatctggattgatggaagaaaagagaacctcatccatgcctggagaacatctagaaaaccttcagccagcctccagtgctgtcgagagaccaccttcccccgacccggaggcacttccttggggtctttctctagggtctcttctctacaaagcacaacactaatgttcgtttccttagacctcagttcaagtgcccctatttatttcaataagaacgcacatatcccagctgttttttgtttgtcacctctatttagttgttacctgtttctctcttctttcaccccttgtccttttccacccttttaagagttacgctagcagatcttactccacgtatactttttggtttgtgaaggcatcggttaagggcacaaagacagccatggggacatttatgtaaatacgtctctaattgccacactgcagctgaacagtgtgtagtattttcccagtcagctttgccatactgacgtcaatcatttgagagaaattattcagattttatttttgtatctgtggtaacaaaacattaaccaaaagattttctgtccagaagcctccccgaccccccaagctatttgctcacattaacaaattaaagtgcctgaagcataattcattctttacctgtatactaaaaaccctgttgtattgatttttttataataagcctttttacctctgtgtaaaaaatatatatacaagtgtatgatgtacattttagttcttaacttttttttatggtttctaatatgtatgaccaatgtagccattgctttaaaatgtaccgtgtaaatataaacacatcctatcaga

SEQ ID NO: 311518 - DNA, 4090 bp, Homo sapiens
gactaaccctcggatgactcatccggtacaatgcagtatatttgtcaaggagactgaatcatatatgggggaaaccacttctcaggcagccagctggttctcaggtcagcaagagacgatccatttttatcggaagctttatagtagcaataatgctaatacccagcactcgggctccacaatgtagaggaaatggcatcgcctggcagtgacagctatattgtgcgtgtcaaggctgtggttatgaccagagatgactccagcgggggatggttcccacaggaaggaggcgggatcagtcgcgtcggggtctgtaaggtcatgcaccccgaaggcaatggacgaagcggctttctcatccatggtgaacgacagaaagacaaactggtggtattggaatgctatgtaagaaaggacttggtctacaccaaagccaatccaacgtttcatcactggaaggtcgataataggaagtttggacttactttccaaagccctgctgatgcccgagcctttgacaggggagtaaggaaagcaatcgaagaccttatagaaggttcaacaacgtcatcttccaccatccataatgaagctgagcttggcgatgatgacgtttttacaacagctacagacagttcttctaattcctctcagaagagagagcaacctactcggacaatctcctctcccacatcctgtgagcaccggaggatttataccctgggccacctccacgactcataccccacagaccactatcacctcgatcagccgatgccaaggccctaccgccaggtgagcttcccggacgacgacgaggagatcgtgcgcatcaacccccgggagaagatctggatgacggggtacgaggattaccggcacgcacccgtcaggggcaagtacccggacccctcggaggacgcggactcctcctacgtgcgcttcgccaagggcgaggtccccaagcatgactacaactacccctacgtggactcctcagactttggcctaggcgaggaccccaaaggccgcgggggcagcgtgatcaagacgcagccctcccggggcaagtcgcggcggcggaaggaggacggagagcgctcgcggtgcgtgtactgcagggacatgttcaaccacgaggagaaccgccggggccactgccaggacgcccccgactccgtgagaacttgcatccgccgggtgagctgcatgtggtgcgcggacagcatgctctatcactgtatgtcggaccccgagggagactatacagacccttgctcgtgcgatactagcgacgagaagttttgcctccggtggatggctcttattgccttgtctttcctggccccctgtatgtgctgttacctgccccttcgggcctgctaccactgcggagtgatgtgcaggtgctgtggcgggaagcacaaagcggccgcgtgactcagtttccctcccttctccctccatccgcagccacaggggaactcgtctcttacatactctcatcttctcccccgctcccttccactccaaggagcgaggagggcaagcggcctcccagctccctggtacctcgaggcaccattccagccagggacgctgccgggtagactctccactccccctgccgcccacactgcagcagccacatccatacacacacgctcgcacagtgttctgaggaaggaaccttcgccacagactcctgtactattaacaatctgtaaccaagctaactgtctcatccatgtgttgatttcctgtttcctcctcccccgcctcttccagttcaaaggagtctgcaattggaactgctgattttcggtgggttttgtagttgatttttccaagagcgtcgaagactctctttctcttggttcaccttgcctgtcgctagcaagcatctggttcagcggaaatgggatgtgagaatgatgaaacccgacagaagtatctcagcctgcagtcagttattatgtataggaggtgagctagttaacaaacttgtaccacaaaacaatatcgctttaacttttctaaagccaaatttcccatgtaagctgcagtttctatctttagcccatcatcattttctgcccccccaaaatctgttgaaatgattcactgatgcaaaacattcacccgtaatagactgagaattgagccttaacttcagattaacttgtgagaatcaggaaaattccttcaactgcattgcatcctcttggaccagggctagaatggggatttcaggtttctatgagcctccccattacccctaaagtagaacattttttaaattgtgttgccaccacttctaaaaatttagcaatattagaataggatactagtgaagtaagaaattttgcttgttgttttgcaaaccaaatagtttcctcaaacacaaatcagtgttcccacgaacaagttccagttgagaaacactaaggttatggtgaataaaaccatagggagcttcttccccccaacccctggctattttatattaatggggagaggggatttttaaatgtcataaatttgaagagtggtgggttgcattttcttcatgggtttatgttttcgtttcattttggactcaatttcacatcaccaaattcctcatttatacttggggaaaaaacaaggccatatgtaaaaacccttccaatgcctaagtgtctttctcctgcaactccaaacccagactcgccactttgggtgcacaggtggttaggtcagccaactggttctgcctgtcgccttgccacggaggaggcttctaattagctggaaaagagtatttttctaatacgttgcaaggattagccaaatcttcttattgaagaaagaagaaaagtgaagagtggttacctatacctagcatagtacaatcagaacctcgtggagaccaccggggacaggcttgcggacgccggctgttcttcccgccacgatctttctgtggtagcggccagcagaagacatggcctgctccccactccctttccccactccttctttattgcacacaggacaccagtcttcaaggaaagggacttttttccagtctgccaatcatattgggaaagtgctagctgtgctcaccttcatggggctgtttccagctcgtccacaagctcatcgattttctttagtagattaccggtgtaaatacccagtgtgcttatgagtcagttagtagacgtcttcattcattggagtaactggtttaggctttccagtttggaaaaggagcagagagctgtccatctggattgatggaagaaaagagaacctcatccatgcctggagaacatctagaaaaccttcagccagcctccagtgctgtcgagagaccaccttcccccgacccggaggcacttccttggggtctttctctagggtctcttctctacaaagcacaacactaatgttcgtttccttagacctcagttcaagtgcccctatttatttcaataagaacgcacatatcccagctgttttttgtttgtcacctctatttagttgttacctgtttctctcttctttcaccccttgtccttttccacccttttaagagttacgctagcagatcttactccacgtatactttttggtttgtgaaggcatcggttaagggcacaaagacagccatggggacatttatgtaaatacgtctctaattgccacactgcagctgaacagtgtgtagtattttcccagtcagctttgccatactgacgtcaatcatttgagagaaattattcagattttatttttgtatctgtggtaacaaaacattaaccaaaagattttctgtccagaagcctccccgaccccccaagctatttgctcacattaacaaattaaagtgcctgaagcataattcattctttacctgtatactaaaaaccctgttgtattgatttttttataataagcctttttacctctgtgtaaaaaatatatatacaagtgtatgatgtacattttagttcttaacttttttttatggtttctaatatgtatgaccaatgtagccattgctttaaaatgtaccgtgtaaatataaacacatcctatcaga

SEQ ID NO: 311519 - DNA, 4607 bp, Homo sapiens
ctctggccgctgggaagacgtcatcgcttccgccctacttcctcctcctgttggcggcggtgagaatccaatatggagtaaatcggtggagtcgagagatggggctcggacggggcgccctgcaccgcctcccaggcgcacctcccccggccgccgaccgctccccggaaccgtgattggcccggccccccgggggcgaccccggactgagcccccccacccgcggccggcgctctcctcctcctcgcagcagtccctgccgctccgaggcgcgcttgtttttctcctgctctcccccaccgccgtccccttcccaaatctcgccccctctgcccgctcccgagcccccggagcctccgcccgcctctccccacggcgctgcggcgttcactccccgcgcagcctgcctttgcaccccttcccccaaaccctatcccgcgccctgcttccccttctgctgcggcgccctcttcatctctagccgccccccctccccaaatcaggcgatctccggagatgtgaagaaggggggcgagcggacaggaagatgaagggagcaaagctgcccgccgcgggacaggcgtctaggtgaacaagaaaatgaccgaagaaacacacccagacgatgacagctatattgtgcgtgtcaaggctgtggttatgaccagagatgactccagcgggggatggttcccacaggaaggaggcgggatcagtcgcgtcggggtctgtaaggtcatgcaccccgaaggcaatggacgaagcggctttctcatccatggtgaacgacagaaagacaaactggtggtattggaatgctatgtaagaaaggacttggtctacaccaaagccaatccaacgtttcatcactggaaggtcgataataggaagtttggacttactttccaaagccctgctgatgcccgagcctttgacaggggagtaaggaaagcaatcgaagaccttatagaaggttcaacaacgtcatcttccaccatccataatgaagctgagcttggcgatgatgacgtttttacaacagctacagacagttcttctaattcctctcagaagagagagcaacctactcggacaatctcctctcccacatcctgtgagcaccggaggatttataccctgggccacctccacgactcataccccacagaccactatcacctcgatcagccgatgccaaggccctaccgccaggtgagcttcccggacgacgacgaggagatcgtgcgcatcaacccccgggagaagatctggatgacggggtacgaggattaccggcacgcacccgtcaggggcaagtacccggacccctcggaggacgcggactcctcctacgtgcgcttcgccaagggcgaggtccccaagcatgactacaactacccctacgtggactcctcagactttggcctaggcgaggaccccaaaggccgcgggggcagcgtgatcaagacgcagccctcccggggcaagtcgcggcggcggaaggaggacggagagcgctcgcggtgcgtgtactgcagggacatgttcaaccacgaggagaaccgccggggccactgccaggacgcccccgactccgtgagaacttgcatccgccgggtgagctgcatgtggtgcgcggacagcatgctctatcactgtatgtcggaccccgagggagactatacagacccttgctcgtgcgatactagcgacgagaagttttgcctccggtggatggctcttattgccttgtctttcctggccccctgtatgtgctgttacctgccccttcgggcctgctaccactgcggagtgatgtgcaggtgctgtggcgggaagcacaaagcggccgcgtgactcagtttccctcccttctccctccatccgcagccacaggggaactcgtctcttacatactctcatcttctcccccgctcccttccactccaaggagcgaggagggcaagcggcctcccagctccctggtacctcgaggcaccattccagccagggacgctgccgggtagactctccactccccctgccgcccacactgcagcagccacatccatacacacacgctcgcacagtgttctgaggaaggaaccttcgccacagactcctgtactattaacaatctgtaaccaagctaactgtctcatccatgtgttgatttcctgtttcctcctcccccgcctcttccagttcaaaggagtctgcaattggaactgctgattttcggtgggttttgtagttgatttttccaagagcgtcgaagactctctttctcttggttcaccttgcctgtcgctagcaagcatctggttcagcggaaatgggatgtgagaatgatgaaacccgacagaagtatctcagcctgcagtcagttattatgtataggaggtgagctagttaacaaacttgtaccacaaaacaatatcgctttaacttttctaaagccaaatttcccatgtaagctgcagtttctatctttagcccatcatcattttctgcccccccaaaatctgttgaaatgattcactgatgcaaaacattcacccgtaatagactgagaattgagccttaacttcagattaacttgtgagaatcaggaaaattccttcaactgcattgcatcctcttggaccagggctagaatggggatttcaggtttctatgagcctccccattacccctaaagtagaacattttttaaattgtgttgccaccacttctaaaaatttagcaatattagaataggatactagtgaagtaagaaattttgcttgttgttttgcaaaccaaatagtttcctcaaacacaaatcagtgttcccacgaacaagttccagttgagaaacactaaggttatggtgaataaaaccatagggagcttcttccccccaacccctggctattttatattaatggggagaggggatttttaaatgtcataaatttgaagagtggtgggttgcattttcttcatgggtttatgttttcgtttcattttggactcaatttcacatcaccaaattcctcatttatacttggggaaaaaacaaggccatatgtaaaaacccttccaatgcctaagtgtctttctcctgcaactccaaacccagactcgccactttgggtgcacaggtggttaggtcagccaactggttctgcctgtcgccttgccacggaggaggcttctaattagctggaaaagagtatttttctaatacgttgcaaggattagccaaatcttcttattgaagaaagaagaaaagtgaagagtggttacctatacctagcatagtacaatcagaacctcgtggagaccaccggggacaggcttgcggacgccggctgttcttcccgccacgatctttctgtggtagcggccagcagaagacatggcctgctccccactccctttccccactccttctttattgcacacaggacaccagtcttcaaggaaagggacttttttccagtctgccaatcatattgggaaagtgctagctgtgctcaccttcatggggctgtttccagctcgtccacaagctcatcgattttctttagtagattaccggtgtaaatacccagtgtgcttatgagtcagttagtagacgtcttcattcattggagtaactggtttaggctttccagtttggaaaaggagcagagagctgtccatctggattgatggaagaaaagagaacctcatccatgcctggagaacatctagaaaaccttcagccagcctccagtgctgtcgagagaccaccttcccccgacccggaggcacttccttggggtctttctctagggtctcttctctacaaagcacaacactaatgttcgtttccttagacctcagttcaagtgcccctatttatttcaataagaacgcacatatcccagctgttttttgtttgtcacctctatttagttgttacctgtttctctcttctttcaccccttgtccttttccacccttttaagagttacgctagcagatcttactccacgtatactttttggtttgtgaaggcatcggttaagggcacaaagacagccatggggacatttatgtaaatacgtctctaattgccacactgcagctgaacagtgtgtagtattttcccagtcagctttgccatactgacgtcaatcatttgagagaaattattcagattttatttttgtatctgtggtaacaaaacattaaccaaaagattttctgtccagaagcctccccgaccccccaagctatttgctcacattaacaaattaaagtgcctgaagcataattcattctttacctgtatactaaaaaccctgttgtattgatttttttataataagcctttttacctctgtgtaaaaaatatatatacaagtgtatgatgtacattttagttcttaacttttttttatggtttctaatatgtatgaccaatgtagccattgctttaaaatgtaccgtgtaaatataaacacatcctatcagaaaaaggacagaaaacccaagataaagggagaaaaaagggcagagaaaaagggggcgaaagagaaagaggaaaaaaaaaaaagggggggggcaaaaaacgg

SEQ ID NO: 311520 - DNA, 4440 bp, Homo sapiens
ctctggccgctgggaagacgtcatcgcttccgccctacttcctcctcctgttggcggcggtgagaatccaatatggagtaaatcggtggagtcgagagatggggctcggacggggcgccctgcaccgcctcccaggcgcacctcccccggccgccgaccgctccccggaaccgtgattggcccggccccccgggggcgaccccggactgagcccccccacccgcggccggcgctctcctcctcctcgcagcagtccctgccgctccgaggcgcgcttgtttttctcctgctctcccccaccgccgtccccttcccaaatctcgccccctctgcccgctcccgagcccccggagcctccgcccgcctctccccacggcgctgcggcgttcactccccgcgcagcctgcctttgcaccccttcccccaaaccctatcccgcgccctgcttccccttctgctgcggcgccctcttcatctctagccgccccccctccccaaatcaggcgatctccggagatgtgaagaaggggggcgagcggacaggaagatgaagggagcaaagctgcccgccgcgggacaggcgtctaggtgaacaagaaaatgaccgaagaaacacacccagacgatgacagctatattgtgcgtgtcaaggctgtggttatgaccagagatgactccagcgggggatggttcccacaggaaggaggcgggatcagtcgcgtcggggtctgtaaggtcatgcaccccgaaggcaatggacgaagcggctttctcatccatggtgaacgacagaaagacaaactggtggtattggaatgctatgtaagaaaggacttggtctacaccaaagccaatccaacgtttcatcactggaaggtcgataataggaagtttggacttactttccaaagccctgctgatgcccgagcctttgacaggggagtaaggaaagcaatcgaagaccttatagaaggttcaacaacgtcatcttccaccatccataatgaagctgagcttggcgatgatgacgtttttacaacagctacagacagttcttctaattcctctcagaagagagagcaacctactcggacaatctcctctcccacatcctgtgagcaccggaggatttataccctgggccacctccacgactcataccccacagaccactatcacctcgatcagccgatgccaaggccctaccgccaggtgagcttcccggacgacgacgaggagatcgtgcgcatcaacccccgggagaagatctggatgacggggtacgaggattaccggcacgcacccgtcaggggcaagtacccggacccctcggaggacgcggactcctcctacgtgcgcttcgccaagggcgaggtccccaagcatgactacaactacccctacgtggactcctcagactttggcctaggcgaggaccccaaaggccgcgggggcagcgtgatcaagacgcagccctcccggggcaagtcgcggcggcggaaggaggacggagagcgctcgcggtgcgtgtactgcagggacatgttcaaccacgaggagaaccgccggggccactgccaggacgcccccgactccgtgagaacttgcatccgccgggtgagctgcatgtggtgcgcggacagcatgctctatcactgtatgtcggaccccgagggagactatacagacccttgctcgtgcgatactagcgacgagaagttttgcctccggtggatggctcttattgccttgtctttcctggccccctgtatgtgctgttacctgccccttcgggcctgctaccactgcggagtgatgtgcaggtgctgtggcgggaagcacaaagcggccgcgtgactcagtttccctcccttctccctccatccgcagccacaggggaactcgtctcttacatactctcatcttctcccccgctcccttccactccaaggagcgaggagggcaagcggcctcccagctccctggtacctcgaggcaccattccagccagggacgctgccgggtagactctccactccccctgccgcccacactgcagcagccacatccatacacacacgctcgcacagtgttctgaggaaggaaccttcgccacagactcctgtactattaacaatctgtaaccaagctaactgtctcatccatgtgttgatttcctgtttcctcctcccccgcctcttccagttcaaaggagtctgcaattggaactgctgattttcggtgggttttgtagttgatttttccaagagcgtcgaagactctctttctcttggttcaccttgcctgtcgctagcaagcatctggttcagcggaaatgggatgtgagaatgatgaaacccgacagaagtatctcagcctgcagtcagttattatgtataggaggtgagctagttaacaaacttgtaccacaaaacaatatcgctttaacttttctaaagccaaatttcccatgtaagctgcagtttctatctttagcccatcatcattttctgcccccccaaaatctgttgaaatgattcactgatgcaaaacattcacccgtaatagactgagaattgagccttaacttcagattaacttgtgagaatcaggaaaattccttcaactgcattgcatcctcttggaccagggctagaatggggatttcaggtttctatgagcctccccattacccctaaagtagaacattttttaaattgtgttgccaccacttctaaaaatttagcaatattagaataggatactagtgaagtaagaaattttgcttgttgttttgcaaaccaaatagtttcctcaaacacaaatcagtgttcccacgaacaagttccagttgagaaacactaaggttatggtgaataaaaccatagggagcttcttccccccaacccctggctattttatattaatggggagaggggatttttaaatgtcataaatttgaagagtggtgggttgcattttcttcatgggtttatgttttcgtttcattttggactcaatttcacatcaccaaattcctcatttatacttggggaaaaaacaaggccatatgtaaaaacccttccaatgcctaagtgtctttctcctgtcgccttgccacggaggaggcttctaattagctggaaaagagtatttttctaatacgttgcaaggattagccaaatcttcttattgaagaaagaagaaaagtgaagagtggttacctatacctagcatagtacaatcagaacctcgtggagaccaccggggacaggcttgcggacgccggctgttcttcccgccacgatctttctgtggtagcggccagcagaagacatggcctgctccccactccctttccccactccttctttattgcacacaggacaccagtcttcaaggaaagggacttttttccagtctgccaatcatattgggaaagtgctagctgtgctcaccttcatggggctgtttccagctcgtccacaagctcatcgattttctttagtagattaccggtgtaaatacccagtgtgcttatgagtcagttagtagacgtcttcattcattggagtaactggtttaggctttccagtttggaaaaggagcagagagctgtccatctggattgatggaagaaaagagaacctcatccatgcctggagaacatctagaaaaccttcagccagcctccagtgctgtcgagagaccaccttcccccgacccggaggcacttccttggggtctttctctagggtctcttctctacaaagcacaacactaatgttcgtttccttagacctcagttcaagtgcccctatttatttcaataagaacgcacatatcccagctgttttttgtttgtcacctctatttagttgttacctgtttctctcttctttcaccccttgtccttttccacccttttaagagttacgctagcagatcttactccacgtatactttttggtttgtgaaggcatcggttaagggcacaaagacagccatggggacatttatgtaaatacgtctctaattgccacactgcagctgaacagtgtgtagtattttcccagtcagctttgccatactgacgtcaatcatttgagagaaattattcagattttatttttgtatctgtggtaacaaaacattaaccaaaagattttctgtccagaagcctccccgaccccccaagctatttgctcacattaacaaattaaagtgcctgaagcataattcattctttacctgtatactaaaaaccctgttgtattgatttttttataataagcctttttacctctgtgtaaaaaatatatatacaagtgtatgatgtacattttagttcttaacttttttttatggtttctaatatgtatgaccaatgtagccattgctttaaaatgtaccgtgtaaatataaacacatcctatcaga

SEQ ID NO: 311521 - DNA, 4487 bp, Homo sapiens
ctctggccgctgggaagacgtcatcgcttccgccctacttcctcctcctgttggcggcggtgagaatccaatatggagtaaatcggtggagtcgagagatggggctcggacggggcgccctgcaccgcctcccaggcgcacctcccccggccgccgaccgctccccggaaccgtgattggcccggccccccgggggcgaccccggactgagcccccccacccgcggccggcgctctcctcctcctcgcagcagtccctgccgctccgaggcgcgcttgtttttctcctgctctcccccaccgccgtccccttcccaaatctcgccccctctgcccgctcccgagcccccggagcctccgcccgcctctccccacggcgctgcggcgttcactccccgcgcagcctgcctttgcaccccttcccccaaaccctatcccgcgccctgcttccccttctgctgcggcgccctcttcatctctagccgccccccctccccaaatcaggcgatctccggagatgtgaagaaggggggcgagcggacaggaagatgaagggagcaaagctgcccgccgcgggacaggcgtctaggtgaacaagaaaatgaccgaagaaacacacccagacgatgacagctatattgtgcgtgtcaaggctgtggttatgaccagagatgactccagcgggggatggttcccacaggaaggaggcgggatcagtcgcgtcggggtctgtaaggtcatgcaccccgaaggcaatggacgaagcggctttctcatccatggtgaacgacagaaagacaaactggtggtattggaatgctatgtaagaaaggacttggtctacaccaaagccaatccaacgtttcatcactggaaggtcgataataggaagtttggacttactttccaaagccctgctgatgcccgagcctttgacaggggagtaaggaaagcaatcgaagaccttatagaaggttcaacaacgtcatcttccaccatccataatgaagctgagcttggcgatgatgacgtttttacaacagctacagacagttcttctaattcctctcagaagagagagcaacctactcggacaatctcctctcccacatcctgtgagcaccggaggatttataccctgggccacctccacgactcataccccacagaccactatcacctcgatcagccgatgccaaggccctaccgccaggtgagcttcccggacgacgacgaggagatcgtgcgcatcaacccccgggagaagatctggatgacggggtacgaggattaccggcacgcacccgtcaggggcaagtacccggacccctcggaggacgcggactcctcctacgtgcgcttcgccaagggcgaggtccccaagcatgactacaactacccctacgtggactcctcagactttggcctaggcgaggaccccaaaggccgcgggggcagcgtgatcaagacgcagccctcccggggcaagtcgcggcggcggaaggaggacggagagcgctcgcggtgcgtgtactgcagggacatgttcaaccacgaggagaaccgccggggccactgccaggacgcccccgactccgtgagaacttgcatccgccgggtgagctgcatgtggtgcgcggacagcatgctctatcactgtatgtcggaccccgagggagactatacagacccttgctcgtgcgatactagcgacgagaagttttgcctccggtggatggctcttattgccttgtctttcctggccccctgtatgtgctgttacctgccccttcgggcctgctaccactgcggagtgatgtgcaggtgctgtggcgggaagcacaaagcggccgcgtgactcagtttccctcccttctccctccatccgcagccacaggggaactcgtctcttacatactctcatcttctcccccgctcccttccactccaaggagcgaggagggcaagcggcctcccagctccctggtacctcgaggcaccattccagccagggacgctgccgggtagactctccactccccctgccgcccacactgcagcagccacatccatacacacacgctcgcacagtgttctgaggaaggaaccttcgccacagactcctgtactattaacaatctgtaaccaagctaactgtctcatccatgtgttgatttcctgtttcctcctcccccgcctcttccagttcaaaggagtctgcaattggaactgctgattttcggtgggttttgtagttgatttttccaagagcgtcgaagactctctttctcttggttcaccttgcctgtcgctagcaagcatctggttcagcggaaatgggatgtgagaatgatgaaacccgacagaagtatctcagcctgcagtcagttattatgtataggaggtgagctagttaacaaacttgtaccacaaaacaatatcgctttaacttttctaaagccaaatttcccatgtaagctgcagtttctatctttagcccatcatcattttctgcccccccaaaatctgttgaaatgattcactgatgcaaaacattcacccgtaatagactgagaattgagccttaacttcagattaacttgtgagaatcaggaaaattccttcaactgcattgcatcctcttggaccagggctagaatggggatttcaggtttctatgagcctccccattacccctaaagtagaacattttttaaattgtgttgccaccacttctaaaaatttagcaatattagaataggatactagtgaagtaagaaattttgcttgttgttttgcaaaccaaatagtttcctcaaacacaaatcagtgttcccacgaacaagttccagttgagaaacactaaggttatggtgaataaaaccatagggagcttcttccccccaacccctggctattttatattaatggggagaggggatttttaaatgtcataaatttgaagagtggtgggttgcattttcttcatgggtttatgttttcgtttcattttggactcaatttcacatcaccaaattcctcatttatacttggggaaaaaacaaggccatatgtaaaaacccttccaatgcctaagtgtctttctcctgcaactccaaacccagactcgccactttgggtgcacaggtggttaggtcagccaactggttctgcctgtcgccttgccacggaggaggcttctaattagctggaaaagagtatttttctaatacgttgcaaggattagccaaatcttcttattgaagaaagaagaaaagtgaagagtggttacctatacctagcatagtacaatcagaacctcgtggagaccaccggggacaggcttgcggacgccggctgttcttcccgccacgatctttctgtggtagcggccagcagaagacatggcctgctccccactccctttccccactccttctttattgcacacaggacaccagtcttcaaggaaagggacttttttccagtctgccaatcatattgggaaagtgctagctgtgctcaccttcatggggctgtttccagctcgtccacaagctcatcgattttctttagtagattaccggtgtaaatacccagtgtgcttatgagtcagttagtagacgtcttcattcattggagtaactggtttaggctttccagtttggaaaaggagcagagagctgtccatctggattgatggaagaaaagagaacctcatccatgcctggagaacatctagaaaaccttcagccagcctccagtgctgtcgagagaccaccttcccccgacccggaggcacttccttggggtctttctctagggtctcttctctacaaagcacaacactaatgttcgtttccttagacctcagttcaagtgcccctatttatttcaataagaacgcacatatcccagctgttttttgtttgtcacctctatttagttgttacctgtttctctcttctttcaccccttgtccttttccacccttttaagagttacgctagcagatcttactccacgtatactttttggtttgtgaaggcatcggttaagggcacaaagacagccatggggacatttatgtaaatacgtctctaattgccacactgcagctgaacagtgtgtagtattttcccagtcagctttgccatactgacgtcaatcatttgagagaaattattcagattttatttttgtatctgtggtaacaaaacattaaccaaaagattttctgtccagaagcctccccgaccccccaagctatttgctcacattaacaaattaaagtgcctgaagcataattcattctttacctgtatactaaaaaccctgttgtattgatttttttataataagcctttttactacaagtgtatgatgtacattttagttcttaacttttttttatggtttctaatatgtatgaccaatgtagccattgctttaaaatgtaccgtgtaaatataaacacatcctatcaga

SEQ ID NO: 311522 - DNA, 1540 bp, Homo sapiens
ctctggccgctgggaagacgtcatcgcttccgccctacttcctcctcctgttggcggcggtgagaatccaatatggagtaaatcggtggagtcgagagatggggctcggacggggcgccctgcaccgcctcccaggcgcacctcccccggccgccgaccgctccccggaaccgtgattggcccggccccccgggggcgaccccggactgagcccccccacccgcggccggcgctctcctcctcctcgcagcagtccctgccgctccgaggcgcgcttgtttttctcctgctctcccccaccgccgtccccttcccaaatctcgccccctctgcccgctcccgagcccccggagcctccgcccgcctctccccacggcgctgcggcgttcactccccgcgcagcctgcctttgcaccccttcccccaaaccctatcccgcgccctgcttccccttctgctgcggcgccctcttcatctctagccgccccccctccccaaatcaggcgatctccggagatgtgaagaaggggggcgagcggacaggaagatgaagggagcaaagctgcccgccgcgggacaggcgtctaggtgaacaagaaaatgaccgaagaaacacacccagacgatgacagctatattgtgcgtgtcaaggctgtggttatgaccagagatgactccagcgggggatggttcccacaggaaggaggcgggatcagtcgcgtcggggtctgtaaggtcatgcaccccgaaggcaatggacgaagcggctttctcatccatggtgaacgacagaaagacaaactggtggtattggaatgctatgtaagaaaggacttggtctacaccaaagccaatccaacgtttcatcactggaaggtcgataataggaagtttggacttactttccaaagccctgctgatgcccgagcctttgacaggggagtaaggaaagcaatcgaagaccttatagaaggttcaacaacgtcatcttccaccatccataatgaagctgagcttggcgatgatgacgtttttacaacagctacagacagttcttctaattcctctcagaagagagagcaacctactcggacaatctcctctcccacatcctgtgagcaccggaggatttataccctgggccacctccacgactcataccccacagaccactatcacctcgatcagccgatgccaaggccctaccgccaggtgagcttcccggacgacgacgaggagatcgtgcgcatcaacccccgggagaagatctggatgacggggtacgaggattaccggcacgcacccgtcaggggcaagtacccggacccctcggaggacgcggactcctcctacgtgcgcttccgcagggggagtcccaagctgactaaaataccctatgtgatctcgatttggctagggaagaaccaaagcggggggcagtatcaaagcactccgggcagtgcggggcaagagaagcaccccggggtttgcggcttcaccccaggaagcggctgcgagcgccctaaaatccggaaaatgg

SEQ ID NO: 311523 - DNA, 1221 bp, Homo sapiens
ctctggccgctgggaagacgtcatcgcttccgccctacttcctcctcctgttggcggcggtgagaatccaatatggagtaaatcggtggagtcgagagatggggctcggacggggcgccctgcaccgcctcccaggcgcacctcccccggccgccgaccgctccccggaaccgtgattggcccggccccccgggggcgaccccggactgagcccccccacccgcggccggcgctctcctcctcctcgcagcagtccctgccgctccgaggcgcgcttgtttttctcctgctctcccccaccgccgtccccttcccaaatctcgccccctctgcccgctcccgagcccccggagcctccgcccgcctctccccacggcgctgcggcgttcactccccgcgcagcctgcctttgcaccccttcccccaaaccctatcccgcgccctgcttccccttctgctgcggcgccctcttcatctctagccgccccccctccccaaatcaggcgatctccggagatgtgaagaaggggggcgagcggacaggaagatgaagggagcaaagctgcccgccgcgggacaggcgtctaggtgaacaagaaaatgaccgaagaaacacacccagacgatgacagctatattgtgcgtgtcaaggctgtggttatgaccagagatgactccagcgggggatggttcccacaggaaggaggcgggatcagtcgcgtcggggtctgtaaggtcatgcaccccgaaggcaatggacgaagcggctttctcatccatggtgaacgacagaaagacaaactggtggtattggaatgctatgtaagaaaggacttggtctacaccaaagccaatccaacgtttcatcactggaaggtcgataataggaagtttggacttactttccaaagccctgctgatgcccgagcctttgacaggggagtaaggaaagcaatcgaagaccttatagaagaagtagagaatggattctggcgggcccagaaggctcctggcctacccactgtcctcctgtaatcagaggcccagggtgtacagctgccactgaaaaggaaagggatctgtgacctctggagccctggttcggtttaggccttggtctatggcagcgagtgcagaagtttgagagattaattgggaacaacagcaggcaaagttaatttagggagcatcctggcaagaatcaattaaagaagagtaaat

SEQ ID NO: 311524 - DNA, 1855 bp, Homo sapiens
gctcatggcaacctctgcctcccaggttcaagcgattgtcctgcctcagtctcctgagtagctgggactacaggtgtgcaccaacatgcccagctaattttttatatttttagtagagacggggtttcaccatgttggccaggatggtctcgatctcttgaccttgtgttccacccgtcttggcctcccaaagcgctggaattacaggcatgagccaccgcgcctggcctgtatatgtgatttctaaaaaatagatgcatgcatatgttaacattgaatagtcaatcactagatgaagatgctctctaccatggtttagattgcaagtgtactttataccattgtttcaacttcaacctttatttttgtatatattttttcaactacttaaactgttcatgaataggcgtactttctgtatttaaaaatggcccctcaagcaccgttaatttacattccagttatttacatgataattcatgacattctgaaacttgcctgtatattatctgaaaaatggatttcttgaggaaaagatctgtttattgtatgtaaggaaaaattttacctgaaaacaaacaaacaaaccctaaaactcagcaccactaccatttccagaagcttttttagcaagtgaatattttttacataatggataataaatggtatttattcatcatgattttctaagtaatgcttatcagccccttcagtggtgttattctaacaaaatgaatacattacaaattattaagttagcttttcagagttttaatatagaagttactagcactgacacactgattttgaaatgtttcaaaatgagtagatacgattagatcctttaccttttaatatctagtttttccaaaaatgatagtaatatcttttgaagaactatgctttttcaaaagcaaaatcaactctgtataatagcacattctctactttttaaagatcagaaatgctagaattcttgacttttgtgtatgggtagtaaatctagctcactgaaaatcagagtgaaacgcctttacatttgtgcggatagagaagttaactctccctcatatgtcactgtgctaccataatccctacattttctgtctgttctagtctaagaatattgttatagatggaagttaggaccattagcccacagatgcgtgtattctctcagacataccggtgtagatgccatatttctgatgtcttcttaatgtctgtgaaagcaactggcatctacaataaatcacacttagaactggttagaggactccctcacttttgttgtccatgtggttcccttccgtggaccagccgtaataaagagccaaggtagtgatggtggccacgtgcctcgttgctatttttaaagtaatattcagatgtggttttaaatttagattatgtattccttttgaaacataagaaaaacatttaaacctatgctgaaaatacgataaaagaaaaacaactccaatatgctaaaagttaaatatggtatttaagaaaatagtcatgtatgcaattgagaaagtctataatttattttacagaaaagctggaagattatgactagatatggaaatattttttctgaatttttttttatatttcctccgacttacctctttttgaaaagagagtttttattaaatgaaccatcatgatattggctgaaaagttctacattctattattgtattgtaacacacatgtattgatgattttcattaagagtttcagattaactttgaaaaatattccacatggtaatcttataaattctgtttaattacatctgtaaatattatgtgtgtgatagtattcaataaagtaaaatcaaattgtc

SEQ ID NO: 311525 - DNA, 1553 bp, Homo sapiens
ctcgggtgctccgccctccccgcaggcggcgtgcggctgcatagcctgagaatcccggtggtgagcggggatggcggttgtagcggcggctgccggctggctactcaggctcagggcggcaggggctgaggggcactggcgtcggcttcctggcgcggggctggcgcggggctttttgcaccccgccgcgactgtcgaggatgcggcccagaggcggcaggtggctcattttactttccagccagatccggagccccgggagtacgggcaaactcagaaaatgaatcttttccagtctgtaacaagtgccttggataactcattggccaaagatcctactgcagtaatatttggtgaagatgttgcctttggtggagtctttagatgcactgttggcttgcgagacaaatatggaaaagatagagtttttaataccccattgtgtgaacaaggaattgttggatttggaatcggaattgcggtcactggagctactgccattgcggaaattcagtttgcagattatattttccctgcatttgatcagattgttaatgaagctgccaagtatcgctatcgctctggggatctttttaactgtggaagcctcactatccggtccccttggggctgtgttggtcatggggctctctatcattctcagagtcctgaagcattttttgcccattgcccaggaatcaaggtggttatacccagaagccctttccaggccaaaggacttcttttgtcatgcatagaggataaaaatccttgtatattttttgaacctaaaatactttacagggcagcagcggaagaagtccctatagaaccatacaacatcccactgtcccaggccgaagtcatacaggaagggagtgatgttactctagttgcctggggcactcaggttcatgtgatccgagaggtagcttccatggcaaaagaaaagcttggagtgtcttgtgaagtcattgatctgaggactataataccttgggatgtggacacaatttgtaagtctgtgatcaaaacagggcgactgctaatcagtcacgaggctcccttgacaggcggctttgcatcggaaatcagctctacagttcaggaggaatgtttcttgaacctagaggctcctatatcaagagtatgtggttatgacacaccatttcctcacatttttgaaccattctacatcccagacaaatggaagtgttatgatgcccttcgaaaaatgatcaactattgaccatatagaaaagctggaagattatgactagatatggaaatattttttctgaatttttttttatatttcctccgacttacctctttttgaaaagagagtttttattaaatgaaccatcatgatattggctgaaaagttctacattctattattgtattgtaacacacatgtattgatgattttcattaagagtttcagattaactttgaaaaatattccacatggtaatcttataaattctgtttaattacatctgtaaatattatgtgtgtgatagtattcaataaagtaaaatcaaattgtc

SEQ ID NO: 311526 - DNA, 1576 bp, Homo sapiens
ctcgggtgctccgccctccccgcaggcggcgtgcggctgcatagcctgagaatcccggtggtgagcggggatggcggttgtagcggcggctgccggctggctactcaggctcagggcggcaggggctgaggggcactggcgtcggcttcctggcgcggggctggcgcggggctttttgcaccccgccgcgactgtcgaggatgcggcccagaggcggcaggtggctcattttactttccagccagatccggagccccgggagtacgggcaaactcagaaaatgaatcttttccagtctgtaacaagtgccttggataactcattggccaaagatcctactgcagtaatatttggtgaagatgttgcctttggtggagtctttagatgcactgttggcttgcgagacaaatatggaaaagatagagtttttaataccccattgtgtgaacaaggaattgttggatttggaatcggaattgcggtcactggagctactgccattgcggaaattcagtttgcagattatattttccctgcatttgatcagattgttaatgaagctgccaagtatcgctatcgctctggggatctttttaactgtggaagcctcactatccggtccccttggggctgtgttggtcatggggctctctatcattctcagagtcctgaagcattttttgcccattgcccaggaatcaaggtggttatacccagaagccctttccaggccaaaggacttcttttgtcatgcatagaggataaaaatccttgtatattttttgaacctaaaatactttacagggcagcagcggaagaagtccctatagaaccatacaacatcccactgtcccaggccgaagtcatacaggaagggagtgatgttactctagttgcctggggcactcaggttcatgtgatccgagaggtagcttccatggcaaaagaaaagcttggagtgtcttgtgaagtcattgatctgaggactataataccttgggatgtggacacaatttgtaagtctgtgatcaaaacagggcgactgctaatcagtcacgaggctcccttgacaggcggctttgcatcggaaatcagctctacagttcaggaggaatgtttcttgaacctagaggctcctatatcaagagtatgtggttatgacacaccatttcctcacatttttgaaccattctacatcccagacaaatggaagtgttatgatgcccttcgaaaaatgatcaactattgaccatataggtaggtatgcatcttgagaaagctactatgtgcccctgacattaacgtactgttaaccaagacacagcaatcatcagtgttttgatggtaacaaactttgatggtaaagttgataaaaggcaactttcagaagaaaataatgtgctttagaaaaaaaattcaaatttatagtagtatatttacatttttgttgttgttgttgttctgagatggagtctcactctgtcgcccaggctagactgcagtggtgcaatctcagctcactgcaacctcccccctacccctgagttcaagcgattctcctgcctcagcctgctga

SEQ ID NO: 311527 - DNA, 766 bp, Homo sapiens
ctcgggtgctccgccctccccgcaggcggcgtgcggctgcatagcctgagaatcccggtggtgagcggggatggcggttgtagcggcggctgccggctggctactcaggctcagggcggcaggggctgaggggcactggcgtcggcttcctggcgcggggctggcgcggggctttttgcaccccgccgcgactgtcgaggatgcggcccagaggcggcaggtggctcattttactttccagccagatccggagccccgggagtacgggcaaactcagaaaatgaatcttttccagtctgtaacaagtgccttggataactcattggccaaagatcctactgcagtaatatttggtgaagatgttgcctttggtggagtctttagatgcactgttggcttgcgagacaaatatggaaaagatagagtttttaataccccattgtgtgaacaaggaattgttggatttggaatcggaattgcggtcactggagctactgccattgcggaaattcagtttgcagattatattttccctgcatttgatcagattgttaatgaagctgccaagtatcgctatcgctctggggatctttttaactgtggaagcctcactatccggtccccttggggctgtgttggtcatggggctctctatcattctcagagtcctgaagcattttttgcccattgcccaggaatcaagatcaaagttataagcttatcttagttgagtagatgttgcctgatttttgaatgtgagctagaa

SEQ ID NO: 311528 - DNA, 472 bp, Homo sapiens
tcttgaagttaagcatcctgactctgtctgcaggaggaatgtttcttgaacctagaggctcctatatcaagagtatgtggttatgacacaccatttcctcacatttttgaaccattctacatcccagacaaatggaagtgttatgatgcccttcgaaaaatgatcaactattgaccatatagaaaagctggaagattatgactagatatggaaatattttttctgaatttttttttatatttcctccgacttacctctttttgaaaagagagtttttattaaatgaaccatcatgatattggctgaaaagttctacattctattattgtattgtaacacacatgtattgatgattttcattaagagtttcagattaactttgaaaatttaaaggctaccttattgtacgattaaagtgtattatacacacttgtggagaggttaatagaaatcactatttttttttcaagaa

SEQ ID NO: 311529 - DNA, 300 bp, Homo sapiens
attgtctacacgcatttagtcacttggttatattccttcttcctgttttatacttttacaaaaaattgtttaatatgggtaaattttgccccattaacaagcttctccagggcaaactcagaaaatgaatcttttccagtctgtaacaagtgccttggataactcattggccaaagatcctactgcagtaatatttggtgaagatgttgcctttggtggagtctttagatgcactgttggcttgcgagacaaatatgtccctggcaagaacccattctactttctatctctatgaatttg

SEQ ID NO: 311530 - DNA, 2083 bp, Homo sapiens
  misc_feature (1617)..(1618): n is a, c, g, or t
  misc_feature (1624)..(1624): n is a, c, g, or t
  misc_feature (1627)..(1627): n is a, c, g, or t
  misc_feature (1633)..(1633): n is a, c, g, or t
ctcgggtgctccgccctccccgcaggcggcgtgcggctgcatagcctgagaatcccggtggtgagcggggatggcggttgtagcggcggctgccggctggctactcaggctcagggcggcaggggctgaggggcactggcgtcggcttcctggcgcggggctggcgcggggctttttgcaccccgccgcgactgtcgaggatgcggcccagaggcggcaggtggctcattttactttccagccagatccggagccccgggagtacgggcaaactcagaaaatgaatcttttccagtctgtaacaagtgccttggataactcattggccaaagatcctactgcagtaatatttggtgaagatgttgcctttggtggagtctttagatgcactgttggcttgcgagacaaatatggaaaagatagagtttttaataccccattgtgtgaacaaggaattgttggatttggaatcggaattgcggtcactggagctactgccattgcggaaattcagtttgcagattatattttccctgcatttgatcagattgttaatgaagctgccaagtatcgctatcgctctggggatctttttaactgtggaagcctcactatccggtccccttggggctgtgttggtcatggggctctctatcattctcagagtcctgaagcattttttgcccattgcccaggaatcaaggtggttatacccagaagccctttccaggccaaaggacttcttttgtcatgcatagaggataaaaatccttgtatattttttgaacctaaaatactttacagggcagcagcggaagaagtccctatagaaccatacaacatcccactgtcccaggccgaagtcatacaggaagggagtgatgttactctagttgcctggggcactcaggttcatgtgatccgagaggtagcttccatggcaaaagaaaagcttggagtgtcttgtgaagtcattgatctgaggactataataccttgggatgtggacacaatttgtaagtctgtgatcaaaacagggcgactgctaatcagtcacgaggctcccttgacaggcggctttgcatcggaaatcagctctacagttcaggaggaatgtttcttgaacctagaggctcctatatcaagagtatgtggttatgacacaccatttcctcacatttttgaaccattctacatcccagacaaatggaagtgttatgatgcccttcgaaaaatgatcaactattgaccatatagaaaagctggaagattatgactagatatggaaatattttttctgaatttttttttatatttcctccgacttacctctttttgaaaagagagtttttattaaatgaaccatcatgatattggctgaaaagttctacattctattattgtattgtaacacacatgtattgatgattttcattaagagtttcagattaactttgaaaaatattccacatggtaatcttataaattctgtttaattacatctgtaaatattatgtgtgtgatagtattcaataaagtaaaatcaaattgtcaaaaaaaaaaaaaaaaaaaaaaaaaaaaaaaaaaaaaaaaaaaaaaaaaaaaaaaaaaaaaaannaaaaanaanaaaaanaaaaaaacatgcggcccaatttagccctacctccctctattctgcgcccacagttagcccgcgcgccccatttattgacgcttcctttttacaaatggcccctattgggggagcccctttccattcccaccttcgtcgttttaacaccaaacggcccttttaaaccccttggggaccccaaattaaaccccctccgaccccccctcctttagcggtcggccttaatgaggttgccccccccaagcggccttctcacgttgggccccccctaattttctgtgaaaacatgcaacccttaatccattggacaatttgcggttaattcttttctttacccccaattgttttcaccaataggcggatctgggaatcacccttttaccaccagaccccttctcccggatctgggctctgcggcgtccacctgtttgaacctcttatacgggcaag

SEQ ID NO: 311531 - DNA, 2385 bp, Homo sapiens
  misc_feature (1919)..(1920): n is a, c, g, or t
  misc_feature (1926)..(1926): n is a, c, g, or t
  misc_feature (1929)..(1929): n is a, c, g, or t
  misc_feature (1935)..(1935): n is a, c, g, or t
gctcatggcaacctctgcctcccaggttcaagcgattgtcctgcctcagtctcctgagtagctgggactacaggtgtgcaccaacatgcccagctaattttttatatttttagtagagacggggtttcaccatgttggccaggatggtctcgatctcttgaccttgtgttccacccgtcttggcctcccaaagcgctggaattacaggcatgagccaccgcgcctggcctgtatatgtgatttctaaaaaatagatgcatgcatatgttaacattgaatagtcaatcactagatgaagatgctctctaccatggtttagattgcaagtgtactttataccattgtttcaacttcaacctttatttttgtatatattttttcaactacttaaactgttcatgaataggcgtactttctgtatttaaaaatggcccctcaagcaccgttaatttacattccagttatttacatgataattcatgacattctgaaacttgcctgtatattatctgaaaaatggatttcttgaggaaaagatctgtttattgtatgtaaggaaaaattttacctgaaaacaaacaaacaaaccctaaaactcagcaccactaccatttccagaagcttttttagcaagtgaatattttttacataatggataataaatggtatttattcatcatgattttctaagtaatgcttatcagccccttcagtggtgttattctaacaaaatgaatacattacaaattattaagttagcttttcagagttttaatatagaagttactagcactgacacactgattttgaaatgtttcaaaatgagtagatacgattagatcctttaccttttaatatctagtttttccaaaaatgatagtaatatcttttgaagaactatgctttttcaaaagcaaaatcaactctgtataatagcacattctctactttttaaagatcagaaatgctagaattcttgacttttgtgtatgggtagtaaatctagctcactgaaaatcagagtgaaacgcctttacatttgtgcggatagagaagttaactctccctcatatgtcactgtgctaccataatccctacattttctgtctgttctagtctaagaatattgttatagatggaagttaggaccattagcccacagatgcgtgtattctctcagacataccggtgtagatgccatatttctgatgtcttcttaatgtctgtgaaagcaactggcatctacaataaatcacacttagaactggttagaggactccctcacttttgttgtccatgtggttcccttccgtggaccagccgtaataaagagccaaggtagtgatggtggccacgtgcctcgttgctatttttaaagtaatattcagatgtggttttaaatttagattatgtattccttttgaaacataagaaaaacatttaaacctatgctgaaaatacgataaaagaaaaacaactccaatatgctaaaagttaaatatggtatttaagaaaatagtcatgtatgcaattgagaaagtctataatttattttacagaaaagctggaagattatgactagatatggaaatattttttctgaatttttttttatatttcctccgacttacctctttttgaaaagagagtttttattaaatgaaccatcatgatattggctgaaaagttctacattctattattgtattgtaacacacatgtattgatgattttcattaagagtttcagattaactttgaaaaatattccacatggtaatcttataaattctgtttaattacatctgtaaatattatgtgtgtgatagtattcaataaagtaaaatcaaattgtcaaaaaaaaaaaaaaaaaaaaaaaaaaaaaaaaaaaaaaaaaaaaaaaaaaaaaaaaaaaaaaannaaaaanaanaaaaanaaaaaaacatgcggcccaatttagccctacctccctctattctgcgcccacagttagcccgcgcgccccatttattgacgcttcctttttacaaatggcccctattgggggagcccctttccattcccaccttcgtcgttttaacaccaaacggcccttttaaaccccttggggaccccaaattaaaccccctccgaccccccctcctttagcggtcggccttaatgaggttgccccccccaagcggccttctcacgttgggccccccctaattttctgtgaaaacatgcaacccttaatccattggacaatttgcggttaattcttttctttacccccaattgttttcaccaataggcggatctgggaatcacccttttaccaccagaccccttctcccggatctgggctctgcggcgtccacctgtttgaacctcttatacgggcaag

SEQ ID NO: 311532 - DNA, 1587 bp, Homo sapiens
ctcgggtgctccgccctccccgcaggcggcgtgcggctgcatagcctgagaatcccggtggtgagcggggatggcggttgtagcggcggctgccggctggctactcaggctcagggcggcaggggctgaggggcactggcgtcggcttcctggcgcggggctggcgcggggctttttgcaccccgccgcgactgtcgaggatgcggcccagaggcggcaggtggctcattttactttccagccagatccggagccccgggagtacgggcaaactcagaaaatgaatcttttccagtctgtaacaagtgccttggataactcattggccaaagatcctactgcagtaatatttggtgaagatgttgcctttggtggagtctttagatgcactgttggcttgcgagacaaatatggaaaagatagagtttttaataccccattgtgtgaacaaggaattgttggatttggaatcggaattgcggtcactggagctactgccattgcggaaattcagtttgcagattatattttccctgcatttgatcagattgttaatgaagctgccaagtatcgctatcgctctggggatctttttaactgtggaagcctcactatccggtccccttggggctgtgttggtcatggggctctctatcattctcagagtcctgaagcattttttgcccattgcccaggaatcaaggtggttatacccagaagccctttccaggccaaaggacttcttttgtcatgcatagaggataaaaatccttgtatattttttgaacctaaaatactttacagggcagcagcggaagaagtccctatagaaccatacaacatcccactgtcccaggccgaagtcatacaggaagggagtgatgttactctagttgcctggggcactcaggttcatgtgatccgagaggtagcttccatggcaaaagaaaagcttggagtgtcttgtgaagtcattgatctgaggactataataccttgggatgtggacacaatttgtaagtctgtgatcaaaacagggcgactgctaatcagtcacgaggctcccttgacaggcggctttgcatcggaaatcagctctacagttcaggaggaatgtttcttgaacctagaggctcctatatcaagagtatgtggttatgacacaccatttcctcacatttttgaaccattctacatcccagacaaatggaagtgttatgatgcccttcgaaaaatgatcaactattgaccatatagaaaagctggaagattatgactagatatggaaatattttttctgaatttttttttatatttcctccgacttacctctttttgaaaagagagtttttattaaatgaaccatcatgatattggctgaaaagttctacagagaaataaatatcataaagaaaaaacagtcacaagttctggaaatgaaagacacactaagagaaataaaaaatacactggaaagtttcaacaatagactataacaagtagaagaaagaacttcagagctcaaagacaaggcttacaaattaaccgaaagacaaagaaaaatgaacaaagccttggggtaccgag

SEQ ID NO: 311533 - DNA, 1468 bp, Homo sapiens
ctcgggtgctccgccctccccgcaggcggcgtgcggctgcatagcctgagaatcccggtggtgagcggggatggcggttgtagcggcggctgccggctggctactcaggctcagggcggcaggggctgaggggcactggcgtcggcttcctggcgcggggctggcgcggggctttttgcaccccgccgcgactgtcgaggatgcggcccagaggcggcaggtggctcattttactttccagccagatccggagccccgggagtacgggcaaactcagaaaatgaatcttttccagtctgtaacaagtgccttggataactcattggccaaagatcctactgcagtaatatttggtgaagatgttgcctttggtggagtctttagatgcactgttggcttgcgagacaaatatggaaaagatagagtttttaataccccattgtgtgaacaaggaattgttggatttggaatcggaattgcggtcactggagctactgccattgcggaaattcagtttgcagattatattttccctgcatttgatcagattgttaatgaagctgccaagtatcgctatcgctctggggatctttttaactgtggaagcctcactatccggtccccttggggctgtgttggtcatggggctctctatcattctcagagtcctgaagcattttttgcccattgcccaggaatcaaggtggttatacccagaagccctttccaggccaaaggacttcttttgtcatgcatagaggataaaaatccttgtatattttttgaacctaaaatactttacagggcagcagcggaagaagtccctatagaaccatacaacatcccactgtcccaggccgaagtcatacaggaagggagtgatgttactctagttgcctggggcactcaggttcatgtgatccgagaggtagcttccatggcaaaagaaaagcttggagtgtcttgtgaagtcattgatctgaggactataataccttgggatgtggacacaatttgtaagtctgtgatcaaaacagggcgactgctaatcagtcacgaggctcccttgacaggcggctttgcatcggaaatcagctctacagttcagcaactggaagacactggtgactgatgaaaacagaagggtggccaggaagccagacaacatttagactggctcatagacccgaagagacttcttgcccttgttcccagatgacccttcggcactcggaacttaggggtcaactgttcgggacatgacgttacagaccttttggcaaagaactgcttgggaacggcactcgcctggtgcgtcgcacacttgttcacgcacccactgaccaattccgcaccgcgctttggcgcgttggaaccaacctactgcgcattcggcatgtgtacccccatccaccaatcctccctcttgcgcaatactacgtcaccctcaattccccccactttcctg

SEQ ID NO: 311534 - DNA, 1858 bp, Homo sapiens
  misc_feature (1617)..(1618): n is a, c, g, or t
  misc_feature (1624)..(1624): n is a, c, g, or t
  misc_feature (1627)..(1627): n is a, c, g, or t
  misc_feature (1633)..(1633): n is a, c, g, or t
ctcgggtgctccgccctccccgcaggcggcgtgcggctgcatagcctgagaatcccggtggtgagcggggatggcggttgtagcggcggctgccggctggctactcaggctcagggcggcaggggctgaggggcactggcgtcggcttcctggcgcggggctggcgcggggctttttgcaccccgccgcgactgtcgaggatgcggcccagaggcggcaggtggctcattttactttccagccagatccggagccccgggagtacgggcaaactcagaaaatgaatcttttccagtctgtaacaagtgccttggataactcattggccaaagatcctactgcagtaatatttggtgaagatgttgcctttggtggagtctttagatgcactgttggcttgcgagacaaatatggaaaagatagagtttttaataccccattgtgtgaacaaggaattgttggatttggaatcggaattgcggtcactggagctactgccattgcggaaattcagtttgcagattatattttccctgcatttgatcagattgttaatgaagctgccaagtatcgctatcgctctggggatctttttaactgtggaagcctcactatccggtccccttggggctgtgttggtcatggggctctctatcattctcagagtcctgaagcattttttgcccattgcccaggaatcaaggtggttatacccagaagccctttccaggccaaaggacttcttttgtcatgcatagaggataaaaatccttgtatattttttgaacctaaaatactttacagggcagcagcggaagaagtccctatagaaccatacaacatcccactgtcccaggccgaagtcatacaggaagggagtgatgttactctagttgcctggggcactcaggttcatgtgatccgagaggtagcttccatggcaaaagaaaagcttggagtgtcttgtgaagtcattgatctgaggactataataccttgggatgtggacacaatttgtaagtctgtgatcaaaacagggcgactgctaatcagtcacgaggctcccttgacaggcggctttgcatcggaaatcagctctacagttcaggaggaatgtttcttgaacctagaggctcctatatcaagagtatgtggttatgacacaccatttcctcacatttttgaaccattctacatcccagacaaatggaagtgttatgatgcccttcgaaaaatgatcaactattgaccatatagaaaagctggaagattatgactagatatggaaatattttttctgaatttttttttatatttcctccgacttacctctttttgaaaagagagtttttattaaatgaaccatcatgatattggctgaaaagttctacattctattattgtattgtaacacacatgtattgatgattttcattaagagtttcagattaactttgaaaaatattccacatggtaatcttataaattctgtttaattacatctgtaaatattatgtgtgtgatagtattcaataaagtaaaatcaaattgtcaaaaaaaaaaaaaaaaaaaaaaaaaaaaaaaaaaaaaaaaaaaaaaaaaaaaaaaaaaaaaaannaaaaanaanaaaaanaaaaaaaaatttagaaaaaaaaaaattaaataaatgagacaataatataaggctaattggacaaataaagcccaataataagccgttttacatttcattggccgaccttttaaaacctcgagactgtaaaaaccgtggcgtgacccaatttaatcgctttgtatcctattgccgtttggccagctaacgtattatccaatagttccaaaaccgttcgcctttcaa

SEQ ID NO: 311535 - DNA, 1785 bp, Homo sapiens
aaatctttaatcttggtccttaaaagaaactaaaataaaatcgtaaagtagttctgataagtccttgccataaattattgcttttgtaaacgcacataaaggactctgaactgttgctactcataacatttctgacgccaaatgtgtggggttttgccataccaacaaccagttctctaactctccagacaccaactgggggccttacaattcagtgcagttctgacactcaccacctggagttagcacagactccacagggatgagggttcagtcccacgagtctgcccttgctgcagatgcgagtagcaggtatggggtgcccacacttctgtctgacttgcctgaaaggttgagagtttgttgccaggccccttgctttcaggtctgataacttgctaggttattaaacctgaaacttgataacttctgtagatgttgaaattagaacggcctcactcacctgggctcacaaaattccagaaagtagttgacgtcctattactggtttaccgtgaaggctctatgtccagagtggacaggacaagtggaagagtggcacagggcgaggtgtggggggtggcgtggagctccttttcaggagtctctaagaaggtgggactccagcggcaatgccttgtccatgtgctaagccagccgagggcgcacgaagtgctgtgtggtgtccaagctgacttgggagggaccagtttggggccagccccccagcctcacttgtcatgtcccacctctgctggcatctgtgggcttaaagtgccttcactcccatccttttcaactatttcttgattaaaaaaaaaaaaacaaaaaactgttgaatagtaggagactctctctctcattggtatttgtgggaataaatattaaataaacactttctaataggtgttaccaggacgcctaaggaaattatctcacagagttttcaacactgtgaaaagagaagctgactgccagggagagatccctttttcctagtccttgtgaacatgtgctggacagccaggagtggcactgtggcaagaaacacccgttctctggcattagtaagagggatatagccaagggtatctgtataccagtgttaggcccatacatccataaaacattgatgtgagagctttagggcacagctgaccctaagcctaacgtgatcattaatgtcatgaaaattggagaattggtcaggcgcggtggctcacacctgtaatcccagcacgttgggaggccgaggtggatagatcacttgaggtcaggagttcaagaccaacctgggcaacatggtgaaaccccgtctcaaaagaaaaaaaagaaaagaaaattggagaatttataacgtctgatgtgacctgttctttaggtgttgaaattagaacggcctcactcacctgggacattcttcagctcatgccctgtacctggcttacagttgctcagtgaaatgctttcttgattgtagcatggtgggatttttataaatccaaatgacttagaggtaggtgtcacatttttagcagctaaaatcatactaatcgtaaagctcagattcctgtaagtagggcgctgagcacaggctgcatcctggatatatgaatagatgaaccagatcgtgtacatgtgggacacgttctttgtcctttgggactttcttttgcttggatgttggtagtaaccatgtaagttcgggcagctttctagaaactttccttgttgtgcaacattatgcaataaatgcactgcttaggatcatctgcgcagggtttg

SEQ ID NO: 311536 - DNA, 3682 bp, Homo sapiens
tgtaccaaaccttccggctggaaagcccagtggccggcgccgaggctcgtggcgtcacgccccccccgccagggctgtacctccgtctccctggtcctgctgctcacaggacagacggctcgctcccctcttccagcagctgctcttacaggcactgatgatttcgctgggaagtgtggcgggcagctttgcctaagcgtggatggctcctcggcaattccagcctaagtgaaggcgctcaggagcctcctgctggaacgcgacccatctctcccaggaccccggggatcttaaggtcattgagaaatactgttggatcagggttttgttcttccacactgtaggtgaccccttggaataacggcctctcctctcgtgcacatacctaccggtttccacaactggatttctacagatcattcagctggttataagggttttgtttaaactgtccgagttactgatgtcattttgtttttgttttatgtaggtagcttttaagtagaaaacactaacagtgtagtgcccatcatagcaaatgcttcagaaacacctcaataaaagagaaaacttggcttgtgtgatggtgcagtcattttactggaccaacccacccaccttgactataccaaggcatcatctatccacagttctagcctaacttcatgctgatttctctgcctcttgatttttctctgtgtgttccaaataatcttaagctgagttgtggcattttccatgcaacctccttctgccagcagctcacactgcttgaagtcatatgaaccactgaggcacatcatggaattgatgtgagcattaagacgttctcccacacagcccttccctgaggcagcaggagctggtgtgtactggagacactgttgaacttgatcaagacccagaccaccccaggtctccttcgtgggatgtcatgacgtttgacatacctttggaacgagcctcctccttggaagatggaagaccgtgttcgtggccgacctggcctctcctggcctgtttcttaagatgcggagtcacatttcaatggtacgaaaagtggcttcgtaaaatagaagagcagtcactgtggaactaccaaatggcgagatgctcggtgcacattggggtgctttgggataaaagatttatgagccaactattctctggcaccagattctaggccagtttgttccactgaagcttttcccacagcagtccacctctgcaggctggcagccgaatggcttgccagtggctctgtggcaagatcacactgagatcgatgggtgagaaggctaggatgcttgtctagtgttcttagctgtcacgttggctccttccagggtggccagacggtgttggccactcccttctaaaacacaggcgccctcctggtgacagtgacccgccgtggtatgccttggcccattccagcagtcccagttatgcatttcaagtttggggtttgttcttttcgttaatgttcctctgtgttgtcagctgtcttcatttcctgggctaagcagcattgggagatgtggaccagagatccactccttaagaaccagtggcgaaagacactttctttcttcactctgaagtagctggtggtacaaatgagaacttcaagagaggatgttatttagactgaacctctgttgccagagatgctgaagatacagaccttggacaggtcagagggtttcatttttggccttcatcttagatgactggttgcgtcatttggagaagtgagtgctccttgatggtggaatgaccgggtggtgggtacagaaccattgtcacagggatcctggcacagagaagagttacgagcagcagggtgcagggcttggaaggaatgtgggcaaggttttgaacttgattgttcttgaagctatcagaccacatcgaggctcagcagtcatccgtgggcatttggtttcaacaaagaaacctaacatcctactctggaaactgatctcggagttaaggcgaattgttcaagaacacaaactacatcgcactcgtcagttgtcagttctggggcatgactttagcgttttgtttctgcgagaacataacgatcactcatttttatgtcccacgtgtgtgtgtccgcatctttctggtcaacattgttttaactagtcactcattagcgttttcaatagggctcttaagtccagtagattacgggtagtcagttgacgaagatctggtttacaagaactaattaaatgtttcattgcatttttgtaagaacagaataattttataaaatgtttgtagtttataattgccgaaaataatttaaagacactttttttttctctgtgtgtgcaaatgtgtgtttgtgatccattttttttttttttttaggacacctgtttactagctagctttacaatatgccaaaaaaggatttctccctgaccccatccgtggttcaccctcttttccccccatgctttttgccctagtttataacaaaggaatgatgatgatttaaaaagtagttctgtatcttcagtatcttggtcttccagaaccctctggttgggaaggggatcattttttactggtcatttccctttggagtgtagctactttaacagatggaaagaacctcattggccatggaaacagccgaggtgttggagcccagcagtgcatggcaccgttcggcatctggcttgattggtctggctgccgtcattgtcagcacagtgccatggacatgggaagacttgactgcacagccaatggttttcatgatgattacagcatacacagtgatcacataaacgatgacagctatggggcacacaggccatttgcttacatgcctcgtatcatgattgattactgctttgttagaacacagaagagaccctattttatttaaggcagaaccccgaagatacgtatttccaatacagaaaagaatttttaataaaaactataacatacacaaaaattggttttaaagttgactccacttcctctaactccagtggattgttggccatgtctccccaactccacaatatctctatcatgggaaacacctggggtttttgcgctacataggagaaagatctggaaactatttgggttttgttttcaacttttcatttggatgtttggcgttgcacacacacatccaccggtggaagagacgcccggtgaaaacacctgtctgctttctaagccagtgaggttgaggtgagaggtttgccagagtttgtctacctctgggtatccctttgtctgggataaaaaaaatcaaaccagaaggcgggatggaatggatgcaccgcaaataatgcattttctgagttttcttgttaaaaaaaaatttttttaagtaagaaaaaaaaaggtaataacatggccaatttgttacataaaatgactttctgtgtataaattattcctaaaaaatcctgtttatataaaaaatcagtagatgaaaaaaatttcaaaatgtttttgtatattctgttgtaagaatttattcctgttattgcgatatactctggattctttacataatggaaaaaagaaactgtctattttgaatggctgaagctaaggcaacgttagtttctcttactctgcttttttctagtaaagtactacatggtttaagttaaataaaataattctgtatgca

SEQ ID NO: 311537 - DNA, 3621 bp, Homo sapiens
gtccctgatagaacacacgcaggagcagagtcccctccccctccaggctgccctctcaactttcccctcttccagcagctgctcttacaggcactgatgatttcgctgggaagtgtggcgggcagctttgcctaagcgtggatggctcctcggcaattccagcctaagtgaaggcgctcaggagcctcctgctggaacgcgacccatctctcccaggaccccggggatcttaaggtcattgagaaatactgttggatcagggttttgttcttccacactgtaggtgaccccttggaataacggcctctcctctcgtgcacatacctaccggtttccacaactggatttctacagatcattcagctggttataagggttttgtttaaactgtccgagttactgatgtcattttgtttttgttttatgtaggtagcttttaagtagaaaacactaacagtgtagtgcccatcatagcaaatgcttcagaaacacctcaataaaagagaaaacttggcttgtgtgatggtgcagtcattttactggaccaacccacccaccttgactataccaaggcatcatctatccacagttctagcctaacttcatgctgatttctctgcctcttgatttttctctgtgtgttccaaataatcttaagctgagttgtggcattttccatgcaacctccttctgccagcagctcacactgcttgaagtcatatgaaccactgaggcacatcatggaattgatgtgagcattaagacgttctcccacacagcccttccctgaggcagcaggagctggtgtgtactggagacactgttgaacttgatcaagacccagaccaccccaggtctccttcgtgggatgtcatgacgtttgacatacctttggaacgagcctcctccttggaagatggaagaccgtgttcgtggccgacctggcctctcctggcctgtttcttaagatgcggagtcacatttcaatggtacgaaaagtggcttcgtaaaatagaagagcagtcactgtggaactaccaaatggcgagatgctcggtgcacattggggtgctttgggataaaagatttatgagccaactattctctggcaccagattctaggccagtttgttccactgaagcttttcccacagcagtccacctctgcaggctggcagccgaatggcttgccagtggctctgtggcaagatcacactgagatcgatgggtgagaaggctaggatgcttgtctagtgttcttagctgtcacgttggctccttccagggtggccagacggtgttggccactcccttctaaaacacaggcgccctcctggtgacagtgacccgccgtggtatgccttggcccattccagcagtcccagttatgcatttcaagtttggggtttgttcttttcgttaatgttcctctgtgttgtcagctgtcttcatttcctgggctaagcagcattgggagatgtggaccagagatccactccttaagaaccagtggcgaaagacactttctttcttcactctgaagtagctggtggtacaaatgagaacttcaagagaggatgttatttagactgaacctctgttgccagagatgctgaagatacagaccttggacaggtcagagggtttcatttttggccttcatcttagatgactggttgcgtcatttggagaagtgagtgctccttgatggtggaatgaccgggtggtgggtacagaaccattgtcacagggatcctggcacagagaagagttacgagcagcagggtgcagggcttggaaggaatgtgggcaaggttttgaacttgattgttcttgaagctatcagaccacatcgaggctcagcagtcatccgtgggcatttggtttcaacaaagaaacctaacatcctactctggaaactgatctcggagttaaggcgaattgttcaagaacacaaactacatcgcactcgtcagttgtcagttctggggcatgactttagcgttttgtttctgcgagaacataacgatcactcatttttatgtcccacgtgtgtgtgtccgcatctttctggtcaacattgttttaactagtcactcattagcgttttcaatagggctcttaagtccagtagattacgggtagtcagttgacgaagatctggtttacaagaactaattaaatgtttcattgcatttttgtaagaacagaataattttataaaatgtttgtagtttataattgccgaaaataatttaaagacactttttttttctctgtgtgtgcaaatgtgtgtttgtgatccattttttttttttttttaggacacctgtttactagctagctttacaatatgccaaaaaaggatttctccctgaccccatccgtggttcaccctcttttccccccatgctttttgccctagtttataacaaaggaatgatgatgatttaaaaagtagttctgtatcttcagtatcttggtcttccagaaccctctggttgggaaggggatcattttttactggtcatttccctttggagtgtagctactttaacagatggaaagaacctcattggccatggaaacagccgaggtgttggagcccagcagtgcatggcaccgttcggcatctggcttgattggtctggctgccgtcattgtcagcacagtgccatggacatgggaagacttgactgcacagccaatggttttcatgatgattacagcatacacagtgatcacataaacgatgacagctatggggcacacaggccatttgcttacatgcctcgtatcatgattgattactgctttgttagaacacagaagagaccctattttatttaaggcagaaccccgaagatacgtatttccaatacagaaaagaatttttaataaaaactataacatacacaaaaattggttttaaagttgactccacttcctctaactccagtggattgttggccatgtctccccaactccacaatatctctatcatgggaaacacctggggtttttgcgctacataggagaaagatctggaaactatttgggttttgttttcaacttttcatttggatgtttggcgttgcacacacacatccaccggtggaagagacgcccggtgaaaacacctgtctgctttctaagccagtgaggttgaggtgagaggtttgccagagtttgtctacctctgggtatccctttgtctgggataaaaaaaatcaaaccagaaggcgggatggaatggatgcaccgcaaataatgcattttctgagttttcttgttaaaaaaaaatttttttaagtaagaaaaaaaaaggtaataacatggccaatttgttacataaaatgactttctgtgtataaattattcctaaaaaatcctgtttatataaaaaatcagtagatgaaaaaaatttcaaaatgtttttgtatattctgttgtaagaatttattcctgttattgcgatatactctggattctttacataatggaaaaaagaaactgtctattttgaatggctgaagctaaggcaacgttagtttctcttactctgcttttttctagtaaagtactacatggtttaagttaaataaaataattctgtatgca

SEQ ID NO: 311538 - DNA, 574 bp, Homo sapiens
tgtaccaaaccttccggctggaaagcccagtggccggcgccgaggctcgtggcgtcacgccccccccgccagggctgtacctccgtctccctggtcctgctgctcacaggacagacggctcgctcccctcttccagcagctgctcttacaggcactgatgatttcgctgggaagtgtggcgggcagctttgcctaagcgtggatggctcctcggcaattccagcctaagtgaaggcgctcaggagcctcctgctggaacgcgacccatctctcccaggaccccggggatcttaaggtcattgagaaatactgttggatcagggttttgttcttccacactgtaggtgaccccttggaataacggcctctcctctcgtgcacatacctaccggtttccacaactggatttctacagatcattcagctggttataagggttttgtttaaactgtccgagttactgatgtcattttgtttttgttttatgtaggtagcttttaagtagaaaacactaacagtgtagtgcccatcatagcaaatgcttcagaaacacctcaataaaagagaaaacttg

SEQ ID NO: 311539 - DNA, 7300 bp, Homo sapiens
  misc_feature (5095)..(5095): n is a, c, g, or t
acagtgtctgtgttttgtagataaatgtgaggattttctctaaatccctcttctgtttgctaaatctcactgtcactgctaaattcagagcagatagagcctgcgcaatggaataaagtcctcaaaattgaaatgtgacattgctctcaacatctcccatctctctggatttctttttgcttcattattcctgctaaccaattcattttcagactttgtacttcagaagcaatgggaaaaatcagcagtcttccaacccaattatttaagtgctgcttttgtgatttcttgaaggtgaagatgcacaccatgtcctcctcgcatctcttctacctggcgctgtgcctgctcaccttcaccagctctgccacggctggaccggagacgctctgcggggctgagctggtggatgctcttcagttcgtgtgtggagacaggggcttttatttcaacaagcccacagggtatggctccagcagtcggagggcgcctcagacaggcatcgtggatgagtgctgcttccggagctgtgatctaaggaggctggagatgtattgcgcacccctcaagcctgccaagtcagctcgctctgtccgtgcccagcgccacaccgacatgcccaagacccagaaggaagtacatttgaagaacgcaagtagagggagtgcaggaaacaagaactacaggatgtaggaagaccctcctgaggagtgaagagtgacatgccaccgcaggatcctttgctctgcacgagttacctgttaaactttggaacacctaccaaaaaataagtttgataacatttaaaagatgggcgtttcccccaatgaaatacacaagtaaacattccaacattgtctttaggagtgatttgcaccttgcaaaaatggtcctggagttggtagattgctgttgatcttttatcaataatgttctatagaaaagaaaaaaaaaatatatatatatatatatcttagtccctgcctctcaagagccacaaatgcatgggtgttgtatagatccagttgcactaaattcctctctgaatcttggctgctggagccattcattcagcaaccttgtctaagtggtttatgaattgtttccttatttgcacttctttctacacaactcgggctgtttgttttacagtgtctgataatcttgttagtctatacccaccacctcccttcataacctttatatttgccgaatttggcctcctcaaaagcagcagcaagtcgtcaagaagcacaccaattctaacccacaagattccatctgtggcatttgtaccaaatataagttggatgcattttattttagacacaaagctttatttttccacatcatgcttacaaaaaagaataatgcaaatagttgcaactttgaggccaatcatttttaggcatatgttttaaacatagaaagtttcttcaactcaaaagagttccttcaaatgatgagttaatgtgcaacctaattagtaactttcctctttttattttttccatatagagcactatgtaaatttagcatatcaattatacaggatatatcaaacagtatgtaaaactctgttttttagtataatggtgctattttgtagtttgttatatgaaagagtctggccaaaacggtaatacgtgaaagcaaaacaataggggaagcctggagccaaagatgacacaaggggaagggtactgaaaacaccatccatttgggaaagaaggcaaagtccccccagttatgccttccaagaggaacttcagacacaaaagtccactgatgcaaattggactggcgagtccagagaggaaactgtggaatggaaaaagcagaaggctaggaattttagcagtcctggtttctttttctcatggaagaaatgaacatctgccagctgtgtcatggactcaccactgtgtgaccttgggcaagtcacttcacctctctgtgcctcagtttcctcatctgcaaaatgggggcaatatgtcatctacctacctcaaaggggtggtataaggtttaaaaagataaagattcagatttttttaccctgggttgctgtaagggtgcaacatcagggcgcttgagttgctgagatgcaaggaattctataaataacccattcatagcatagctagagattggtgaattgaatgctcctgacatctcagttcttgtcagtgaagctatccaaataactggccaactagttgttaaaagctaacagctcaatctcttaaaacacttttcaaaatatgtgggaagcatttgattttcaatttgattttgaattctgcatttggttttatgaatacaaagataagtgaaaagagagaaaggaaaagaaaaaggagaaaaacaaagagatttctaccagtgaaaggggaattaattactctttgttagcactcactgactcttctatgcagttactacatatctagtaaaaccttgtttaatactataaataatattctattcattttgaaaaacacaatgattccttcttttctaggcaatataaggaaagtgatccaaaatttgaaatattaaaataatatctaataaaaagtcacaaagttatcttctttaacaaactttactcttattcttagctgtatatacatttttttaaaagtttgttaaaatatgcttgactagagtttccagttgaaaggcaaaaacttccatcacaacaagaaatttcccatgcctgctcagaagggtagcccctagctctctgtgaatgtgttttatccattcaactgaaaattggtatcaagaaagtccactggttagtgtactagtccatcatagcctagaaaatgatccctatctgcagatcaagattttctcattagaacaatgaattatccagcattcagatctttctagtcaccttagaactttttggttaaaagtacccaggcttgattatttcatgcaaattctatattttacattcttggaaagtctatatgaaaaacaaaaataacatcttcagtttttctcccactgggtcacctcaaggatcagaggccaggaaaaaaaaaaaaaagactccctggatctctgaatatatgcaaaaagaaggccccatttagtggagccagcaatcctgttcagtcaacaagtattttaactctcagtccaacattatttgaattgagcacctcaagcatgcttagcaatgttctaatcactatggacagatgtaaaagaaactatacatcatttttgccctctgcctgttttccagacatacaggttctgtggaataagatactggactcctcttcccaagatggcacttctttttatttcttgtccccagtgtgtaccttttaaaattattccctctcaacaaaactttataggcagtcttctgcagacttaacgtgttttctgtcatagttagatgtgataattctaagagtgtctatgacttatttccttcacttaattctatccacagtcaaaaatcccccaaggaggaaagctgaaagatgcactgccatattatctttcttaactttttccaacacataatcctctccaactggattataaataaattgaaaataactcattataccaattcactattttattttttaatgaattaaaactagaaaacaaattgatgcaaaccctggaagtcagttgattactatatactacagcagaatgactcagatttcatagaaaggagcaaccaaaatgtcacaacccaaaactttacaagctttgcttcagaattagattgctttataattcttgaatgaggcaatttcaagatatttgtaaaagaacagtaaacattggtaagaatgagctttcaactcataggcttatttccaatttaattgaccatactggatacttaggtcaaatttctgttctctcttccccaaataatattaaagtattatttgaactttttaagatgaggcagttcccctgaaaaagttaatgcagctctccatcagaatccactcttctagggatatgaaaatctcttaacacccaccctacatacacagacacacacacacacacacacacacacacacacacacacacacattcaccctaaggatccaatggaatactgaaaagaaatcacttccttgaaaattttattaaaaaacaaacaaacaaacaaaaagcctgtccacccttgagaatccttcctctccttggaacgtcaatgtttgtgtagatgaaaccatctcatgctctgtggctccagggtttctgttactattttatgcacttgggagaaggcttagaataaaagatgtagcacattttgctttcccatttattgtttggccagctatgccaatgtggtgctattgtttctttaagaaagtacttgactaaaaaaaaaagaaaaaaagaaaaaaaagaaagcatagacatatttttttaaagtataaaaacaacaattctatagatagatggcttaataaaatagcattaggtctatctagccaccaccacctttcaactttttatcactcacaagtagtgtactgttcaccaaattgtgaatttgggggtgcaggggcaggagttggaaattttttaaagttagaaggctccattgttttgttggctctcaaacttagcaaaattagcaatatattatccaatcttctgaacttgatcaagagcatggagaataaacgcgggaaaaaagatcttataggcaaatagaagaatttaaaagataagtaagttccttattgatttttgtgcactctgctctaaaacagatattcagcaagtggagaaaataagaacaaagagaaaaaatacatagatttacctgcaaaaaatagcttctgccaaatcccccttgggtattctttggcatttactggtttatagaagacattctcccttcacccagacatctcaaagagcagtagctctcatgaaaagcaatcactgatctcatttgggaaatgttggaaagtatttccttatgagatgggggttatctactgataaagaaagaatttatgagaaattgttgaaagagatggctaacaatctgtgaagattttttgtttcttgnttttgttttttttttttttttactttatacagtctttatgaatttcttaatgttcaaaatgacttggttcttttcttctttttttatatcagaatgaggaataataagttaaacccacatagactctttaaaactataggctagatagaaatgtatgtttgacttgttgaagctataatcagactatttaaaatgttttgctatttttaatcttaaaagattgtgctaatttattagagcagaacctgtttggctctcctcagaagaaagaatctttccattcaaatcacatggctttccaccaatattttcaaaagataaatctgatttatgcaatggcatcatttattttaaaacagaagaattgtgaaagtttatgcccctcccttgcaaagaccataaagtccagatctggtaggggggcaacaacaaaaggaaaatgttgttgattcttggttttggattttgttttgttttcaatgctagtgtttaatcctgtagtacatatttgcttattgctattttaatattttataagaccttcctgttaggtattagaaagtgatacatagatatcttttttgtgtaatttctatttaaaaaagagagaagactgtcagaagctttaagtgcatatggtacaggataaagatatcaatttaaataaccaattcctatctggaacaatgcttttgttttttaaagaaacctctcacagataagacagaggcccaggggatttttgaagctgtctttattctgcccccatcccaacccagcccttattattttagtatctgcctcagaattttatagagggctgaccaagctgaaactctagaattaaaggaacctcactgaaaacatatatttcacgtgttccctctttttttttttcctttttgtgagatggggtctcgcactgtcccccaggctggagtgcagtggcatgatctcggctcactgcaacctccacctcctgggtttaagcgattctcctgcctcagcctcctgagtagctgggattacaggcacccaccactatgcccggctaattttttggatttttaatagagacggggttttaccatgttggccaggttggtctcaaactcctgaccttgtgatttgcccgcctcagcctcccaaattgctgggattacaggcatgagccaccacaccctgcccatgtgttccctcttaatgtatgattacatggatcttaaacatgatccttctctcctcattcttcaactatctttgatggggtctttcaaggggaaaaaaatccaagcttttttaaagtaaaaaaaaaaaaagagaggacacaaaaccaaatgttactgctcaactgaaatatgagttaagatggagacagagtttctcctaataaccggagctgaattacctttcactttcaaaaacatgaccttccacaatccttagaatctgcctttttttatattactgaggcctaaaagtaaacattactcattttattttgcccaaaatgcactgatgtaaagtaggaaaaataaaaacagagctctaaaatccctttcaagccacccattgaccccactcaccaactcatagcaaagtcacttctgttaatcccttaatctgattttgtttggatatttatcttgtacccgctgctaaacacactgcaggagggactctgaaacctcaagctgtctacttacatcttttatctgtgtctgtgtatcatgaaaatgtctattcaaaatatcaaaacctttcaaatatcacgcagcttatattcagtttacataaaggccccaaataccatgtcagatctttttggtaaaagagttaatgaactatgagaattgggattacatcatgtattttgcctcatgtatttttatcacacttataggccaagtgtgataaataaacttacagacactgaattaatttcccctgctactttgaaaccagaaaataatgactggccattcgttacatctgtcttagttgaaaagcatattttttattaaattaattctgattgtatttgaaattattattcaattcacttatggcagaggaatatcaatcctaatgacttctaaaaatgtaactaattgaatcattatcttacatttactgtttaataagcatattttgaaaatgtatggctagagtgtcataataaaatggtatatctttctttagtaa

SEQ ID NO: 311540 - DNA, 7444 bp, Homo sapiens
  misc_feature (5095)..(5095): n is a, c, g, or t
acagtgtctgtgttttgtagataaatgtgaggattttctctaaatccctcttctgtttgctaaatctcactgtcactgctaaattcagagcagatagagcctgcgcaatggaataaagtcctcaaaattgaaatgtgacattgctctcaacatctcccatctctctggatttctttttgcttcattattcctgctaaccaattcattttcagactttgtacttcagaagcaatgggaaaaatcagcagtcttccaacccaattatttaagtgctgcttttgtgatttcttgaaggtgaagatgcacaccatgtcctcctcgcatctcttctacctggcgctgtgcctgctcaccttcaccagctctgccacggctggaccggagacgctctgcggggctgagctggtggatgctcttcagttcgtgtgtggagacaggggcttttatttcaacaagcccacagggtatggctccagcagtcggagggcgcctcagacaggcatcgtggatgagtgctgcttccggagctgtgatctaaggaggctggagatgtattgcgcacccctcaagcctgccaagtcagctcgctctgtccgtgcccagcgccacaccgacatgcccaagacccagaaggaagtacatttgaagaacgcaagtagagggagtgcaggaaacaagaactacaggatgtaggaagaccctcctgaggagtgaagagtgacatgccaccgcaggatcctttgctctgcacgagttacctgttaaactttggaacacctaccaaaaaataagtttgataacatttaaaagatgggcgtttcccccaatgaaatacacaagtaaacattccaacattgtctttaggagtgatttgcaccttgcaaaaatggtcctggagttggtagattgctgttgatcttttatcaataatgttctatagaaaagaaaaaaaaaatatatatatatatatatcttagtccctgcctctcaagagccacaaatgcatgggtgttgtatagatccagttgcactaaattcctctctgaatcttggctgctggagccattcattcagcaaccttgtctaagtggtttatgaattgtttccttatttgcacttctttctacacaactcgggctgtttgttttacagtgtctgataatcttgttagtctatacccaccacctcccttcataacctttatatttgccgaatttggcctcctcaaaagcagcagcaagtcgtcaagaagcacaccaattctaacccacaagattccatctgtggcatttgtaccaaatataagttggatgcattttattttagacacaaagctttatttttccacatcatgcttacaaaaaagaataatgcaaatagttgcaactttgaggccaatcatttttaggcatatgttttaaacatagaaagtttcttcaactcaaaagagttccttcaaatgatgagttaatgtgcaacctaattagtaactttcctctttttattttttccatatagagcactatgtaaatttagcatatcaattatacaggatatatcaaacagtatgtaaaactctgttttttagtataatggtgctattttgtagtttgttatatgaaagagtctggccaaaacggtaatacgtgaaagcaaaacaataggggaagcctggagccaaagatgacacaaggggaagggtactgaaaacaccatccatttgggaaagaaggcaaagtccccccagttatgccttccaagaggaacttcagacacaaaagtccactgatgcaaattggactggcgagtccagagaggaaactgtggaatggaaaaagcagaaggctaggaattttagcagtcctggtttctttttctcatggaagaaatgaacatctgccagctgtgtcatggactcaccactgtgtgaccttgggcaagtcacttcacctctctgtgcctcagtttcctcatctgcaaaatgggggcaatatgtcatctacctacctcaaaggggtggtataaggtttaaaaagataaagattcagatttttttaccctgggttgctgtaagggtgcaacatcagggcgcttgagttgctgagatgcaaggaattctataaataacccattcatagcatagctagagattggtgaattgaatgctcctgacatctcagttcttgtcagtgaagctatccaaataactggccaactagttgttaaaagctaacagctcaatctcttaaaacacttttcaaaatatgtgggaagcatttgattttcaatttgattttgaattctgcatttggttttatgaatacaaagataagtgaaaagagagaaaggaaaagaaaaaggagaaaaacaaagagatttctaccagtgaaaggggaattaattactctttgttagcactcactgactcttctatgcagttactacatatctagtaaaaccttgtttaatactataaataatattctattcattttgaaaaacacaatgattccttcttttctaggcaatataaggaaagtgatccaaaatttgaaatattaaaataatatctaataaaaagtcacaaagttatcttctttaacaaactttactcttattcttagctgtatatacatttttttaaaagtttgttaaaatatgcttgactagagtttccagttgaaaggcaaaaacttccatcacaacaagaaatttcccatgcctgctcagaagggtagcccctagctctctgtgaatgtgttttatccattcaactgaaaattggtatcaagaaagtccactggttagtgtactagtccatcatagcctagaaaatgatccctatctgcagatcaagattttctcattagaacaatgaattatccagcattcagatctttctagtcaccttagaactttttggttaaaagtacccaggcttgattatttcatgcaaattctatattttacattcttggaaagtctatatgaaaaacaaaaataacatcttcagtttttctcccactgggtcacctcaaggatcagaggccaggaaaaaaaaaaaaaagactccctggatctctgaatatatgcaaaaagaaggccccatttagtggagccagcaatcctgttcagtcaacaagtattttaactctcagtccaacattatttgaattgagcacctcaagcatgcttagcaatgttctaatcactatggacagatgtaaaagaaactatacatcatttttgccctctgcctgttttccagacatacaggttctgtggaataagatactggactcctcttcccaagatggcacttctttttatttcttgtccccagtgtgtaccttttaaaattattccctctcaacaaaactttataggcagtcttctgcagacttaacgtgttttctgtcatagttagatgtgataattctaagagtgtctatgacttatttccttcacttaattctatccacagtcaaaaatcccccaaggaggaaagctgaaagatgcactgccatattatctttcttaactttttccaacacataatcctctccaactggattataaataaattgaaaataactcattataccaattcactattttattttttaatgaattaaaactagaaaacaaattgatgcaaaccctggaagtcagttgattactatatactacagcagaatgactcagatttcatagaaaggagcaaccaaaatgtcacaacccaaaactttacaagctttgcttcagaattagattgctttataattcttgaatgaggcaatttcaagatatttgtaaaagaacagtaaacattggtaagaatgagctttcaactcataggcttatttccaatttaattgaccatactggatacttaggtcaaatttctgttctctcttccccaaataatattaaagtattatttgaactttttaagatgaggcagttcccctgaaaaagttaatgcagctctccatcagaatccactcttctagggatatgaaaatctcttaacacccaccctacatacacagacacacacacacacacacacacacacacacacacacacacacattcaccctaaggatccaatggaatactgaaaagaaatcacttccttgaaaattttattaaaaaacaaacaaacaaacaaaaagcctgtccacccttgagaatccttcctctccttggaacgtcaatgtttgtgtagatgaaaccatctcatgctctgtggctccagggtttctgttactattttatgcacttgggagaaggcttagaataaaagatgtagcacattttgctttcccatttattgtttggccagctatgccaatgtggtgctattgtttctttaagaaagtacttgactaaaaaaaaaagaaaaaaagaaaaaaaagaaagcatagacatatttttttaaagtataaaaacaacaattctatagatagatggcttaataaaatagcattaggtctatctagccaccaccacctttcaactttttatcactcacaagtagtgtactgttcaccaaattgtgaatttgggggtgcaggggcaggagttggaaattttttaaagttagaaggctccattgttttgttggctctcaaacttagcaaaattagcaatatattatccaatcttctgaacttgatcaagagcatggagaataaacgcgggaaaaaagatcttataggcaaatagaagaatttaaaagataagtaagttccttattgatttttgtgcactctgctctaaaacagatattcagcaagtggagaaaataagaacaaagagaaaaaatacatagatttacctgcaaaaaatagcttctgccaaatcccccttgggtattctttggcatttactggtttatagaagacattctcccttcacccagacatctcaaagagcagtagctctcatgaaaagcaatcactgatctcatttgggaaatgttggaaagtatttccttatgagatgggggttatctactgataaagaaagaatttatgagaaattgttgaaagagatggctaacaatctgtgaagattttttgtttcttgnttttgttttttttttttttttactttatacagtctttatgaatttcttaatgttcaaaatgacttggttcttttcttctttttttatatcagaatgaggaataataagttaaacccacatagactctttaaaactataggctagatagaaatgtatgtttgacttgttgaagctataatcagactatttaaaatgttttgctatttttaatcttaaaagattgtgctaatttattagagcagaacctgtttggctctcctcagaagaaagaatctttccattcaaatcacatggctttccaccaatattttcaaaagataaatctgatttatgcaatggcatcatttattttaaaacagaagaattgtgaaagtttatgcccctcccttgcaaagaccataaagtccagatctggtaggggggcaacaacaaaaggaaaatgttgttgattcttggttttggattttgttttgttttcaatgctagtgtttaatcctgtagtacatatttgcttattgctattttaatattttataagaccttcctgttaggtattagaaagtgatacatagatatcttttttgtgtaatttctatttaaaaaagagagaagactgtcagaagctttaagtgcatatggtacaggataaagatatcaatttaaataaccaattcctatctggaacaatgcttttgttttttaaagaaacctctcacagataagacagaggcccaggggatttttgaagctgtctttattctgcccccatcccaacccagcccttattattttagtatctgcctcagaattttatagagggctgaccaagctgaaactctagaattaaaggaacctcactgaaaacatatatttcacgtgttccctctttttttttttcctttttgtgagatggggtctcgcactgtcccccaggctggagtgcagtggcatgatctcggctcactgcaacctccacctcctgggtttaagcgattctcctgcctcagcctcctgagtagctgggattacaggcacccaccactatgcccggctaattttttggatttttaatagagacggggttttaccatgttggccaggttggtctcaaactcctgaccttgtgatttgcccgcctcagcctcccaaattgctgggattacaggcatgagccaccacaccctgcccatgtgttccctcttaatgtatgattacatggatcttaaacatgatccttctctcctcattcttcaactatctttgatggggtctttcaaggggaaaaaaatccaagcttttttaaagtaaaaaaaaaaaaagagaggacacaaaaccaaatgttactgctcaactgaaatatgagttaagatggagacagagtttctcctaataaccggagctgaattacctttcactttcaaaaacatgaccttccacaatccttagaatctgcctttttttatattactgaggcctaaaagtaaacattactcattttattttgcccaaaatgcactgatgtaaagtaggaaaaataaaaacagagctctaaaatccctttcaagccacccattgaccccactcaccaactcatagcaaagtcacttctgttaatcccttaatctgattttgtttggatatttatcttgtacccgctgctaaacacactgcaggagggactctgaaacctcaagctgtctacttacatcttttatctgtgtctgtgtatcatgaaaatgtctattcaaaatatcaaaacctttcaaatatcacgcagcttatattcagtttacataaaggccccaaataccatgtcagatctttttggtaaaagagttaatgaactatgagaattgggattacatcatgtattttgcctcatgtatttttatcacacttataggccaagtgtgataaataaacttacagacactgaattaatttcccctgctactttgaaaccagaaaataatgactggccattcgttacatctgtcttagttgaaaagcatattttttattaaattaattctgattgtatttgaaattattattcaattcacttatggcagaggaatatcaatcctaatgacttctaaaaatgtaactaattgaatcattatcttacatttactgtttaataagcatattttgaaaatgtatggctagagtgtcataataaaatggtatatctttctttagtaattacattaaaattagtcatgtttgattaattagttcttttggataatgttggtgtaatgtgtcattccttaagaattctactgttatataccatttttattaaggtcattgcaataaataaacatgaaaacatacccagaaaaa

SEQ ID NO: 311541 - DNA, 7315 bp, Homo sapiens
  misc_feature (4966)..(4966): n is a, c, g, or t
gcatacctgcctgggtgtccaaatgtaactagatgctttcacaaaccccacccacaaagcagcacatgtttttaagacttcagttttctattcacatcggcctcataatacccaccctgacctgctgtaaaagacctggaacaaacaaaaatgattacacctacagtgaagatgcacaccatgtcctcctcgcatctcttctacctggcgctgtgcctgctcaccttcaccagctctgccacggctggaccggagacgctctgcggggctgagctggtggatgctcttcagttcgtgtgtggagacaggggcttttatttcaacaagcccacagggtatggctccagcagtcggagggcgcctcagacaggcatcgtggatgagtgctgcttccggagctgtgatctaaggaggctggagatgtattgcgcacccctcaagcctgccaagtcagctcgctctgtccgtgcccagcgccacaccgacatgcccaagacccagaaggaagtacatttgaagaacgcaagtagagggagtgcaggaaacaagaactacaggatgtaggaagaccctcctgaggagtgaagagtgacatgccaccgcaggatcctttgctctgcacgagttacctgttaaactttggaacacctaccaaaaaataagtttgataacatttaaaagatgggcgtttcccccaatgaaatacacaagtaaacattccaacattgtctttaggagtgatttgcaccttgcaaaaatggtcctggagttggtagattgctgttgatcttttatcaataatgttctatagaaaagaaaaaaaaaatatatatatatatatatcttagtccctgcctctcaagagccacaaatgcatgggtgttgtatagatccagttgcactaaattcctctctgaatcttggctgctggagccattcattcagcaaccttgtctaagtggtttatgaattgtttccttatttgcacttctttctacacaactcgggctgtttgttttacagtgtctgataatcttgttagtctatacccaccacctcccttcataacctttatatttgccgaatttggcctcctcaaaagcagcagcaagtcgtcaagaagcacaccaattctaacccacaagattccatctgtggcatttgtaccaaatataagttggatgcattttattttagacacaaagctttatttttccacatcatgcttacaaaaaagaataatgcaaatagttgcaactttgaggccaatcatttttaggcatatgttttaaacatagaaagtttcttcaactcaaaagagttccttcaaatgatgagttaatgtgcaacctaattagtaactttcctctttttattttttccatatagagcactatgtaaatttagcatatcaattatacaggatatatcaaacagtatgtaaaactctgttttttagtataatggtgctattttgtagtttgttatatgaaagagtctggccaaaacggtaatacgtgaaagcaaaacaataggggaagcctggagccaaagatgacacaaggggaagggtactgaaaacaccatccatttgggaaagaaggcaaagtccccccagttatgccttccaagaggaacttcagacacaaaagtccactgatgcaaattggactggcgagtccagagaggaaactgtggaatggaaaaagcagaaggctaggaattttagcagtcctggtttctttttctcatggaagaaatgaacatctgccagctgtgtcatggactcaccactgtgtgaccttgggcaagtcacttcacctctctgtgcctcagtttcctcatctgcaaaatgggggcaatatgtcatctacctacctcaaaggggtggtataaggtttaaaaagataaagattcagatttttttaccctgggttgctgtaagggtgcaacatcagggcgcttgagttgctgagatgcaaggaattctataaataacccattcatagcatagctagagattggtgaattgaatgctcctgacatctcagttcttgtcagtgaagctatccaaataactggccaactagttgttaaaagctaacagctcaatctcttaaaacacttttcaaaatatgtgggaagcatttgattttcaatttgattttgaattctgcatttggttttatgaatacaaagataagtgaaaagagagaaaggaaaagaaaaaggagaaaaacaaagagatttctaccagtgaaaggggaattaattactctttgttagcactcactgactcttctatgcagttactacatatctagtaaaaccttgtttaatactataaataatattctattcattttgaaaaacacaatgattccttcttttctaggcaatataaggaaagtgatccaaaatttgaaatattaaaataatatctaataaaaagtcacaaagttatcttctttaacaaactttactcttattcttagctgtatatacatttttttaaaagtttgttaaaatatgcttgactagagtttccagttgaaaggcaaaaacttccatcacaacaagaaatttcccatgcctgctcagaagggtagcccctagctctctgtgaatgtgttttatccattcaactgaaaattggtatcaagaaagtccactggttagtgtactagtccatcatagcctagaaaatgatccctatctgcagatcaagattttctcattagaacaatgaattatccagcattcagatctttctagtcaccttagaactttttggttaaaagtacccaggcttgattatttcatgcaaattctatattttacattcttggaaagtctatatgaaaaacaaaaataacatcttcagtttttctcccactgggtcacctcaaggatcagaggccaggaaaaaaaaaaaaaagactccctggatctctgaatatatgcaaaaagaaggccccatttagtggagccagcaatcctgttcagtcaacaagtattttaactctcagtccaacattatttgaattgagcacctcaagcatgcttagcaatgttctaatcactatggacagatgtaaaagaaactatacatcatttttgccctctgcctgttttccagacatacaggttctgtggaataagatactggactcctcttcccaagatggcacttctttttatttcttgtccccagtgtgtaccttttaaaattattccctctcaacaaaactttataggcagtcttctgcagacttaacgtgttttctgtcatagttagatgtgataattctaagagtgtctatgacttatttccttcacttaattctatccacagtcaaaaatcccccaaggaggaaagctgaaagatgcactgccatattatctttcttaactttttccaacacataatcctctccaactggattataaataaattgaaaataactcattataccaattcactattttattttttaatgaattaaaactagaaaacaaattgatgcaaaccctggaagtcagttgattactatatactacagcagaatgactcagatttcatagaaaggagcaaccaaaatgtcacaacccaaaactttacaagctttgcttcagaattagattgctttataattcttgaatgaggcaatttcaagatatttgtaaaagaacagtaaacattggtaagaatgagctttcaactcataggcttatttccaatttaattgaccatactggatacttaggtcaaatttctgttctctcttccccaaataatattaaagtattatttgaactttttaagatgaggcagttcccctgaaaaagttaatgcagctctccatcagaatccactcttctagggatatgaaaatctcttaacacccaccctacatacacagacacacacacacacacacacacacacacacacacacacacacattcaccctaaggatccaatggaatactgaaaagaaatcacttccttgaaaattttattaaaaaacaaacaaacaaacaaaaagcctgtccacccttgagaatccttcctctccttggaacgtcaatgtttgtgtagatgaaaccatctcatgctctgtggctccagggtttctgttactattttatgcacttgggagaaggcttagaataaaagatgtagcacattttgctttcccatttattgtttggccagctatgccaatgtggtgctattgtttctttaagaaagtacttgactaaaaaaaaaagaaaaaaagaaaaaaaagaaagcatagacatatttttttaaagtataaaaacaacaattctatagatagatggcttaataaaatagcattaggtctatctagccaccaccacctttcaactttttatcactcacaagtagtgtactgttcaccaaattgtgaatttgggggtgcaggggcaggagttggaaattttttaaagttagaaggctccattgttttgttggctctcaaacttagcaaaattagcaatatattatccaatcttctgaacttgatcaagagcatggagaataaacgcgggaaaaaagatcttataggcaaatagaagaatttaaaagataagtaagttccttattgatttttgtgcactctgctctaaaacagatattcagcaagtggagaaaataagaacaaagagaaaaaatacatagatttacctgcaaaaaatagcttctgccaaatcccccttgggtattctttggcatttactggtttatagaagacattctcccttcacccagacatctcaaagagcagtagctctcatgaaaagcaatcactgatctcatttgggaaatgttggaaagtatttccttatgagatgggggttatctactgataaagaaagaatttatgagaaattgttgaaagagatggctaacaatctgtgaagattttttgtttcttgnttttgttttttttttttttttactttatacagtctttatgaatttcttaatgttcaaaatgacttggttcttttcttctttttttatatcagaatgaggaataataagttaaacccacatagactctttaaaactataggctagatagaaatgtatgtttgacttgttgaagctataatcagactatttaaaatgttttgctatttttaatcttaaaagattgtgctaatttattagagcagaacctgtttggctctcctcagaagaaagaatctttccattcaaatcacatggctttccaccaatattttcaaaagataaatctgatttatgcaatggcatcatttattttaaaacagaagaattgtgaaagtttatgcccctcccttgcaaagaccataaagtccagatctggtaggggggcaacaacaaaaggaaaatgttgttgattcttggttttggattttgttttgttttcaatgctagtgtttaatcctgtagtacatatttgcttattgctattttaatattttataagaccttcctgttaggtattagaaagtgatacatagatatcttttttgtgtaatttctatttaaaaaagagagaagactgtcagaagctttaagtgcatatggtacaggataaagatatcaatttaaataaccaattcctatctggaacaatgcttttgttttttaaagaaacctctcacagataagacagaggcccaggggatttttgaagctgtctttattctgcccccatcccaacccagcccttattattttagtatctgcctcagaattttatagagggctgaccaagctgaaactctagaattaaaggaacctcactgaaaacatatatttcacgtgttccctctttttttttttcctttttgtgagatggggtctcgcactgtcccccaggctggagtgcagtggcatgatctcggctcactgcaacctccacctcctgggtttaagcgattctcctgcctcagcctcctgagtagctgggattacaggcacccaccactatgcccggctaattttttggatttttaatagagacggggttttaccatgttggccaggttggtctcaaactcctgaccttgtgatttgcccgcctcagcctcccaaattgctgggattacaggcatgagccaccacaccctgcccatgtgttccctcttaatgtatgattacatggatcttaaacatgatccttctctcctcattcttcaactatctttgatggggtctttcaaggggaaaaaaatccaagcttttttaaagtaaaaaaaaaaaaagagaggacacaaaaccaaatgttactgctcaactgaaatatgagttaagatggagacagagtttctcctaataaccggagctgaattacctttcactttcaaaaacatgaccttccacaatccttagaatctgcctttttttatattactgaggcctaaaagtaaacattactcattttattttgcccaaaatgcactgatgtaaagtaggaaaaataaaaacagagctctaaaatccctttcaagccacccattgaccccactcaccaactcatagcaaagtcacttctgttaatcccttaatctgattttgtttggatatttatcttgtacccgctgctaaacacactgcaggagggactctgaaacctcaagctgtctacttacatcttttatctgtgtctgtgtatcatgaaaatgtctattcaaaatatcaaaacctttcaaatatcacgcagcttatattcagtttacataaaggccccaaataccatgtcagatctttttggtaaaagagttaatgaactatgagaattgggattacatcatgtattttgcctcatgtatttttatcacacttataggccaagtgtgataaataaacttacagacactgaattaatttcccctgctactttgaaaccagaaaataatgactggccattcgttacatctgtcttagttgaaaagcatattttttattaaattaattctgattgtatttgaaattattattcaattcacttatggcagaggaatatcaatcctaatgacttctaaaaatgtaactaattgaatcattatcttacatttactgtttaataagcatattttgaaaatgtatggctagagtgtcataataaaatggtatatctttctttagtaattacattaaaattagtcatgtttgattaattagttcttttggataatgttggtgtaatgtgtcattccttaagaattctactgttatataccatttttattaaggtcattgcaataaataaacatgaaaacatacccagaaaaa

SEQ ID NO: 311542 - DNA, 7493 bp, Homo sapiens
  misc_feature (5144)..(5144): n is a, c, g, or t
acagtgtctgtgttttgtagataaatgtgaggattttctctaaatccctcttctgtttgctaaatctcactgtcactgctaaattcagagcagatagagcctgcgcaatggaataaagtcctcaaaattgaaatgtgacattgctctcaacatctcccatctctctggatttctttttgcttcattattcctgctaaccaattcattttcagactttgtacttcagaagcaatgggaaaaatcagcagtcttccaacccaattatttaagtgctgcttttgtgatttcttgaaggtgaagatgcacaccatgtcctcctcgcatctcttctacctggcgctgtgcctgctcaccttcaccagctctgccacggctggaccggagacgctctgcggggctgagctggtggatgctcttcagttcgtgtgtggagacaggggcttttatttcaacaagcccacagggtatggctccagcagtcggagggcgcctcagacaggcatcgtggatgagtgctgcttccggagctgtgatctaaggaggctggagatgtattgcgcacccctcaagcctgccaagtcagctcgctctgtccgtgcccagcgccacaccgacatgcccaagacccagaagtatcagcccccatctaccaacaagaacacgaagtctcagagaaggaaaggaagtacatttgaagaacgcaagtagagggagtgcaggaaacaagaactacaggatgtaggaagaccctcctgaggagtgaagagtgacatgccaccgcaggatcctttgctctgcacgagttacctgttaaactttggaacacctaccaaaaaataagtttgataacatttaaaagatgggcgtttcccccaatgaaatacacaagtaaacattccaacattgtctttaggagtgatttgcaccttgcaaaaatggtcctggagttggtagattgctgttgatcttttatcaataatgttctatagaaaagaaaaaaaaaatatatatatatatatatcttagtccctgcctctcaagagccacaaatgcatgggtgttgtatagatccagttgcactaaattcctctctgaatcttggctgctggagccattcattcagcaaccttgtctaagtggtttatgaattgtttccttatttgcacttctttctacacaactcgggctgtttgttttacagtgtctgataatcttgttagtctatacccaccacctcccttcataacctttatatttgccgaatttggcctcctcaaaagcagcagcaagtcgtcaagaagcacaccaattctaacccacaagattccatctgtggcatttgtaccaaatataagttggatgcattttattttagacacaaagctttatttttccacatcatgcttacaaaaaagaataatgcaaatagttgcaactttgaggccaatcatttttaggcatatgttttaaacatagaaagtttcttcaactcaaaagagttccttcaaatgatgagttaatgtgcaacctaattagtaactttcctctttttattttttccatatagagcactatgtaaatttagcatatcaattatacaggatatatcaaacagtatgtaaaactctgttttttagtataatggtgctattttgtagtttgttatatgaaagagtctggccaaaacggtaatacgtgaaagcaaaacaataggggaagcctggagccaaagatgacacaaggggaagggtactgaaaacaccatccatttgggaaagaaggcaaagtccccccagttatgccttccaagaggaacttcagacacaaaagtccactgatgcaaattggactggcgagtccagagaggaaactgtggaatggaaaaagcagaaggctaggaattttagcagtcctggtttctttttctcatggaagaaatgaacatctgccagctgtgtcatggactcaccactgtgtgaccttgggcaagtcacttcacctctctgtgcctcagtttcctcatctgcaaaatgggggcaatatgtcatctacctacctcaaaggggtggtataaggtttaaaaagataaagattcagatttttttaccctgggttgctgtaagggtgcaacatcagggcgcttgagttgctgagatgcaaggaattctataaataacccattcatagcatagctagagattggtgaattgaatgctcctgacatctcagttcttgtcagtgaagctatccaaataactggccaactagttgttaaaagctaacagctcaatctcttaaaacacttttcaaaatatgtgggaagcatttgattttcaatttgattttgaattctgcatttggttttatgaatacaaagataagtgaaaagagagaaaggaaaagaaaaaggagaaaaacaaagagatttctaccagtgaaaggggaattaattactctttgttagcactcactgactcttctatgcagttactacatatctagtaaaaccttgtttaatactataaataatattctattcattttgaaaaacacaatgattccttcttttctaggcaatataaggaaagtgatccaaaatttgaaatattaaaataatatctaataaaaagtcacaaagttatcttctttaacaaactttactcttattcttagctgtatatacatttttttaaaagtttgttaaaatatgcttgactagagtttccagttgaaaggcaaaaacttccatcacaacaagaaatttcccatgcctgctcagaagggtagcccctagctctctgtgaatgtgttttatccattcaactgaaaattggtatcaagaaagtccactggttagtgtactagtccatcatagcctagaaaatgatccctatctgcagatcaagattttctcattagaacaatgaattatccagcattcagatctttctagtcaccttagaactttttggttaaaagtacccaggcttgattatttcatgcaaattctatattttacattcttggaaagtctatatgaaaaacaaaaataacatcttcagtttttctcccactgggtcacctcaaggatcagaggccaggaaaaaaaaaaaaaagactccctggatctctgaatatatgcaaaaagaaggccccatttagtggagccagcaatcctgttcagtcaacaagtattttaactctcagtccaacattatttgaattgagcacctcaagcatgcttagcaatgttctaatcactatggacagatgtaaaagaaactatacatcatttttgccctctgcctgttttccagacatacaggttctgtggaataagatactggactcctcttcccaagatggcacttctttttatttcttgtccccagtgtgtaccttttaaaattattccctctcaacaaaactttataggcagtcttctgcagacttaacgtgttttctgtcatagttagatgtgataattctaagagtgtctatgacttatttccttcacttaattctatccacagtcaaaaatcccccaaggaggaaagctgaaagatgcactgccatattatctttcttaactttttccaacacataatcctctccaactggattataaataaattgaaaataactcattataccaattcactattttattttttaatgaattaaaactagaaaacaaattgatgcaaaccctggaagtcagttgattactatatactacagcagaatgactcagatttcatagaaaggagcaaccaaaatgtcacaacccaaaactttacaagctttgcttcagaattagattgctttataattcttgaatgaggcaatttcaagatatttgtaaaagaacagtaaacattggtaagaatgagctttcaactcataggcttatttccaatttaattgaccatactggatacttaggtcaaatttctgttctctcttccccaaataatattaaagtattatttgaactttttaagatgaggcagttcccctgaaaaagttaatgcagctctccatcagaatccactcttctagggatatgaaaatctcttaacacccaccctacatacacagacacacacacacacacacacacacacacacacacacacacacattcaccctaaggatccaatggaatactgaaaagaaatcacttccttgaaaattttattaaaaaacaaacaaacaaacaaaaagcctgtccacccttgagaatccttcctctccttggaacgtcaatgtttgtgtagatgaaaccatctcatgctctgtggctccagggtttctgttactattttatgcacttgggagaaggcttagaataaaagatgtagcacattttgctttcccatttattgtttggccagctatgccaatgtggtgctattgtttctttaagaaagtacttgactaaaaaaaaaagaaaaaaagaaaaaaaagaaagcatagacatatttttttaaagtataaaaacaacaattctatagatagatggcttaataaaatagcattaggtctatctagccaccaccacctttcaactttttatcactcacaagtagtgtactgttcaccaaattgtgaatttgggggtgcaggggcaggagttggaaattttttaaagttagaaggctccattgttttgttggctctcaaacttagcaaaattagcaatatattatccaatcttctgaacttgatcaagagcatggagaataaacgcgggaaaaaagatcttataggcaaatagaagaatttaaaagataagtaagttccttattgatttttgtgcactctgctctaaaacagatattcagcaagtggagaaaataagaacaaagagaaaaaatacatagatttacctgcaaaaaatagcttctgccaaatcccccttgggtattctttggcatttactggtttatagaagacattctcccttcacccagacatctcaaagagcagtagctctcatgaaaagcaatcactgatctcatttgggaaatgttggaaagtatttccttatgagatgggggttatctactgataaagaaagaatttatgagaaattgttgaaagagatggctaacaatctgtgaagattttttgtttcttgnttttgttttttttttttttttactttatacagtctttatgaatttcttaatgttcaaaatgacttggttcttttcttctttttttatatcagaatgaggaataataagttaaacccacatagactctttaaaactataggctagatagaaatgtatgtttgacttgttgaagctataatcagactatttaaaatgttttgctatttttaatcttaaaagattgtgctaatttattagagcagaacctgtttggctctcctcagaagaaagaatctttccattcaaatcacatggctttccaccaatattttcaaaagataaatctgatttatgcaatggcatcatttattttaaaacagaagaattgtgaaagtttatgcccctcccttgcaaagaccataaagtccagatctggtaggggggcaacaacaaaaggaaaatgttgttgattcttggttttggattttgttttgttttcaatgctagtgtttaatcctgtagtacatatttgcttattgctattttaatattttataagaccttcctgttaggtattagaaagtgatacatagatatcttttttgtgtaatttctatttaaaaaagagagaagactgtcagaagctttaagtgcatatggtacaggataaagatatcaatttaaataaccaattcctatctggaacaatgcttttgttttttaaagaaacctctcacagataagacagaggcccaggggatttttgaagctgtctttattctgcccccatcccaacccagcccttattattttagtatctgcctcagaattttatagagggctgaccaagctgaaactctagaattaaaggaacctcactgaaaacatatatttcacgtgttccctctttttttttttcctttttgtgagatggggtctcgcactgtcccccaggctggagtgcagtggcatgatctcggctcactgcaacctccacctcctgggtttaagcgattctcctgcctcagcctcctgagtagctgggattacaggcacccaccactatgcccggctaattttttggatttttaatagagacggggttttaccatgttggccaggttggtctcaaactcctgaccttgtgatttgcccgcctcagcctcccaaattgctgggattacaggcatgagccaccacaccctgcccatgtgttccctcttaatgtatgattacatggatcttaaacatgatccttctctcctcattcttcaactatctttgatggggtctttcaaggggaaaaaaatccaagcttttttaaagtaaaaaaaaaaaaagagaggacacaaaaccaaatgttactgctcaactgaaatatgagttaagatggagacagagtttctcctaataaccggagctgaattacctttcactttcaaaaacatgaccttccacaatccttagaatctgcctttttttatattactgaggcctaaaagtaaacattactcattttattttgcccaaaatgcactgatgtaaagtaggaaaaataaaaacagagctctaaaatccctttcaagccacccattgaccccactcaccaactcatagcaaagtcacttctgttaatcccttaatctgattttgtttggatatttatcttgtacccgctgctaaacacactgcaggagggactctgaaacctcaagctgtctacttacatcttttatctgtgtctgtgtatcatgaaaatgtctattcaaaatatcaaaacctttcaaatatcacgcagcttatattcagtttacataaaggccccaaataccatgtcagatctttttggtaaaagagttaatgaactatgagaattgggattacatcatgtattttgcctcatgtatttttatcacacttataggccaagtgtgataaataaacttacagacactgaattaatttcccctgctactttgaaaccagaaaataatgactggccattcgttacatctgtcttagttgaaaagcatattttttattaaattaattctgattgtatttgaaattattattcaattcacttatggcagaggaatatcaatcctaatgacttctaaaaatgtaactaattgaatcattatcttacatttactgtttaataagcatattttgaaaatgtatggctagagtgtcataataaaatggtatatctttctttagtaattacattaaaattagtcatgtttgattaattagttcttttggataatgttggtgtaatgtgtcattccttaagaattctactgttatataccatttttattaaggtcattgcaataaataaacatgaaaacatacccagaaaaa

SEQ ID NO: 311543 - DNA, 6860 bp, Homo sapiens
  misc_feature (4511)..(4511): n is a, c, g, or t
ggtcgacacagttccatggaataactaagaattcatgtcctgtggaaaggaagtacatttgaagaacgcaagtagagggagtgcaggaaacaagaactacaggatgtaggaagaccctcctgaggagtgaagagtgacatgccaccgcaggatcctttgctctgcacgagttacctgttaaactttggaacacctaccaaaaaataagtttgataacatttaaaagatgggcgtttcccccaatgaaatacacaagtaaacattccaacattgtctttaggagtgatttgcaccttgcaaaaatggtcctggagttggtagattgctgttgatcttttatcaataatgttctatagaaaagaaaaaaaaaatatatatatatatatatcttagtccctgcctctcaagagccacaaatgcatgggtgttgtatagatccagttgcactaaattcctctctgaatcttggctgctggagccattcattcagcaaccttgtctaagtggtttatgaattgtttccttatttgcacttctttctacacaactcgggctgtttgttttacagtgtctgataatcttgttagtctatacccaccacctcccttcataacctttatatttgccgaatttggcctcctcaaaagcagcagcaagtcgtcaagaagcacaccaattctaacccacaagattccatctgtggcatttgtaccaaatataagttggatgcattttattttagacacaaagctttatttttccacatcatgcttacaaaaaagaataatgcaaatagttgcaactttgaggccaatcatttttaggcatatgttttaaacatagaaagtttcttcaactcaaaagagttccttcaaatgatgagttaatgtgcaacctaattagtaactttcctctttttattttttccatatagagcactatgtaaatttagcatatcaattatacaggatatatcaaacagtatgtaaaactctgttttttagtataatggtgctattttgtagtttgttatatgaaagagtctggccaaaacggtaatacgtgaaagcaaaacaataggggaagcctggagccaaagatgacacaaggggaagggtactgaaaacaccatccatttgggaaagaaggcaaagtccccccagttatgccttccaagaggaacttcagacacaaaagtccactgatgcaaattggactggcgagtccagagaggaaactgtggaatggaaaaagcagaaggctaggaattttagcagtcctggtttctttttctcatggaagaaatgaacatctgccagctgtgtcatggactcaccactgtgtgaccttgggcaagtcacttcacctctctgtgcctcagtttcctcatctgcaaaatgggggcaatatgtcatctacctacctcaaaggggtggtataaggtttaaaaagataaagattcagatttttttaccctgggttgctgtaagggtgcaacatcagggcgcttgagttgctgagatgcaaggaattctataaataacccattcatagcatagctagagattggtgaattgaatgctcctgacatctcagttcttgtcagtgaagctatccaaataactggccaactagttgttaaaagctaacagctcaatctcttaaaacacttttcaaaatatgtgggaagcatttgattttcaatttgattttgaattctgcatttggttttatgaatacaaagataagtgaaaagagagaaaggaaaagaaaaaggagaaaaacaaagagatttctaccagtgaaaggggaattaattactctttgttagcactcactgactcttctatgcagttactacatatctagtaaaaccttgtttaatactataaataatattctattcattttgaaaaacacaatgattccttcttttctaggcaatataaggaaagtgatccaaaatttgaaatattaaaataatatctaataaaaagtcacaaagttatcttctttaacaaactttactcttattcttagctgtatatacatttttttaaaagtttgttaaaatatgcttgactagagtttccagttgaaaggcaaaaacttccatcacaacaagaaatttcccatgcctgctcagaagggtagcccctagctctctgtgaatgtgttttatccattcaactgaaaattggtatcaagaaagtccactggttagtgtactagtccatcatagcctagaaaatgatccctatctgcagatcaagattttctcattagaacaatgaattatccagcattcagatctttctagtcaccttagaactttttggttaaaagtacccaggcttgattatttcatgcaaattctatattttacattcttggaaagtctatatgaaaaacaaaaataacatcttcagtttttctcccactgggtcacctcaaggatcagaggccaggaaaaaaaaaaaaaagactccctggatctctgaatatatgcaaaaagaaggccccatttagtggagccagcaatcctgttcagtcaacaagtattttaactctcagtccaacattatttgaattgagcacctcaagcatgcttagcaatgttctaatcactatggacagatgtaaaagaaactatacatcatttttgccctctgcctgttttccagacatacaggttctgtggaataagatactggactcctcttcccaagatggcacttctttttatttcttgtccccagtgtgtaccttttaaaattattccctctcaacaaaactttataggcagtcttctgcagacttaacgtgttttctgtcatagttagatgtgataattctaagagtgtctatgacttatttccttcacttaattctatccacagtcaaaaatcccccaaggaggaaagctgaaagatgcactgccatattatctttcttaactttttccaacacataatcctctccaactggattataaataaattgaaaataactcattataccaattcactattttattttttaatgaattaaaactagaaaacaaattgatgcaaaccctggaagtcagttgattactatatactacagcagaatgactcagatttcatagaaaggagcaaccaaaatgtcacaacccaaaactttacaagctttgcttcagaattagattgctttataattcttgaatgaggcaatttcaagatatttgtaaaagaacagtaaacattggtaagaatgagctttcaactcataggcttatttccaatttaattgaccatactggatacttaggtcaaatttctgttctctcttccccaaataatattaaagtattatttgaactttttaagatgaggcagttcccctgaaaaagttaatgcagctctccatcagaatccactcttctagggatatgaaaatctcttaacacccaccctacatacacagacacacacacacacacacacacacacacacacacacacacacattcaccctaaggatccaatggaatactgaaaagaaatcacttccttgaaaattttattaaaaaacaaacaaacaaacaaaaagcctgtccacccttgagaatccttcctctccttggaacgtcaatgtttgtgtagatgaaaccatctcatgctctgtggctccagggtttctgttactattttatgcacttgggagaaggcttagaataaaagatgtagcacattttgctttcccatttattgtttggccagctatgccaatgtggtgctattgtttctttaagaaagtacttgactaaaaaaaaaagaaaaaaagaaaaaaaagaaagcatagacatatttttttaaagtataaaaacaacaattctatagatagatggcttaataaaatagcattaggtctatctagccaccaccacctttcaactttttatcactcacaagtagtgtactgttcaccaaattgtgaatttgggggtgcaggggcaggagttggaaattttttaaagttagaaggctccattgttttgttggctctcaaacttagcaaaattagcaatatattatccaatcttctgaacttgatcaagagcatggagaataaacgcgggaaaaaagatcttataggcaaatagaagaatttaaaagataagtaagttccttattgatttttgtgcactctgctctaaaacagatattcagcaagtggagaaaataagaacaaagagaaaaaatacatagatttacctgcaaaaaatagcttctgccaaatcccccttgggtattctttggcatttactggtttatagaagacattctcccttcacccagacatctcaaagagcagtagctctcatgaaaagcaatcactgatctcatttgggaaatgttggaaagtatttccttatgagatgggggttatctactgataaagaaagaatttatgagaaattgttgaaagagatggctaacaatctgtgaagattttttgtttcttgnttttgttttttttttttttttactttatacagtctttatgaatttcttaatgttcaaaatgacttggttcttttcttctttttttatatcagaatgaggaataataagttaaacccacatagactctttaaaactataggctagatagaaatgtatgtttgacttgttgaagctataatcagactatttaaaatgttttgctatttttaatcttaaaagattgtgctaatttattagagcagaacctgtttggctctcctcagaagaaagaatctttccattcaaatcacatggctttccaccaatattttcaaaagataaatctgatttatgcaatggcatcatttattttaaaacagaagaattgtgaaagtttatgcccctcccttgcaaagaccataaagtccagatctggtaggggggcaacaacaaaaggaaaatgttgttgattcttggttttggattttgttttgttttcaatgctagtgtttaatcctgtagtacatatttgcttattgctattttaatattttataagaccttcctgttaggtattagaaagtgatacatagatatcttttttgtgtaatttctatttaaaaaagagagaagactgtcagaagctttaagtgcatatggtacaggataaagatatcaatttaaataaccaattcctatctggaacaatgcttttgttttttaaagaaacctctcacagataagacagaggcccaggggatttttgaagctgtctttattctgcccccatcccaacccagcccttattattttagtatctgcctcagaattttatagagggctgaccaagctgaaactctagaattaaaggaacctcactgaaaacatatatttcacgtgttccctctttttttttttcctttttgtgagatggggtctcgcactgtcccccaggctggagtgcagtggcatgatctcggctcactgcaacctccacctcctgggtttaagcgattctcctgcctcagcctcctgagtagctgggattacaggcacccaccactatgcccggctaattttttggatttttaatagagacggggttttaccatgttggccaggttggtctcaaactcctgaccttgtgatttgcccgcctcagcctcccaaattgctgggattacaggcatgagccaccacaccctgcccatgtgttccctcttaatgtatgattacatggatcttaaacatgatccttctctcctcattcttcaactatctttgatggggtctttcaaggggaaaaaaatccaagcttttttaaagtaaaaaaaaaaaaagagaggacacaaaaccaaatgttactgctcaactgaaatatgagttaagatggagacagagtttctcctaataaccggagctgaattacctttcactttcaaaaacatgaccttccacaatccttagaatctgcctttttttatattactgaggcctaaaagtaaacattactcattttattttgcccaaaatgcactgatgtaaagtaggaaaaataaaaacagagctctaaaatccctttcaagccacccattgaccccactcaccaactcatagcaaagtcacttctgttaatcccttaatctgattttgtttggatatttatcttgtacccgctgctaaacacactgcaggagggactctgaaacctcaagctgtctacttacatcttttatctgtgtctgtgtatcatgaaaatgtctattcaaaatatcaaaacctttcaaatatcacgcagcttatattcagtttacataaaggccccaaataccatgtcagatctttttggtaaaagagttaatgaactatgagaattgggattacatcatgtattttgcctcatgtatttttatcacacttataggccaagtgtgataaataaacttacagacactgaattaatttcccctgctactttgaaaccagaaaataatgactggccattcgttacatctgtcttagttgaaaagcatattttttattaaattaattctgattgtatttgaaattattattcaattcacttatggcagaggaatatcaatcctaatgacttctaaaaatgtaactaattgaatcattatcttacatttactgtttaataagcatattttgaaaatgtatggctagagtgtcataataaaatggtatatctttctttagtaattacattaaaattagtcatgtttgattaattagttcttttggataatgttggtgtaatgtgtcattccttaagaattctactgttatataccatttttattaaggtcattgcaataaataaacatgaaaacatacccagaaaaa

SEQ ID NO: 311544 - DNA, 1234 bp, Homo sapiens
ggccgggcgcggtggctcacgcctgtaatcccaaattgctgggattacaggcatgagccaccacaccctgcccatgtgttccctcttaatgtatgattacatggatcttaaacatgatccttctctcctcattcttcaactatctttgatggggtctttcaaggggaaaaaaatccaagcttttttaaagtaaaaaaaaaaaaagagaggacacaaaaccaaatgttactgctcaactgaaatatgagttaagatggagacagagtttctcctaataaccggagctgaattacctttcactttcaaaaacatgaccttccacaatccttagaatctgcctttttttatattactgaggcctaaaagtaaacattactcattttattttgcccaaaatgcactgatgtaaagtaggaaaaataaaaacagagctctaaaatccctttcaagccacccattgaccccactcaccaactcatagcaaagtcacttctgttaatcccttaatctgattttgtttggatatttatcttgtacccgctgctaaacacactgcaggagggactctgaaacctcaagctgtctacttacatcttttatctgtgtctgtgtatcatgaaaatgtctattcaaaatatcaaaacctttcaaatatcacgcagcttatattcagtttacataaaggccccaaataccatgtcagatctttttggtaaaagagttaatgaactatgagaattgggattacatcatgtattttgcctcatgtatttttatcacacttataggccaagtgtgataaataaacttacagacactgaattaatttcccctgctactttgaaaccagaaaataatgactggccattcgttacatctgtcttagttgaaaagcatattttttattaaattaattctgattgtatttgaaattattattcaattcacttatggcagaggaatatcaatcctaatgacttctaaaaatgtaactaattgaatcattatcttacatttactgtttaataagcatattttgaaaatgtatggctagagtgtcataataaaatggtatatctttctttagtaattacattaaaattagtcatgtttgattaattagttcttttggataatgttggtgtaatgtgtcattccttaagaattctactgttatataccatttttattaaggtcattgcaataaataaacatgaaaacatacccagaaaaa

SEQ ID NO: 311545 - DNA, 1400 bp, Homo sapiens
acagtgtctgtgttttgtagataaatgtgaggattttctctaaatccctcttctgtttgctaaatctcactgtcactgctaaattcagagcagatagagcctgcgcaatggaataaagtcctcaaaattgaaatgtgacattgctctcaacatctcccatctctctggatttctttttgcttcattattcctgctaaccaattcattttcagactttgtacttcagaagcaatgggaaaaatcagcagtcttccaacccaattatttaagtgctgcttttgtgatttcttgaaggtaaatatttcttactctttgaagtcattggggaattctatttaaattgtgtactgtttgcttctgcctagaactgttcttcactttaaaattttcattgtttcggaaccgagagttatttataaattgctgaatatgcaattctgtggaatctgaaaaatagctcggggagatggatgcatttgcacagatatctgtatgagtagaaactattgcaaggtacttatgctaaatcctccacttctgcagggcttccgtggtgtcattacagaagattcctttaaatcctctctatggctaagggctatagagcatggatatgaacttggggattttttttttcttttgcaggtgcagatgttttatttttaagaccatgttcttttgcatgtgtgtatgtgtctctgtgtgtatgtgtctctgtgtgtgtaactcatcaggactttatttacaaggcatgctatatatgaagggttgtattttagatgatattaaagcttttaaatatgatctttggagctaaggtcccggaactctgcacttatgcccagagagagtgttaaagttagagtaaagtgtaatttgttcttccaaaaaagaactccttgacaactcttgctgaccttgcatatttgtataatttaaacaaatacatactgtatatggaaagcagaaactttctaagagctgcttgcccaacttttctgtttagaagaggactttcatgggcaaagtttggacttggggttctgtgttataaaactctgattttatattcagtgtcgtgaagtccctttaggtaaatctggctgctgctgtcagtgcaccgacttctcgtttccgattgctggccgtagttctagtttccattctcagcaaaattatatccttcaagacttgtgtttttttttcaatttgcaagcgcttttaagctgctgtcactggctccaccgattcaattgcctgagggctcaattcataagacgtctctgccacttagtgcagcattcagttgctgctttcaaacacttcaccactacgactttccctagtcaagtaagtggctccaggagttaaagatacacccttgtcaggcacctgattct

SEQ ID NO: 311546 - DNA, 588 bp, Homo sapiens
caatcaatgaatctgtgatagaagcagatgaatcaaatctcatctttgtgtgattataaagctgtctgtggtattcacgccaccaggggtacatagaagatgcctgagtgaggtttggcaaaagtactaagggcctgtccacctatacatgcccttctcaggaaaaccaaggttcaagctctctattagctcaactggtaaggcgtaagacatggaaggttgaggcccaatgttagaaatagatggatacataaaacttcatcaagttaatgtcactttttctcctttatttataggaagtacatttgaagaacgcaagtagagggagtgcaggaaacaagaactacaggatgtaggaagaccctcctgaggagtgaagagtgacatgccaccgcaggatcctttgctctgcacgagttacctgttaaactttggaacacctaccaaaaaataagtttgataacatttaaaagatgggcgtttcccccaatgaaatacacaagtaaacattccaacattgtctttaggagtgatttgcaccttgcaaaaatggtcctggagttggtagattgctgttgatcttttatc

SEQ ID NO: 311547 - DNA, 316 bp, Homo sapiens
acatgaggccactctgtttgatttgtgcagacaagcccacagggtatggctccagcagtcggagggcgcctcagacaggcatcgtggatgagtgctgcttccggagctgtgatctaaggaggctggagatgtattgcgcacccctcaagcctgccaagtcagctcgctctgtccgtgcccagcgccacaccgacatgcccaagacccagaaggtaagcccacctgggtgggatccagccatcctcaagtggtctctctcttgtgcatgtgggtgggccaagcagaaatcctgccccatagtctcctggcttacaag

SEQ ID NO: 311548 - DNA, 1145 bp, Homo sapiens
acagtgtctgtgttttgtagataaatgtgaggattttctctaaatccctcttctgtttgctaaatctcactgtcactgctaaattcagagcagatagagcctgcgcaatggaataaagtcctcaaaattgaaatgtgacattgctctcaacatctcccatctctctggatttctttttgcttcattattcctgctaaccaattcattttcagactttgtacttcagaagcaatgggaaaaatcagcagtcttccaacccaattatttaagtgctgcttttgtgatttcttgaaggtgaagatgcacaccatgtcctcctcgcatctcttctacctggcgctgtgcctgctcaccttcaccagctctgccacggctggaccggagacgctctgcggggctgagctggtggatgctcttcagttcgtgtgtggagacaggggcttttatttcaacaagcccacagggtatggctccagcagtcggagggcgcctcagacaggcatcgtggatgagtgctgcttccggagctgtgatctaaggaggctggagatgtattgcgcacccctcaagcctgccaagtcagctcgctctgtccgtgcccagcgccacaccgacatgcccaagacccagaagtatcagcccccatctaccaacaagaacacgaagtctcagagaaggaaaggttggccaaagacacatccaggaggggaacagaaggaggggacagaagcaagtctgcagatcagaggaaagaagaaagagcagaggagggagattggaagtagaaatgctgaatgcagaggcaaaaaaggaaaatgaaggacaggaggattaaacagacagaggcaaggatgatgagagaggagcagacagcaagaatgaaaagcagaaaatacaatagaggaaatgaagaaaagtaggcctgctggagctagatgatgatgtgatggaaatagaagtaaccttttagagaatctcgctaagaaacatggagaaaacggaaaagaaaaatgtaatgccctagaaagcgcaaagaaagacagtggcaaaaatgaaaaaaaaaataaaaattataaaagaggcaaaaaaagacacactattctctgcctctaaaacacaattaaataaaagaatttaaataaaaa

SEQ ID NO: 311549 - DNA, 7386 bp, Homo sapiens
  misc_feature (5095)..(5095): n is a, c, g, or t
acagtgtctgtgttttgtagataaatgtgaggattttctctaaatccctcttctgtttgctaaatctcactgtcactgctaaattcagagcagatagagcctgcgcaatggaataaagtcctcaaaattgaaatgtgacattgctctcaacatctcccatctctctggatttctttttgcttcattattcctgctaaccaattcattttcagactttgtacttcagaagcaatgggaaaaatcagcagtcttccaacccaattatttaagtgctgcttttgtgatttcttgaaggtgaagatgcacaccatgtcctcctcgcatctcttctacctggcgctgtgcctgctcaccttcaccagctctgccacggctggaccggagacgctctgcggggctgagctggtggatgctcttcagttcgtgtgtggagacaggggcttttatttcaacaagcccacagggtatggctccagcagtcggagggcgcctcagacaggcatcgtggatgagtgctgcttccggagctgtgatctaaggaggctggagatgtattgcgcacccctcaagcctgccaagtcagctcgctctgtccgtgcccagcgccacaccgacatgcccaagacccagaaggaagtacatttgaagaacgcaagtagagggagtgcaggaaacaagaactacaggatgtaggaagaccctcctgaggagtgaagagtgacatgccaccgcaggatcctttgctctgcacgagttacctgttaaactttggaacacctaccaaaaaataagtttgataacatttaaaagatgggcgtttcccccaatgaaatacacaagtaaacattccaacattgtctttaggagtgatttgcaccttgcaaaaatggtcctggagttggtagattgctgttgatcttttatcaataatgttctatagaaaagaaaaaaaaaatatatatatatatatatcttagtccctgcctctcaagagccacaaatgcatgggtgttgtatagatccagttgcactaaattcctctctgaatcttggctgctggagccattcattcagcaaccttgtctaagtggtttatgaattgtttccttatttgcacttctttctacacaactcgggctgtttgttttacagtgtctgataatcttgttagtctatacccaccacctcccttcataacctttatatttgccgaatttggcctcctcaaaagcagcagcaagtcgtcaagaagcacaccaattctaacccacaagattccatctgtggcatttgtaccaaatataagttggatgcattttattttagacacaaagctttatttttccacatcatgcttacaaaaaagaataatgcaaatagttgcaactttgaggccaatcatttttaggcatatgttttaaacatagaaagtttcttcaactcaaaagagttccttcaaatgatgagttaatgtgcaacctaattagtaactttcctctttttattttttccatatagagcactatgtaaatttagcatatcaattatacaggatatatcaaacagtatgtaaaactctgttttttagtataatggtgctattttgtagtttgttatatgaaagagtctggccaaaacggtaatacgtgaaagcaaaacaataggggaagcctggagccaaagatgacacaaggggaagggtactgaaaacaccatccatttgggaaagaaggcaaagtccccccagttatgccttccaagaggaacttcagacacaaaagtccactgatgcaaattggactggcgagtccagagaggaaactgtggaatggaaaaagcagaaggctaggaattttagcagtcctggtttctttttctcatggaagaaatgaacatctgccagctgtgtcatggactcaccactgtgtgaccttgggcaagtcacttcacctctctgtgcctcagtttcctcatctgcaaaatgggggcaatatgtcatctacctacctcaaaggggtggtataaggtttaaaaagataaagattcagatttttttaccctgggttgctgtaagggtgcaacatcagggcgcttgagttgctgagatgcaaggaattctataaataacccattcatagcatagctagagattggtgaattgaatgctcctgacatctcagttcttgtcagtgaagctatccaaataactggccaactagttgttaaaagctaacagctcaatctcttaaaacacttttcaaaatatgtgggaagcatttgattttcaatttgattttgaattctgcatttggttttatgaatacaaagataagtgaaaagagagaaaggaaaagaaaaaggagaaaaacaaagagatttctaccagtgaaaggggaattaattactctttgttagcactcactgactcttctatgcagttactacatatctagtaaaaccttgtttaatactataaataatattctattcattttgaaaaacacaatgattccttcttttctaggcaatataaggaaagtgatccaaaatttgaaatattaaaataatatctaataaaaagtcacaaagttatcttctttaacaaactttactcttattcttagctgtatatacatttttttaaaagtttgttaaaatatgcttgactagagtttccagttgaaaggcaaaaacttccatcacaacaagaaatttcccatgcctgctcagaagggtagcccctagctctctgtgaatgtgttttatccattcaactgaaaattggtatcaagaaagtccactggttagtgtactagtccatcatagcctagaaaatgatccctatctgcagatcaagattttctcattagaacaatgaattatccagcattcagatctttctagtcaccttagaactttttggttaaaagtacccaggcttgattatttcatgcaaattctatattttacattcttggaaagtctatatgaaaaacaaaaataacatcttcagtttttctcccactgggtcacctcaaggatcagaggccaggaaaaaaaaaaaaaagactccctggatctctgaatatatgcaaaaagaaggccccatttagtggagccagcaatcctgttcagtcaacaagtattttaactctcagtccaacattatttgaattgagcacctcaagcatgcttagcaatgttctaatcactatggacagatgtaaaagaaactatacatcatttttgccctctgcctgttttccagacatacaggttctgtggaataagatactggactcctcttcccaagatggcacttctttttatttcttgtccccagtgtgtaccttttaaaattattccctctcaacaaaactttataggcagtcttctgcagacttaacgtgttttctgtcatagttagatgtgataattctaagagtgtctatgacttatttccttcacttaattctatccacagtcaaaaatcccccaaggaggaaagctgaaagatgcactgccatattatctttcttaactttttccaacacataatcctctccaactggattataaataaattgaaaataactcattataccaattcactattttattttttaatgaattaaaactagaaaacaaattgatgcaaaccctggaagtcagttgattactatatactacagcagaatgactcagatttcatagaaaggagcaaccaaaatgtcacaacccaaaactttacaagctttgcttcagaattagattgctttataattcttgaatgaggcaatttcaagatatttgtaaaagaacagtaaacattggtaagaatgagctttcaactcataggcttatttccaatttaattgaccatactggatacttaggtcaaatttctgttctctcttccccaaataatattaaagtattatttgaactttttaagatgaggcagttcccctgaaaaagttaatgcagctctccatcagaatccactcttctagggatatgaaaatctcttaacacccaccctacatacacagacacacacacacacacacacacacacacacacacacacacacattcaccctaaggatccaatggaatactgaaaagaaatcacttccttgaaaattttattaaaaaacaaacaaacaaacaaaaagcctgtccacccttgagaatccttcctctccttggaacgtcaatgtttgtgtagatgaaaccatctcatgctctgtggctccagggtttctgttactattttatgcacttgggagaaggcttagaataaaagatgtagcacattttgctttcccatttattgtttggccagctatgccaatgtggtgctattgtttctttaagaaagtacttgactaaaaaaaaaagaaaaaaagaaaaaaaagaaagcatagacatatttttttaaagtataaaaacaacaattctatagatagatggcttaataaaatagcattaggtctatctagccaccaccacctttcaactttttatcactcacaagtagtgtactgttcaccaaattgtgaatttgggggtgcaggggcaggagttggaaattttttaaagttagaaggctccattgttttgttggctctcaaacttagcaaaattagcaatatattatccaatcttctgaacttgatcaagagcatggagaataaacgcgggaaaaaagatcttataggcaaatagaagaatttaaaagataagtaagttccttattgatttttgtgcactctgctctaaaacagatattcagcaagtggagaaaataagaacaaagagaaaaaatacatagatttacctgcaaaaaatagcttctgccaaatcccccttgggtattctttggcatttactggtttatagaagacattctcccttcacccagacatctcaaagagcagtagctctcatgaaaagcaatcactgatctcatttgggaaatgttggaaagtatttccttatgagatgggggttatctactgataaagaaagaatttatgagaaattgttgaaagagatggctaacaatctgtgaagattttttgtttcttgnttttgttttttttttttttttactttatacagtctttatgaatttcttaatgttcaaaatgacttggttcttttcttctttttttatatcagaatgaggaataataagttaaacccacatagactctttaaaactataggctagatagaaatgtatgtttgacttgttgaagctataatcagactatttaaaatgttttgctatttttaatcttaaaagattgtgctaatttattagagcagaacctgtttggctctcctcagaagaaagaatctttccattcaaatcacatggctttccaccaatattttcaaaagataaatctgatttatgcaatggcatcatttattttaaaacagaagaattgtgaaagtttatgcccctcccttgcaaagaccataaagtccagatctggtaggggggcaacaacaaaaggaaaatgttgttgattcttggttttggattttgttttgttttcaatgctagtgtttaatcctgtagtacatatttgcttattgctattttaatattttataagaccttcctgttaggtattagaaagtgatacatagatatcttttttgtgtaatttctatttaaaaaagagagaagactgtcagaagctttaagtgcatatggtacaggataaagatatcaatttaaataaccaattcctatctggaacaatgcttttgttttttaaagaaacctctcacagataagacagaggcccaggggatttttgaagctgtctttattctgcccccatcccaacccagcccttattattttagtatctgcctcagaattttatagagggctgaccaagctgaaactctagaattaaaggaacctcactgaaaacatatatttcacgtgttccctctttttttttttcctttttgtgagatggggtctcgcactgtcccccaggctggagtgcagtggcatgatctcggctcactgcaacctccacctcctgggtttaagcgattctcctgcctcagcctcctgagtagctgggattacaggcacccaccactatgcccggctaattttttggatttttaatagagacggggttttaccatgttggccaggttggtctcaaactcctgaccttgtgatttgcccgcctcagcctcccaaattgctgggattacaggcatgagccaccacaccctgcccatgtgttccctcttaatgtatgattacatggatcttaaacatgatccttctctcctcattcttcaactatctttgatggggtctttcaaggggaaaaaaatccaagcttttttaaagtaaaaatggagacagagtttctcctaataaccggagctgaattacctttcactttcaaaaacatgaccttccacaatccttagaatctgcctttttttatattactgaggcctaaaagtaaacattactcattttattttgcccaaaatgcactgatgtaaagtaggaaaaataaaaacagagctctaaaatccctttcaagccacccattgaccccactcaccaactcatagcaaagtcacttctgttaatcccttaatctgattttgtttggatatttatcttgtacccgctgctaaacacactgcaggagggactctgaaacctcaagctgtctacttacatcttttatctgtgtctgtgtatcatgaaaatgtctattcaaaatatcaaaacctttcaaatatcacgcagcttatattcagtttacataaaggccccaaataccatgtcagatctttttggtaaaagagttaatgaactatgagaattgggattacatcatgtattttgcctcatgtatttttatcacacttataggccaagtgtgataaataaacttacagacactgaattaatttcccctgctactttgaaaccagaaaataatgactggccattcgttacatctgtcttagttgaaaagcatattttttattaaattaattctgattgtatttgaaattattattcaattcacttatggcagaggaatatcaatcctaatgacttctaaaaatgtaactaattgaatcattatcttacatttactgtttaataagcatattttgaaaatgtatggctagagtgtcataataaaatggtatatctttctttagtaattacattaaaattagtcatgtttgattaattagttcttttggataatgttggtgtaatgtgtcattccttaagaattctactgttatataccatttttattaaggtcattgcaataaataaacatgaaaacatacccagaaaaa

SEQ ID NO: 311550 - DNA, 406 bp, Homo sapiens
ctgcctcctcagcctcattctccattcactcaccatgcttctggagctgcctctcttcctctgctaaaccaagccctttgctgactggatgtgctcagtttcaggagcctgggatcccttctgtcctctcacctgtcagggcttggctcatatgtcaccttctttgatcacccccacagtcaatcagtgcctctttctctctctctctctctatacacacacacacacacagccacacacacagaaaatatactgtaaagaaagagagaaaataaaaagttaaaaagttaaaaaaaaaaaaaaacctgttaactccaagggagcaccacccacagaacctccaccaactgacagtttctcttcttgacttgccacccatctccccagtcttttgtttaacaaaaaa

SEQ ID NO: 311551 - DNA, 2712 bp, Homo sapiens
cgactgaggcggcgggcggagcggcaggcggcggcggcgcggcagcggagcgcagcatcatggcggaccgagacagcggcagcgagcagggtggtgcggcgctgggttcgggcggctccctggggcaccccggctcgggctcaggctccggcgggggcggtggtggcggcgggggcggcggcggcagtggcggcggcggcggcggggccccaggggggctgcagcacgagacgcaggagctggcctccaagcgggtggacatccagaacaagcgcttctacctggacgtgaagcagaacgccaagggccgcttcctgaagatcgccgaggtgggcgcgggcggcaacaagagccgccttactctctccatgtcagtggccgtggagttccgcgactacctgggcgacttcatcgagcactacgcgcagctgggccccagccagccgccggacctggcccaggcgcaggacgagccgcgccgggcgctcaaaagcgagttcctggtgcgcgagaaccgcaagtactacatggatctcaaggagaaccagcgcggccgcttcctgcgcatccgccagacggtcaaccgggggcctggcctgggctccacgcagggccagaccattgcgctgcccgcgcaggggctcatcgagttccgtgacgctctggccaagctcatcgacgactacggagtggaggaggagccggccgagctgcccgagggcacctccttgactgtggacaacaagcgcttcttcttcgatgtgggctccaacaagtacggcgtgtttatgcgagtgagcgaggtgaagcccacctatcgcaactccatcaccgtgccctacaaggtgtgggccaagttcggacacaccttctgcaagtactcggaggagatgaagaagattcaagagaagcagagggagaagcgggctgcctgtgagcagcttcaccagcagcaacagcagcagcaggaggagaccgccgctgccaccctgctactgcagggtgaggaagaaggggaagaagattgatcaaactgaatgaaacccccacacacacacacatgcatacacacacacacacagccacacacacagaaaatatactgtaaagaaagagagaaaataaaaagttaaaaagttaaaaaaaaaaaaaaacctgttaactccaagggagcaccacccacagaacctccaccaactgacagtttctcttcttgacttgccacccatcgctggatgttgtccactttatccaccatataaaacagtaagcagctgctaaaaacaaaaaaaatacaaaaagtaataacattatatgaactgtgtttcctacttgattaaaaaatataaagaactgagtgtttatttccctaattaaccaagaacttttgtacacgtttaagctattattattaaaaagtgtttgcaaaatggtcaagattataatattgctgaattatataaaagtccttttcatgttgagctaacatttgactttagcacaaaaaagagatattttagaacacgtaaaataatatttttagtttttctcattttgttaccaaatttcaaaccttacatggaggttattatagtatatttgacaccctatatacctgtgattagagatgtgtatatatatgagggctaggcatgctgtgtgtctgagctttgtctaaatgttatgcagaagtttgtagagttaaaggtacgtaggtttaattcatgcaaggtaaacaataagtgctctcttttatacaatatgcattgcatctggaccttaaacttataaaaatggtcagtgaaacttctgtgaacatgaagaaattattaaaaaaggcatttaaatgaaatttgctaagttgtgatttttatggttggaaccaaagttattcaaatagtaaaaggaaaaagaaagaaaaaggagatctcccataatatttttctgcatctgtttgctttgactgagtaggcgttttgtcattattgtgtatatgagatgtacttgtatcgttcataatatattttttttattatgtgtagaaagattttaaaaaactaacgtgcagcaatttccagtgaacctgtacttggacatcaggtagtgagtctatttgtggtcactagcactgtctcctaaacttgtaagaggtctgaagctattctttgatttttgctagtgctattaacttatgtagacctgttaaaaagcagagcaacacaattatagttatcctactgagccatggattctgagttttgttttaaaagtgaaagccaagttggtgtatgtaaaggatttccatgtagctgtggtgctagttattactggctacattatatgctaagtgtatttgtgttccccaagtgtacaagccttctatcaaaagtatgttctataactcatatattcaaggtgtagggtatgaaaatgcaaagtttaggagagcactttaccaagctggtgtcctccaaactgaaattgtttgtaacgatagtcttttacaggttttcctttaaagatgtttgtgtgcttttaattgacaactaacttcttgctgctgtatagtaaaatattaatatatttttatcattaaactgctgcatgactatcatctttgagtgaagagaaaatgttataaaaaagatgccttaaacagtacattttggtttggaattctgtagaaagtattttggtaaaaaaaaaaaaaaa

SEQ ID NO: 311552 - DNA, 2614 bp, Homo sapiens
cgactgaggcggcgggcggagcggcaggcggcggcggcgcggcagcggagcgcagcatcatggcggaccgagacagcggcagcgagcagggtggtgcggcgctgggttcgggcggctccctggggcaccccggctcgggctcaggctccggcgggggcggtggtggcggcgggggcggcggcggcagtggcggcggcggcggcggggccccaggggggctgcagcacgagacgcaggagctggcctccaagcgggtggacatccagaacaagcgcttctacctggacgtgaagcagaacgccaagggccgcttcctgaagatcgccgaggtgggcgcgggcggcaacaagagccgccttactctctccatgtcagtggccgtggagttccgcgactacctgggcgacttcatcgagcactacgcgcagctgggccccagccagccgccggacctggcccaggcgcaggacgagccgcgccgggcgctcaaaagcgagttcctggtgcgcgagaaccgcaagtactacatggatctcaaggagaaccagcgcggccgcttcctgcgcatccgccagacggtcaaccgggggcctggcctgggctccacgcagggccagaccattgcgctgcccgcgcaggggctcatcgagttccgtgacgctctggccaagctcatcgacgactacggagtggaggaggagccggccgagctgcccgagggcacctccttgactgtggacaacaagcgcttcttcttcgatgtgggctccaacaagtacggcgtgtttatgcgagtgagcgaggtgaagcccacctatcgcaactccatcaccgtgccctacaaggtgtgggccaagttcggacacaccttctgcaagtactcggaggagatgaagaagattcaagagaagcagagggagaagcgggctgcctgtgagcagcttcaccagcagcaacagcagcagcaggaggagaccgccgctgccaccctgctactgcagggtgaggaagaaggggaagaagattgatcaaactgaatgaaacccccacacacacacacatgcatacacacacacacacagccacacacacagaaaatatactgtaaagaaagagagaaaataaaaagttaaaaagttaaaaaaaaaaaaaaacctgttaactccaagggagcaccacccacagaacctccaccaactgacagtttctcttcttgacttgccacccatcgctggatgttgtccactttatccaccatataaaacagtaagcagctgctaaaaacaaaaaaaatacaaaaagtaataacattatatgaactgtgtttcctacttgattaaaaaatataaagaactgagtgtttatttccctaattaaccaagaacttttgtacacgtttaagctattattattaaaaagtgtttgcaaaatggtcaagattataatattgctgaattatataaaagtccttttcatgttgagctaacatttgactttagcacaaaaaagagatattttagaacacgtaaaataatatttttagtttttctcattttgttaccaaatttcaaaccttacatggaggttattatagtatatttgacaccctatatacctgtgattagagatgtgtatatatatgagggctaggcatgctgtgtgtctgagctttgtctaaatgttatgcagaagtttgtagagttaaaggtacgtaggtttaattcatgcaaggtaaacaataagtgctctcttttatacaatatgcattgcatctggaccttaaacttataaaaatggtcagtgaaacttctgtgaacatgaagaaattattaaaaaaggcatttaaatgaaatttgctaagttgtgatttttatggttggaaccaaagttattcaaatagtaaaaggaaaaagaaagaaaaaggagatctcccataatatttttctgcatctgtttgctttgactgagtaggcgttttgtcattattgtgtatatgagatgtacttgtatcgttcataatatattttttttattatgtgtagaaagattttaaaaaactaacgtgcagcaatttccagtgaacctgtacttggacatcaggtagtgagtctatttgtggtcactagcactgtctcctaaacttgtaagaggtctgaagctattctttgatttttgctagtgctattaacttatgtagacctgttaaaaagcagagcaacacaattatagttatcctactgagccatggattctgagttttgttttaaaagtgaaagccaagttggtgtatgtaaaggatttccatgtagctgtggtgctagttattactggctacattatatgctaagtgtatttgtgttccccaagtgtacaagccttctatcaaaagtatgttctataactcatatattcaaggtgtagggtatgaaaatgcaaagtttaggagagcactttaccaagctggtgtcctccaaactgaaattgtttgtaacgatagtcttttacaggttttcctttaaagatgtttgtgtgcttttaattgacaactaacttcttgctgctgtatagtaaaatattaatatatttttatcattaaactgctgcatgactatca

SEQ ID NO: 311553 - DNA, 1850 bp, Homo sapiens
cgactgaggcggcgggcggagcggcaggcggcggcggcgcggcagcggagcgcagcatcatggcggaccgagacagcggcagcgagcagggtggtgcggcgctgggttcgggcggctccctggggcaccccggctcgggctcaggctccggcgggggcggtggtggcggcgggggcggcggcggcagtggcggcggcggcggcggggccccaggggggctgcagcacgagacgcaggagctggcctccaagcgggtggacatccagaacaagcgcttctacctggacgtgaagcagaacgccaagggccgcttcctgaagatcgccgaggtgggcgcgggcggcaacaagagccgccttactctctccatgtcagtggccgtggagttccgcgactacctgggcgacttcatcgagcactacgcgcagctgggccccagccagccgccggacctggcccaggcgcaggacgagccgcgccgggcgctcaaaagcgagttcctggtgcgcgagaaccgcaagtactacatggatctcaaggagaaccagcgcggccgcttcctgcgcatccgccagacggtcaaccgggggcctggcctgggctccacgcagggccagaccattgcgctgcccgcgcaggggctcatcgagttccgtgacgctctggccaagctcatcgacgactacggagtggaggaggagccggccgagctgcccgagggcacctccttgactgtggacaacaagcgcttcttcttcgatgtgggctccaacaagtacggcgtgtttatgcgagtgagcgaggtgaagcccacctatcgcaactccatcaccgtgccctacaaggtgtgggccaagttcggacacaccttctgcaagtactcggaggagatgaagaagattcaagagaagcagagggagaagcgggctgcctgtgagcagcttcaccagcagcaacagcagcagcaggaggagaccgccgctgccaccctgctactgcagggtgaggaagaaggggaagaagattgatcaaactgaatgaaacccccacacacacacacatgcatacacacacacacacagccacacacacagaaaatatactgtaaagaaagagagaaaataaaaagttaaaaagttaaaaaaaaaaaaaaacctgttaactccaagggagcaccacccacagaacctccaccaactgacagtttctcttcttgacttgccacccatcgctggatgttgtccactttatccaccatataaaacagtaagcagctgctaaaaacaaaaaaaatacaaaaagtaataacattatatgaactgtgtttcctacttgattaaaaaatataaagaactgagtgtttatttccctaattaaccaagaacttttgtacacgtttaagctattattattaaaaagtgtttgcaaaatggtcaagattataatattgctgaattatataaaagtccttttcatgttgagctaacatttgactttagcacaaaaaagagatattttagaacacgtaaaataatatttttagtttttctcattttgttaccaaatttcaaaccttacatggaggttattatagtatatttgacaccctatatacctgtgattagagatgtgtatatatatgagggctaggcatgctgtgtgtctgagctttgtctaaatgttatgcagaagtttgtagagttaaaggtacgtaggtttaattcatgcaaggtaaacaataagtgctctcttttatacaatatgcattgcatctggaccttaaacttataaaaatggtcagtgaaacttctgtgaacatgaagaaattattaaaaaaggcatttaaatga

SEQ ID NO: 311554 - DNA, 970 bp, Homo sapiens
cgactgaggcggcgggcggagcggcaggcggcggcggcgcggcagcggagcgcagcatcatggcggaccgagacagcggcagcgagcagggtggtgcggcgctgggttcgggcggctccctggggcaccccggctcgggctcaggctccggcgggggcggtggtggcggcgggggcggcggcggcagtggcggcggcggcggcggggccccaggggggctgcagcacgagacgcaggagctggcctccaagcgggtggacatccagaacaagcgcttctacctggacgtgaagcagaacgccaagggccgcttcctgaagatcgccgaggtgggcgcgggcggcaacaagagccgccttactctctccatgtcagtggccgtggagttccgcgactacctgggcgacttcatcgagcactacgcgcagctgggccccagccagccgccggacctggcccaggcgcaggacgagccgcgccgggcgctcaaaagcgagttcctggtgcgcgagaaccgcaagtactacatggatctcaaggagaaccagcgcggccgcttcctgcgcatccgccagacggtcaaccgggggcctggcctgggctccacgcagggccagaccattgcgctgcccgcgcaggggctcatcgagttccgtgacgctctggccaagctcatcgacgactacggagtggaggaggagccggccgagctgcccgagggcacctccttgactgtggacaacaagcgcttcttcttcgatgtgggctccaacaagtacggcgtgtttatgcgagtgagcgaggtgaagcccacctatcgcaactccatcaccgtgccctacaaggtgtgggccaagttcggacacaccttctgcaagtactcggaggagatgaagaagattcaagagaagcagagggagaagcggtctcctcctgctgctgctgttgctgctggtgaagctgcgtcgac

SEQ ID NO: 311555 - DNA, 1139 bp, Homo sapiens
cgactgaggcggcgggcggagcggcaggcggcggcggcgcggcagcggagcgcagcatcatggcggaccgagacagcggcagcgagcagggtggtgcggcgctgggttcgggcggctccctggggcaccccggctcgggctcaggctccggcgggggcggtggtggcggcgggggcggcggcggcagtggcggcggcggcggcggggccccaggggggctgcagcacgagacgcaggagctggcctccaagcgggtggacatccagaacaagcgcttctacctggacgtgaagcagaacgccaagggccgcttcctgaagatcgccgaggtgggcgcgggcggcaacaagagccgccttactctctccatgtcagtggccgtggagttccgcgactacctgggcgacttcatcgagcactacgcgcagctgggccccagccagccgccggacctggcccaggcgcaggacgagccgcgccgggcgctcaaaagcgagttcctggtgcgcgagaaccgcaagtactacatggatctcaaggagaaccagcgcggccgcttcctgcgcatccgccagacggtcaaccgggggcctggcctgggctccacgcagggccagaccattgcgctgcccgcgcaggggctcatcgagttccgtgacgctctggccaagctcatcgacgactacggagtggaggaggagccggccgagctgcccgagggcacctccttgactgtggacaacaagcgcttcttcttcgatgtgggctccaacaagtacggcgtgtttatgcgagtgagcgaggtgaagcccacctatcgcaactccatcaccgtgccctacaaggtgtgggccaagttcggacacaccttctgcaagtactcggaggagatgaagaagattcaagagaagcagagggagaagcgggctgcctgtgagcagcttcaccagcagcaacagcagcagcaggaggagaccgccgctgccaccctgctactgcagggtgaggaagaaggggaagaagattgatcaaactgaatgaaacccccacacacacacacatgcatacacacacacacacagccacacacacagaaaatatactgtaaagaaagagagaaaataaaaagttaaaaagtt

SEQ ID NO: 311556 - DNA, 2654 bp, Homo sapiens
cgactgaggcggcgggcggagcggcaggcggcggcggcgcggcagcggagcgcagcatcatggcggaccgagacagcggcagcgagcagggtggtgcggcgctgggttcgggcggctccctggggcaccccggctcgggctcaggctccggcgggggcggtggtggcggcgggggcggcggcggcagtggcggcggcggcggcggggccccaggggggctgcagcacgagacgcaggagctggcctccaagcgggtggacatccagaacaagcgcttctacctggacgtgaagcagaacgccaagggccgcttcctgaagatcgccgaggtgggcgcgggcggcaacaagagccgccttactctctccatgtcagtggccgtggagttccgcgactacctgggcgacttcatcgagcactacgcgcagctgggccccagccagccgccggacctggcccaggcgcaggacgagccgcgccgggcgctcaaaagcgagttcctggtgcgcgagaaccgcaagtactacatggatctcaaggagaaccagcgcggccgcttcctgcgcatccgccagacggtcaaccgggggcctggcctgggctccacgcagggccagaccattgcgctgcccgcgcaggggctcatcgagttccgtgacgctctggccaagctcatcgacgactacggagtggaggaggagccggccgagctgcccgagggcacctccttgactgtggacaacaagcgcttcttcttcgatgtgggctccaacaagtacggcgtgtttatgcgagtgagcgaggtgaagcccacctatcgcaactccatcaccgtgccctacaaggtgtgggccaagttcggacacaccttctgcaagtactcggaggagatgaagaagattcaagagaagcagagggagaagcgggctgcctgtgagcagcttcaccagcagcaacagcagcagcaggaggagaccgccgctgccaccctgctactgcagggtgaggaagaaggggaagaagattgatcaaactgaatgaaacccccacacacacacacatgcatacacacacacacacagccacacacacagaaaatatactgtaaagaaagagagaaaataaaaagttaaaaagttaaaaaaaaaaaaaaacctgttaactccaagggagcaccacccacagaacctccaccaactgacagtttctcttcttgacttgccacccatcgctggatgttgtccactttatccaccatataaaacagtaagcagctgctaaaaacatataaagaactgagtgtttatttccctaattaaccaagaacttttgtacacgtttaagctattattattaaaaagtgtttgcaaaatggtcaagattataatattgctgaattatataaaagtccttttcatgttgagctaacatttgactttagcacaaaaaagagatattttagaacacgtaaaataatatttttagtttttctcattttgttaccaaatttcaaaccttacatggaggttattatagtatatttgacaccctatatacctgtgattagagatgtgtatatatatgagggctaggcatgctgtgtgtctgagctttgtctaaatgttatgcagaagtttgtagagttaaaggtacgtaggtttaattcatgcaaggtaaacaataagtgctctcttttatacaatatgcattgcatctggaccttaaacttataaaaatggtcagtgaaacttctgtgaacatgaagaaattattaaaaaaggcatttaaatgaaatttgctaagttgtgatttttatggttggaaccaaagttattcaaatagtaaaaggaaaaagaaagaaaaaggagatctcccataatatttttctgcatctgtttgctttgactgagtaggcgttttgtcattattgtgtatatgagatgtacttgtatcgttcataatatattttttttattatgtgtagaaagattttaaaaaactaacgtgcagcaatttccagtgaacctgtacttggacatcaggtagtgagtctatttgtggtcactagcactgtctcctaaacttgtaagaggtctgaagctattctttgatttttgctagtgctattaacttatgtagacctgttaaaaagcagagcaacacaattatagttatcctactgagccatggattctgagttttgttttaaaagtgaaagccaagttggtgtatgtaaaggatttccatgtagctgtggtgctagttattactggctacattatatgctaagtgtatttgtgttccccaagtgtacaagccttctatcaaaagtatgttctataactcatatattcaaggtgtagggtatgaaaatgcaaagtttaggagagcactttaccaagctggtgtcctccaaactgaaattgtttgtaacgatagtcttttacaggttttcctttaaagatgtttgtgtgcttttaattgacaactaacttcttgctgctgtatagtaaaatattaatatatttttatcattaaactgctgcatgactatcatctttgagtgaagagaaaatgttataaaaaagatgccttaaacagtacattttggtttggaattctgtagaaagtattttggtaaaaaaaaaaaaaaa

SEQ ID NO: 311557 - DNA, 2287 bp, Homo sapiens
aggcaatttcattcaccctggcggcgacacacaggaagcccgcttcagtcaccctcgacccccagttatgagtaagaccagacaatccctttcctccgacagtcccacgtttgcttccaggaatcaaagagcatgccagtggcagctatctgtggcacttttgggaaagtgaaaggagatgctattccagcactgctctgtcaccttagatgagccaaccgttgactagtactagtccacggttggctcatcgacgactacggagtggaggaggagccggccgagctgcccgagggcacctccttgactgtggacaacaagcgcttcttcttcgatgtgggctccaacaagtacggcgtgtttatgcgagtgagcgaggtgaagcccacctatcgcaactccatcaccgtgccctacaaggtgtgggccaagttcggacacaccttctgcaagtactcggaggagatgaagaagattcaagagaagcagagggagaagcgggctgcctgtgagcagcttcaccagcagcaacagcagcagcaggaggagaccgccgctgccaccctgctactgcagggtgaggaagaaggggaagaagattgatcaaactgaatgaaacccccacacacacacacatgcatacacacacacacacagccacacacacagaaaatatactgtaaagaaagagagaaaataaaaagttaaaaagttaaaaaaaaaaaaaaacctgttaactccaagggagcaccacccacagaacctccaccaactgacagtttctcttcttgacttgccacccatcgctggatgttgtccactttatccaccatataaaacagtaagcagctgctaaaaacaaaaaaaatacaaaaagtaataacattatatgaactgtgtttcctacttgattaaaaaatataaagaactgagtgtttatttccctaattaaccaagaacttttgtacacgtttaagctattattattaaaaagtgtttgcaaaatggtcaagattataatattgctgaattatataaaagtccttttcatgttgagctaacatttgactttagcacaaaaaagagatattttagaacacgtaaaataatatttttagtttttctcattttgttaccaaatttcaaaccttacatggaggttattatagtatatttgacaccctatatacctgtgattagagatgtgtatatatatgagggctaggcatgctgtgtgtctgagctttgtctaaatgttatgcagaagtttgtagagttaaaggtacgtaggtttaattcatgcaaggtaaacaataagtgctctcttttatacaatatgcattgcatctggaccttaaacttataaaaatggtcagtgaaacttctgtgaacatgaagaaattattaaaaaaggcatttaaatgaaatttgctaagttgtgatttttatggttggaaccaaagttattcaaatagtaaaaggaaaaagaaagaaaaaggagatctcccataatatttttctgcatctgtttgctttgactgagtaggcgttttgtcattattgtgtatatgagatgtacttgtatcgttcataatatattttttttattatgtgtagaaagattttaaaaaactaacgtgcagcaatttccagtgaacctgtacttggacatcaggtagtgagtctatttgtggtcactagcactgtctcctaaacttgtaagaggtctgaagctattctttgatttttgctagtgctattaacttatgtagacctgttaaaaagcagagcaacacaattatagttatcctactgagccatggattctgagttttgttttaaaagtgaaagccaagttggtgtatgtaaaggatttccatgtagctgtggtgctagttattactggctacattatatgctaagtgtatttgtgttccccaagtgtacaagccttctatcaaaagtatgttctataactcatatattcaaggtgtagggtatgaaaatgcaaagtttaggagagcactttaccaagctggtgtcctccaaactgaaattgtttgtaacgatagtcttttacaggttttcctttaaagatgtttgtgtgcttttaattgacaactaacttcttgctgctgtatagtaaaatattaatatatttttatcattaaactgctgcatgactatcatctttgagtgaagagaaaatgttataaaaaagatgccttaaacagtacattttggtttggaattctgtagaaagtattttggtaaaaaaaaaaaaaaa

SEQ ID NO: 311558 - DNA, 5227 bp, Homo sapiens
ggccgtaatctgactcccagcacacagggagctgcggggcaggcaatgagagctgcactctggctggggaaggcatgagtgacagacccacagcaaggcggtggggtaagtgtggacctttgtgtaccagagagaacatcatggtggctttcaaaggggtctggactcaagctttctggaaagcagtcacagcggaatttctggccatgcttatttttgttctcctcagcctgggatccaccatcaactggggtggaacagaaaagcctttaccggtcgacatggttctcatctccctttgctttggactcagcattgcaaccatggtgcagtgctttggccatatcagcggtggccacatcaaccctgcagtgactgtggccatggtgtgcaccaggaagatcagcatcgccaagtctgtcttctacatcgcagcccagtgcctgggggccatcattggagcaggaatcctctatctggtcacacctcccagtgtggtgggaggcctgggagtcaccatggttcatggaaatcttaccgctggtcatggtctcctggttgagttgataatcacatttcaattggtgtttactatctttgccagctgtgattccaaacggactgatgtcactggctcaatagctttagcaattggattttctgttgcaattggacatttatttgcaatcaattatactggtgccagcatgaatcccgcccgatcctttggacctgcagttatcatgggaaattgggaaaaccattggatatattgggttgggcccatcataggagctgtcctcgctggtggcctttatgagtatgtcttctgtccagatgttgaattcaaacgtcgttttaaagaagccttcagcaaagctgcccagcaaacaaaaggaagctacatggaggtggaggacaacaggagtcaggtagagacggatgacctgattctaaaacctggagtggtgcatgtgattgacgttgaccggggagaggagaagaaggggaaagaccaatctggagaggtattgtcttcagtatgactagaagatcgcactgaaagcagacaagactccttagaactgtcctcagatttccttccacccattaaggaaacagatttgttataaattagaaatgtgcaggtttgttgtttcatgtcatattactcagtctaaacaataaatatttcataatttacaaaggaggaacggaagaaacctattgtgaattccaaatctaaaaaaagaaatatttttaaaatgttcttaagcaaatatatacctattttatctagttacctttcattaacaaccaattttaaccgtgtgtcaagatttggttaagtcttgcctgacagaactcaaagacacgtctatcagcttattccttctctactggaatattggtatagtcaattcttatttgaatatttattctattaaactgagtttaacaatggcaaaatacagtatgtcacagtcatgcacattcaagagagaaaatataacaagttcttttatgagcaatcccttatgcatagactaccttggcaaaagagcattagcaagtgtcactgctcatcagttacttccttccatttatatcacaaatacccaagtttcaattctaacttcatttcatggtatttcttcctcctcaatgcccaaggtaatgtgggactaaagcccagaaatttgaaaagaatattcagaaatccttcccaaatcataagggcacctattgagattcaagacaagcagactcgtaaaatcttgtagaggcagaggcaaagttatcatcatacaaaaatcacaaacaaaaaggagatctgtattcgggtatcaaacggttgatctgttttcagtgcacaccctcaaatgcaccacaccagttttacgatctaagcttttaacccctttaccactttgcttatttttaaaaaatttattggcaaaactggggattttgtttgtaactttggttatctatatttaaacattagatgagacatatttttgataacaagaacttagctagttgagtcctggctttttgttgattattaagctgtgttcactctagaaggtgtaaaggccctgtcccaatctctgctctctcacttctcgtgacatttgttgataatctttactgcaagtgtaatgatatttgagtgaattaaaatgcatgacagacaaggtacaacatggttgcagaataaaagggtgaggacatcagatcactctgtattcaaagcttactagacgaacaatctttcatttctggatatattgtagctaacccaacacatttttaaactatttttgttactgactcacttacttgtcaaaataattggtttttctgtcctgctttgccttttgtcactagaatgttctccagaaaccccagtttctgtcatcttaactgtctagtctagccgttaacttagacaaagaagtgcaaatgtcaatttcactaaacaaaagctattagaagtaaagcagaaacctatcactgcaaggagtgacttgtaaataactgatgatcaagggctgtcttctctcaagcatggttccaactctgtgtcactttttagcgttaatggcagttgtgtgtctgtggcagtgagataatggaccactattaaacctgattctcttcggtgctaggaaagagtgatgtgtgagattcccagagagtcgtcacaccagtgttatgcctgggagtgccactggcataccgcaggtgcctaaatcccaggcccctttctcagggggcgtggccacaccacacactgcgccagtgacacatagttacttcctggctgggacggcacctatagaaactagggtacaaatctcccaaagatggtttgcaccgtcatttcaaatgtttgcacaatataccacttagaggcttaaaatcagggtggttcagttcaaaaggtaatatcaaccgtcagcaaacatgtcagtttaaaaataagttcggttaacaaggaagtgttaagcagattttttgaatacacttacaatatactggcttataatcatttttattctgccatatggtttatttcatatacactcacttttacactcacttccaattatagcattcaataagttacggttaaagaaaagtgaatggtgtttttgtaatttgttttctagtagctagcagagagcctggcacatagtatgtattcaaaacaagtgtgttaattaataaaaatatataaatctcatttgagatttaagaatataaataattttcttttaatctttattttgctcaatatttaataggaagtatgatttcaaggactactaaaggaaggcaatatacatgtgaaaaccataaaatacattttttgcattctactatttttaggggcatgaaatgaatgaaagctttagcacttttttgcccctacatatgagacaacatattttgtatttcactcaaggctctgccagtaaaaagtaatgaaattgtacctttctaatgacatctatgcagcaggggtctatcgccttgtggatggcaccaaattatccaagtgtattaggagactggggcttttttctttaatcccttcttattaatgaagtgcatagtgctgctcccaggagaccactgctgacagatacacagagaagagatcagagaggaaaaactgggaagacataaatgaattatacccagccatgaaacaatgccaactgtctcttccctaaggaagagtacaagtaccctaaaattgaaaggtggtccctacactgaaaacgcacatagtttgtcaaaagtgtacaaaagggaaagagtcttattttaagctttcaggctttcttaaaaacttggggaccagaatttcaatgtatgtttccattgttgaagataacattttcttcaaagagccttaaccttttgtactggaaggaaatattttctggacttaagtagttgcctaaatttaagattcctacactttatttctgccattgatgcttttcctaaacccttatactatctttttattatctgagccttttcctaatgcagctcataggtgctagctagagctgctgctcagtattgaagactttacaaggagattagaaatctttggaaaacatatgtgatgaaattgagctatatgatttatcagagatctgattccaaagagcacagaatactgttctcagaccatgaaaccagacaacacatgtattggtttaaactcgataatgacaggaaaattccaaactagagcagtaaattcaaatggtaagatgaatcctagaaggcctctgattgcagcatgttgacaccaacctcacgttacgaacaattcacagagaatttgcctttgtggcaactgaagatggaagtctggggggcacagacaaccttatcaaacaatataaaagccaatataaattctcataagcactatagaatttgcaaattcagaacattttatacctaaaagtaattctgtctttcctaaagtgtttttaacatgaaaattagtaggaagatgtggttactatttggaaagtgtaatgtaacaaaactctcttttgttaccacaaattttgtgagtttagtactctacagattgccccataagagcagtagcttttgaaactcataattctctgaaataaatgaaagacatttaattcaaggatcaaaaattgtggccatctttgcaaatgactacctatagcctgtgaaaatacatttcaaaaaatgttatgtgcaatgaacactaaatttaagagcagttacagtgtgactcactcatgtttaaaaaaaatcgaagagctaaaaaatacgtctaatttatgtaacccattggaatgtatttctaggttctcttcaggattaattaaataaacatgcaatttatgaaaacatataaacaattatttatcacttttatgacccaaatcacaataaaattgtcatttaggataaactggggagaatagactgaacatatggttatattcacagttatttattaacttaaatgttattccaacattagagctaatgttaaaaagatttaaactgtaacgtctaatatttggaataatatattaaagtattagcactgtggttgattttcttgaattatgttgcatcttgtactactaagcttgtgaaaataaacatttggatgttttaaaaggtaaacattatgtttgat

SEQ ID NO: 311559 - DNA, 5170 bp, Homo sapiens
ggccgtaatctgactcccagcacacagggagctgcggggcaggcaatgagagctgcactctggctggggaaggcatgagtgacagacccacagcaaggcggtggggtaagtgtggacctttgtgtaccagagagaacatcatggtggctttcaaaggggtctggactcaagctttctggaaagcagtcacagcggaatttctggccatgcttatttttgttctcctcagcctgggatccaccatcaactggggtggaacagaaaagcctttaccggtcgacatggttctcatctccctttgctttggactcagcattgcaaccatggtgcagtgctttggccatatcagcggtggccacatcaaccctgcagtgactgtggccatggtgtgcaccaggaagatcagcatcgccaagtctgtcttctacatcgcagcccagtgcctgggggccatcattggagcaggaatcctctatctggtcacacctcccagtgtggtgggaggcctgggagtcaccatggttcatggaaatcttaccgctggtcatggtctcctggttgagttgataatcacatttcaattggtgtttactatctttgccagctgtgattccaaacggactgatgtcactggctcaatagctttagcaattggattttctgttgcaattggacatttatttgcaatcaattatactggtgccagcatgaatcccgcccgatcctttggacctgcagttatcatgggaaattgggaaaaccattggatatattgggttgggcccatcataggagctgtcctcgctggtggcctttatgagtatgtcttctgtccagatgttgaattcaaacgtcgttttaaagaagccttcagcaaagctgcccagcaaacaaaaggaagctacatggaggtggaggacaacaggagtcaggtagagacggatgacctgattctaaaacctggagtggtgcatgtgattgacgttgaccggggagaggagaagaaggggaaagaccaatctggagaggtattgtcttcagtatgactagaagatcgcactgaaagcagacaagactccttagaactgtcctcagatttccttccacccattaaggaaacagatttgttataaattagaaatgtgcaggtttgttgtttcatgtcatattactcagtctaaacaataaatatttcataatttacaaaggaggaacggaagaaacctattgtgaattccaaatctaaaaaaagaaatatttttaaaatgttcttaagcaaatatatacctattttatctagttacctttcattaacaaccaattttaaccgtgtgtcaagatttggttaagtcttgcctgacagaactcaaagacacgtctatcagcttattccttctctactggaatattggtatagtcaattcttatttgaatatttattctattaaactgagtttaacaatggcaaaatacagtatgtcacagtcatgcacattcaagagagaaaatataacaagttcttttatgagcaatcccttatgcatagactaccttggcaaaagagcattagcaagtgtcactgctcatcagttacttccttccatttatatcacaaatacccaagtttcaattctaacttcatttcatggtatttcttcctcctcaatgcccaaggtaatgtgggactaaagcccagaaatttgaaaagaatattcagaaatccttcccaaatcataagggcacctattgagattcaagacaagcagactcgtaaaatcttgtagaggcagaggcaaagttatcatcatacaaaaatcacaaacaaaaaggagatctgtattcgggtatcaaacggttgatctgttttcagtgcacaccctcaaatgcaccacaccagttttacgatctaagcttttaacccctttaccactttgcttatttttaaaaaatttattggcaaaactggggattttgtttgtaactttggttatctatatttaaacattagatgagacatatttttgataacaagaacttagctagttgagtcctggctttttgttgattattaagctgtgttcactctagaaggtgtaaaggccctgtcccaatctctgctctctcacttctcgtgacatttgttgataatctttactgcaagtgtaatgatatttgagtgaattaaaatgcatgacagacaaggtacaacatggttgcagaataaaagggtgaggacatcagatcactctgtattcaaagcttactagacgaacaatctttcatttctggatatattgtagctaacccaacacatttttaaactatttttgttactgactcacttacttgtcaaaataattggtttttctgtcctgctttgccttttgtcactagaatgttctccagaaaccccagtttctgtcatcttaactgtctagtctagccgttaacttagacaaagaagtgcaaatgtcaatttcactaaacaaaagctattagaagtaaagcagaaacctatcactgcaaggagtgacttgtaaataactgatgatcaagggctgtcttctctcaagcatggttccaactctgtgtcactttttagcgttaatggcagttgtgtgtctgtggcagtgagataatggaccactattaaacctgattctcttcggtgctaggaaagagtgatgtgtgagattcccagagagtcgtcacaccagtgttatgcctgggagtgccactggcataccgcaggtgcctaaatcccaggcccctttctcagggggcgtggccacaccacacactgcgccagtgacacatagttacttcctggctgggacggcacctatagaaactagggtacaaatctcccaaagatggtttgcaccgtcatttcaaatgtttgcacaatataccacttagaggcttaaaatcagggtggttcagttcaaaaggtaatatcaaccgtcagcaaacatgtcagtttaaaaataagttcggttaacaaggaagtgttaagcagattttttgaatacacttacaatatactggcttataatcatttttattctgccatatggtttatttcatatacactcacttttacactcacttccaattatagcattcaataagttacggttaaagaaaagtgaatggtgtttttgtaatttgttttctagtagctagcagagagcctggcacatagtatgtattcaaaacaagtgtgttaattaataaaaatatataaatctcatttgagatttaagaatataaataattttcttttaatctttattttgctcaatatttaataggaagtatgatttcaaggactactaaaggaaggcaatatacatgtgaaaaccataaaatacattttttgcattctactatttttaggggcatgaaatgaatgaaagctttagcacttttttgcccctacatatgagacaacatattttgtatttcactcaaggctctgccagtaaaaagtaatgaaattgtacctttctaatgacatctatgcagcaggggtctatcgccttgtggatggcaccaaattatccaagtgtattaggagactggggcttttttctttaatcccttcttattaatgaagtgcatagtgctgctcccaggagaccactgctgacagatacacagagaagagatcagagaggaaaaactgggaagacataaatgaattatacccagccatgaaacaatgccaactgtctcttccctaaggaagagtacaagtaccctaaaattgaaaggtggtccctacactgaaaacgcacatagtttgtcaaaagtgtacaaaagggaaagagtcttattttaagctttcaggctttcttaaaaacttggggaccagaatttcaatgtatgtttccattgttgaagataacattttcttcaaagagccttaaccttttgtactggaaggaaatattttctggacttaagtagttgcctaaatttaagattcctacactttatttctgccattgatgcttttcctaaacccttatactatctttttattatctgagccttttcctaatgcagctcataggtgctagctagagctgctgctcagtattgaagactttacaaggagattagaaatctttggaaaacatatgtgatgaaattgagctatatgatttatcagagatctgattccaaagagcacagaatactgttctcagaccatgaaaccagacaacacatgtattggtttaaactcgataatgacaggaaaattccaaactagagcagtaaattcaaatggtaagatgaatcctagaaggcctctgattgcagcatgttgacaccaacctcacgttacgaacaattcacagagaatttgcctttgtggcaactgaagatggaagtctggggggcacagacaaccttatcaaacaatataaaagccaatataaattctcataagcactatagaatttgcaaattcagaacattttatacctaaaagtaattctgtctttcctaaagtgtttttaacatgaaaattagtaggaagatgtggttactatttggaaagtgtaatgtaacaaaactctcttttgttaccacaaattttgtgagtttagtactctacagattgccccataagagcagtagcttttgaaactcataattctctgaaataaatgaaagacatttaattcaaggatcaaaaattgtggccatctttgcaaatgactacctatagcctgtgaaaatacatttcaaaaaatgttatgtgcaatgaacactaaatttaagagcagttacagtgtgactcactcatgtatttctaggttctcttcaggattaattaaataaacatgcaatttatgaaaacatataaacaattatttatcacttttatgacccaaatcacaataaaattgtcatttaggataaactggggagaatagactgaacatatggttatattcacagttatttattaacttaaatgttattccaacattagagctaatgttaaaaagatttaaactgtaacgtctaatatttggaataatatattaaagtattagcactgtggttgattttcttgaattatgttgcatcttgtactactaagcttgtgaaaataaacatttggatgttttaaaaggtaaacattatgtttgat

SEQ ID NO: 311560 - DNA, 4879 bp, Homo sapiens
  misc_feature (157)..(157): n is a, c, g, or t
cctttctagggacagtttggataattttccgtgaaactggatgatctttgaatattaaatgaaaggagactagaataacagtctcttgactattcatgaaggagctttagcagaagcattctttcttggtgtgaaatcacgcctgcagcccctgccnacagtacccgaagatgcaggccttgttcccttcacctaaattcataaacctgggtgtagtggcttctgatgctgatttgtttctcttttcagtaagtgtggacctttgtgtaccagagagaacatcatggtggctttcaaaggggtctggactcaagctttctggaaagcagtcacagcggaatttctggccatgcttatttttgttctcctcagcctgggatccaccatcaactggggtggaacagaaaagcctttaccggtcgacatggttctcatctccctttgctttggactcagcattgcaaccatggtgcagtgctttggccatatcagcggtggccacatcaaccctgcagtgactgtggccatggtgtgcaccaggaagatcagcatcgccaagtctgtcttctacatcgcagcccagtgcctgggggccatcattggagcaggaatcctctatctggtcacacctcccagtgtggtgggaggcctgggagtcaccatggttcatggaaatcttaccgctggtcatggtctcctggttgagttgataatcacatttcaattggtgtttactatctttgccagctgtgattccaaacggactgatgtcactggctcaatagctttagcaattggattttctgttgcaattggacatttatttgcaatcaattatactggtgccagcatgaatcccgcccgatcctttggacctgcagttatcatgggaaattgggaaaaccattggatatattgggttgggcccatcataggagctgtcctcgctggtggcctttatgagtatgtcttctgtccagatgttgaattcaaacgtcgttttaaagaagccttcagcaaagctgcccagcaaacaaaaggaagctacatggaggtggaggacaacaggagtcaggtagagacggatgacctgattctaaaacctggagtggtgcatgtgattgacgttgaccggggagaggagaagaaggggaaagaccaatctggagaggtattgtcttcagtatgactagaagatcgcactgaaagcagacaagactccttagaactgtcctcagatttccttccacccattaaggaaacagatttgttataaattagaaatgtgcaggtttgttgtttcatgtcatattactcagtctaaacaataaatatttcataatttacaaaggaggaacggaagaaacctattgtgaattccaaatctaaaaaaagaaatatttttaaaatgttcttaagcaaatatatacctattttatctagttacctttcattaacaaccaattttaaccgtgtgtcaagatttggttaagtcttgcctgacagaactcaaagacacgtctatcagcttattccttctctactggaatattggtatagtcaattcttatttgaatatttattctattaaatgcccaaggtaatgtgggactaaagcccagaaatttgaaaagaatattcagaaatccttcccaaatcataagggcacctattgagattcaagacaagcagactcgtaaaatcttgtagaggcagaggcaaagttatcatcatacaaaaatcacaaacaaaaaggagatctgtattcgggtatcaaacggttgatctgttttcagtgcacaccctcaaatgcaccacaccagttttacgatctaagcttttaacccctttaccactttgcttatttttaaaaaatttattggcaaaactggggattttgtttgtaactttggttatctatatttaaacattagatgagacatatttttgataacaagaacttagctagttgagtcctggctttttgttgattattaagctgtgttcactctagaaggtgtaaaggccctgtcccaatctctgctctctcacttctcgtgacatttgttgataatctttactgcaagtgtaatgatatttgagtgaattaaaatgcatgacagacaaggtacaacatggttgcagaataaaagggtgaggacatcagatcactctgtattcaaagcttactagacgaacaatctttcatttctggatatattgtagctaacccaacacatttttaaactatttttgttactgactcacttacttgtcaaaataattggtttttctgtcctgctttgccttttgtcactagaatgttctccagaaaccccagtttctgtcatcttaactgtctagtctagccgttaacttagacaaagaagtgcaaatgtcaatttcactaaacaaaagctattagaagtaaagcagaaacctatcactgcaaggagtgacttgtaaataactgatgatcaagggctgtcttctctcaagcatggttccaactctgtgtcactttttagcgttaatggcagttgtgtgtctgtggcagtgagataatggaccactattaaacctgattctcttcggtgctaggaaagagtgatgtgtgagattcccagagagtcgtcacaccagtgttatgcctgggagtgccactggcataccgcaggtgcctaaatcccaggcccctttctcagggggcgtggccacaccacacactgcgccagtgacacatagttacttcctggctgggacggcacctatagaaactagggtacaaatctcccaaagatggtttgcaccgtcatttcaaatgtttgcacaatataccacttagaggcttaaaatcagggtggttcagttcaaaaggtaatatcaaccgtcagcaaacatgtcagtttaaaaataagttcggttaacaaggaagtgttaagcagattttttgaatacacttacaatatactggcttataatcatttttattctgccatatggtttatttcatatacactcacttttacactcacttccaattatagcattcaataagttacggttaaagaaaagtgaatggtgtttttgtaatttgttttctagtagctagcagagagcctggcacatagtatgtattcaaaacaagtgtgttaattaataaaaatatataaatctcatttgagatttaagaatataaataattttcttttaatctttattttgctcaatatttaataggaagtatgatttcaaggactactaaaggaaggcaatatacatgtgaaaaccataaaatacattttttgcattctactatttttaggggcatgaaatgaatgaaagctttagcacttttttgcccctacatatgagacaacatattttgtatttcactcaaggctctgccagtaaaaagtaatgaaattgtacctttctaatgacatctatgcagcaggggtctatcgccttgtggatggcaccaaattatccaagtgtattaggagactggggcttttttctttaatcccttcttattaatgaagtgcatagtgctgctcccaggagaccactgctgacagatacacagagaagagatcagagaggaaaaactgggaagacataaatgaattatacccagccatgaaacaatgccaactgtctcttccctaaggaagagtacaagtaccctaaaattgaaaggtggtccctacactgaaaacgcacatagtttgtcaaaagtgtacaaaagggaaagagtcttattttaagctttcaggctttcttaaaaacttggggaccagaatttcaatgtatgtttccattgttgaagataacattttcttcaaagagccttaaccttttgtactggaaggaaatattttctggacttaagtagttgcctaaatttaagattcctacactttatttctgccattgatgcttttcctaaacccttatactatctttttattatctgagccttttcctaatgcagctcataggtgctagctagagctgctgctcagtattgaagactttacaaggagattagaaatctttggaaaacatatgtgatgaaattgagctatatgatttatcagagatctgattccaaagagcacagaatactgttctcagaccatgaaaccagacaacacatgtattggtttaaactcgataatgacaggaaaattccaaactagagcagtaaattcaaatggtaagatgaatcctagaaggcctctgattgcagcatgttgacaccaacctcacgttacgaacaattcacagagaatttgcctttgtggcaactgaagatggaagtctggggggcacagacaaccttatcaaacaatataaaagccaatataaattctcataagcactatagaatttgcaaattcagaacattttatacctaaaagtaattctgtctttcctaaagtgtttttaacatgaaaattagtaggaagatgtggttactatttggaaagtgtaatgtaacaaaactctcttttgttaccacaaattttgtgagtttagtactctacagattgccccataagagcagtagcttttgaaactcataattctctgaaataaatgaaagacatttaattcaaggatcaaaaattgtggccatctttgcaaatgactacctatagcctgtgaaaatacatttcaaaaaatgttatgtgcaatgaacactaaatttaagagcagttacagtgtgactcactcatgtttaaaaaaaatcgaagagctaaaaaatacgtctaatttatgtaacccattggaatgtatttctaggttctcttcaggattaattaaataaacatgcaatttatgaaaacatataaacaattatttatcactt

SEQ ID NO: 311561 - DNA, 4594 bp, Homo sapiens
agcatctttagctattttcaaactaggactccaagcttcttgcaaactctttgctaaataatgccttggtggcatgaggcacatccctaaaatagctaatttactcctagggaatttttgatgattcttaatagtgtgaaaactgattctggcagtatttaggttcatggaaatcttaccgctggtcatggtctcctggttgagttgataatcacatttcaattggtgtttactatctttgccagctgtgattccaaacggactgatgtcactggctcaatagctttagcaattggattttctgttgcaattggacatttatttgcaatcaattatactggtgccagcatgaatcccgcccgatcctttggacctgcagttatcatgggaaattgggaaaaccattggatatattgggttgggcccatcataggagctgtcctcgctggtggcctttatgagtatgtcttctgtccagatgttgaattcaaacgtcgttttaaagaagccttcagcaaagctgcccagcaaacaaaaggaagctacatggaggtggaggacaacaggagtcaggtagagacggatgacctgattctaaaacctggagtggtgcatgtgattgacgttgaccggggagaggagaagaaggggaaagaccaatctggagaggtattgtcttcagtatgactagaagatcgcactgaaagcagacaagactccttagaactgtcctcagatttccttccacccattaaggaaacagatttgttataaattagaaatgtgcaggtttgttgtttcatgtcatattactcagtctaaacaataaatatttcataatttacaaaggaggaacggaagaaacctattgtgaattccaaatctaaaaaaagaaatatttttaaaatgttcttaagcaaatatatacctattttatctagttacctttcattaacaaccaattttaaccgtgtgtcaagatttggttaagtcttgcctgacagaactcaaagacacgtctatcagcttattccttctctactggaatattggtatagtcaattcttatttgaatatttattctattaaactgagtttaacaatggcaaaatacagtatgtcacagtcatgcacattcaagagagaaaatataacaagttcttttatgagcaatcccttatgcatagactaccttggcaaaagagcattagcaagtgtcactgctcatcagttacttccttccatttatatcacaaatacccaagtttcaattctaacttcatttcatggtatttcttcctcctcaatgcccaaggtaatgtgggactaaagcccagaaatttgaaaagaatattcagaaatccttcccaaatcataagggcacctattgagattcaagacaagcagactcgtaaaatcttgtagaggcagaggcaaagttatcatcatacaaaaatcacaaacaaaaaggagatctgtattcgggtatcaaacggttgatctgttttcagtgcacaccctcaaatgcaccacaccagttttacgatctaagcttttaacccctttaccactttgcttatttttaaaaaatttattggcaaaactggggattttgtttgtaactttggttatctatatttaaacattagatgagacatatttttgataacaagaacttagctagttgagtcctggctttttgttgattattaagctgtgttcactctagaaggtgtaaaggccctgtcccaatctctgctctctcacttctcgtgacatttgttgataatctttactgcaagtgtaatgatatttgagtgaattaaaatgcatgacagacaaggtacaacatggttgcagaataaaagggtgaggacatcagatcactctgtattcaaagcttactagacgaacaatctttcatttctggatatattgtagctaacccaacacatttttaaactatttttgttactgactcacttacttgtcaaaataattggtttttctgtcctgctttgccttttgtcactagaatgttctccagaaaccccagtttctgtcatcttaactgtctagtctagccgttaacttagacaaagaagtgcaaatgtcaatttcactaaacaaaagctattagaagtaaagcagaaacctatcactgcaaggagtgacttgtaaataactgatgatcaagggctgtcttctctcaagcatggttccaactctgtgtcactttttagcgttaatggcagttgtgtgtctgtggcagtgagataatggaccactattaaacctgattctcttcggtgctaggaaagagtgatgtgtgagattcccagagagtcgtcacaccagtgttatgcctgggagtgccactggcataccgcaggtgcctaaatcccaggcccctttctcagggggcgtggccacaccacacactgcgccagtgacacatagttacttcctggctgggacggcacctatagaaactagggtacaaatctcccaaagatggtttgcaccgtcatttcaaatgtttgcacaatataccacttagaggcttaaaatcagggtggttcagttcaaaaggtaatatcaaccgtcagcaaacatgtcagtttaaaaataagttcggttaacaaggaagtgttaagcagattttttgaatacacttacaatatactggcttataatcatttttattctgccatatggtttatttcatatacactcacttttacactcacttccaattatagcattcaataagttacggttaaagaaaagtgaatggtgtttttgtaatttgttttctagtagctagcagagagcctggcacatagtatgtattcaaaacaagtgtgttaattaataaaaatatataaatctcatttgagatttaagaatataaataattttcttttaatctttattttgctcaatatttaataggaagtatgatttcaaggactactaaaggaaggcaatatacatgtgaaaaccataaaatacattttttgcattctactatttttaggggcatgaaatgaatgaaagctttagcacttttttgcccctacatatgagacaacatattttgtatttcactcaaggctctgccagtaaaaagtaatgaaattgtacctttctaatgacatctatgcagcaggggtctatcgccttgtggatggcaccaaattatccaagtgtattaggagactggggcttttttctttaatcccttcttattaatgaagtgcatagtgctgctcccaggagaccactgctgacagatacacagagaagagatcagagaggaaaaactgggaagacataaatgaattatacccagccatgaaacaatgccaactgtctcttccctaaggaagagtacaagtaccctaaaattgaaaggtggtccctacactgaaaacgcacatagtttgtcaaaagtgtacaaaagggaaagagtcttattttaagctttcaggctttcttaaaaacttggggaccagaatttcaatgtatgtttccattgttgaagataacattttcttcaaagagccttaaccttttgtactggaaggaaatattttctggacttaagtagttgcctaaatttaagattcctacactttatttctgccattgatgcttttcctaaacccttatactatctttttattatctgagccttttcctaatgcagctcataggtgctagctagagctgctgctcagtattgaagactttacaaggagattagaaatctttggaaaacatatgtgatgaaattgagctatatgatttatcagagatctgattccaaagagcacagaatactgttctcagaccatgaaaccagacaacacatgtattggtttaaactcgataatgacaggaaaattccaaactagagcagtaaattcaaatggtaagatgaatcctagaaggcctctgattgcagcatgttgacaccaacctcacgttacgaacaattcacagagaatttgcctttgtggcaactgaagatggaagtctggggggcacagacaaccttatcaaacaatataaaagccaatataaattctcataagcactatagaatttgcaaattcagaacattttatacctaaaagtaattctgtctttcctaaagtgtttttaacatgaaaattagtaggaagatgtggttactatttggaaagtgtaatgtaacaaaactctcttttgttaccacaaattttgtgagtttagtactctacagattgccccataagagcagtagcttttgaaactcataattctctgaaataaatgaaagacatttaattcaaggatcaaaaattgtggccatctttgcaaatgactacctatagcctgtgaaaatacatttcaaaaaatgttatgtgcaatgaacactaaatttaagagcagttacagtgtgactcactcatgtttaaaaaaaatcgaagagctaaaaaatacgtctaatttatgtaacccattggaatgtatttctaggttctcttcaggattaattaaataaacatgcaatttatgaaaacatataaacaattatttatcactt

SEQ ID NO: 311562 - DNA, 4253 bp, Homo sapiens
ccatttatatcacagatacccaagtatcaattctaacttcatttcatggtatttcttcctcctcaatgcccaaggtaatgtgggactaaagcccagaaatttgaaaagaatattcagaaatccttcccaaatcataagggcacctattgagattcaagacaagcagactcgtaaaatcttgtagaggcagaggcaaagttatcatcatacaaaaatcacaaacaaaaaggagatctgtattcgggtatcaaacggttgatctgttttggtgcatgtgattgacgttgaccggggagaggagaagaaggggaaagaccaatctggagaggtattgtcttcagtatgactagaagatcgcactgaaagcagacaagactccttagaactgtcctcagatttccttccacccattaaggaaacagatttgttataaattagaaatgtgcaggtttgttgtttcatgtcatattactcagtctaaacaataaatatttcataatttacaaaggaggaacggaagaaacctattgtgaattccaaatctaaaaaaagaaatatttttaaaatgttcttaagcaaatatatacctattttatctagttacctttcattaacaaccaattttaaccgtgtgtcaagatttggttaagtcttgcctgacagaactcaaagacacgtctatcagcttattccttctctactggaatattggtatagtcaattcttatttgaatatttattctattaaactgagtttaacaatggcaaaatacagtatgtcacagtcatgcacattcaagagagaaaatataacaagttcttttatgagcaatcccttatgcatagactaccttggcaaaagagcattagcaagtgtcactgctcatcagttacttccttccatttatatcacaaatacccaagtttcaattctaacttcatttcatggtatttcttcctcctcaatgcccaaggtaatgtgggactaaagcccagaaatttgaaaagaatattcagaaatccttcccaaatcataagggcacctattgagattcaagacaagcagactcgtaaaatcttgtagaggcagaggcaaagttatcatcatacaaaaatcacaaacaaaaaggagatctgtattcgggtatcaaacggttgatctgttttcagtgcacaccctcaaatgcaccacaccagttttacgatctaagcttttaacccctttaccactttgcttatttttaaaaaatttattggcaaaactggggattttgtttgtaactttggttatctatatttaaacattagatgagacatatttttgataacaagaacttagctagttgagtcctggctttttgttgattattaagctgtgttcactctagaaggtgtaaaggccctgtcccaatctctgctctctcacttctcgtgacatttgttgataatctttactgcaagtgtaatgatatttgagtgaattaaaatgcatgacagacaaggtacaacatggttgcagaataaaagggtgaggacatcagatcactctgtattcaaagcttactagacgaacaatctttcatttctggatatattgtagctaacccaacacatttttaaactatttttgttactgactcacttacttgtcaaaataattggtttttctgtcctgctttgccttttgtcactagaatgttctccagaaaccccagtttctgtcatcttaactgtctagtctagccgttaacttagacaaagaagtgcaaatgtcaatttcactaaacaaaagctattagaagtaaagcagaaacctatcactgcaaggagtgacttgtaaataactgatgatcaagggctgtcttctctcaagcatggttccaactctgtgtcactttttagcgttaatggcagttgtgtgtctgtggcagtgagataatggaccactattaaacctgattctcttcggtgctaggaaagagtgatgtgtgagattcccagagagtcgtcacaccagtgttatgcctgggagtgccactggcataccgcaggtgcctaaatcccaggcccctttctcagggggcgtggccacaccacacactgcgccagtgacacatagttacttcctggctgggacggcacctatagaaactagggtacaaatctcccaaagatggtttgcaccgtcatttcaaatgtttgcacaatataccacttagaggcttaaaatcagggtggttcagttcaaaaggtaatatcaaccgtcagcaaacatgtcagtttaaaaataagttcggttaacaaggaagtgttaagcagattttttgaatacacttacaatatactggcttataatcatttttattctgccatatggtttatttcatatacactcacttttacactcacttccaattatagcattcaataagttacggttaaagaaaagtgaatggtgtttttgtaatttgttttctagtagctagcagagagcctggcacatagtatgtattcaaaacaagtgtgttaattaataaaaatatataaatctcatttgagatttaagaatataaataattttcttttaatctttattttgctcaatatttaataggaagtatgatttcaaggactactaaaggaaggcaatatacatgtgaaaaccataaaatacattttttgcattctactatttttaggggcatgaaatgaatgaaagctttagcacttttttgcccctacatatgagacaacatattttgtatttcactcaaggctctgccagtaaaaagtaatgaaattgtacctttctaatgacatctatgcagcaggggtctatcgccttgtggatggcaccaaattatccaagtgtattaggagactggggcttttttctttaatcccttcttattaatgaagtgcatagtgctgctcccaggagaccactgctgacagatacacagagaagagatcagagaggaaaaactgggaagacataaatgaattatacccagccatgaaacaatgccaactgtctcttccctaaggaagagtacaagtaccctaaaattgaaaggtggtccctacactgaaaacgcacatagtttgtcaaaagtgtacaaaagggaaagagtcttattttaagctttcaggctttcttaaaaacttggggaccagaatttcaatgtatgtttccattgttgaagataacattttcttcaaagagccttaaccttttgtactggaaggaaatattttctggacttaagtagttgcctaaatttaagattcctacactttatttctgccattgatgcttttcctaaacccttatactatctttttattatctgagccttttcctaatgcagctcataggtgctagctagagctgctgctcagtattgaagactttacaaggagattagaaatctttggaaaacatatgtgatgaaattgagctatatgatttatcagagatctgattccaaagagcacagaatactgttctcagaccatgaaaccagacaacacatgtattggtttaaactcgataatgacaggaaaattccaaactagagcagtaaattcaaatggtaagatgaatcctagaaggcctctgattgcagcatgttgacaccaacctcacgttacgaacaattcacagagaatttgcctttgtggcaactgaagatggaagtctggggggcacagacaaccttatcaaacaatataaaagccaatataaattctcataagcactatagaatttgcaaattcagaacattttatacctaaaagtaattctgtctttcctaaagtgtttttaacatgaaaattagtaggaagatgtggttactatttggaaagtgtaatgtaacaaaactctcttttgttaccacaaattttgtgagtttagtactctacagattgccccataagagcagtagcttttgaaactcataattctctgaaataaatgaaagacatttaattcaaggatcaaaaattgtggccatctttgcaaatgactacctatagcctgtgaaaatacatttcaaaaaatgttatgtgcaatgaacactaaatttaagagcagttacagtgtgactcactcatgtttaaaaaaaatcgaagagctaaaaaatacgtctaatttatgtaacccattggaatgtatttctaggttctcttcaggattaattaaataaacatgcaatttatgaaaacatataaacaattatttatcactt

SEQ ID NO: 311563 - DNA, 2069 bp, Homo sapiens
  misc_feature (24)..(24): n is a, c, g, or t
acattcagctcggacccactttcngagtaggagagcctggcacatagtatgtattcaaaacaagtgtgttaattaataaaaatatataaatctcatttgagatttaagaatataaataattttcttttaatctttattttgctcaatatttaataggaagtatgatttcaaggactactaaaggaaggcaatatacatgtgaaaaccataaaatacattttttgcattctactatttttaggggcatgaaatgaatgaaagctttagcacttttttgcccctacatatgagacaacatattttgtatttcactcaaggctctgccagtaaaaagtaatgaaattgtacctttctaatgacatctatgcagcaggggtctatcgccttgtggatggcaccaaattatccaagtgtattaggagactggggcttttttctttaatcccttcttattaatgaagtgcatagtgctgctcccaggagaccactgctgacagatacacagagaagagatcagagaggaaaaactgggaagacataaatgaattatacccagccatgaaacaatgccaactgtctcttccctaaggaagagtacaagtaccctaaaattgaaaggtggtccctacactgaaaacgcacatagtttgtcaaaagtgtacaaaagggaaagagtcttattttaagctttcaggctttcttaaaaacttggggaccagaatttcaatgtatgtttccattgttgaagataacattttcttcaaagagccttaaccttttgtactggaaggaaatattttctggacttaagtagttgcctaaatttaagattcctacactttatttctgccattgatgcttttcctaaacccttatactatctttttattatctgagccttttcctaatgcagctcataggtgctagctagagctgctgctcagtattgaagactttacaaggagattagaaatctttggaaaacatatgtgatgaaattgagctatatgatttatcagagatctgattccaaagagcacagaatactgttctcagaccatgaaaccagacaacacatgtattggtttaaactcgataatgacaggaaaattccaaactagagcagtaaattcaaatggtaagatgaatcctagaaggcctctgattgcagcatgttgacaccaacctcacgttacgaacaattcacagagaatttgcctttgtggcaactgaagatggaagtctggggggcacagacaaccttatcaaacaatataaaagccaatataaattctcataagcactatagaatttgcaaattcagaacattttatacctaaaagtaattctgtctttcctaaagtgtttttaacatgaaaattagtaggaagatgtggttactatttggaaagtgtaatgtaacaaaactctcttttgttaccacaaattttgtgagtttagtactctacagattgccccataagagcagtagcttttgaaactcataattctctgaaataaatgaaagacatttaattcaaggatcaaaaattgtggccatctttgcaaatgactacctatagcctgtgaaaatacatttcaaaaaatgttatgtgcaatgaacactaaatttaagagcagttacagtgtgactcactcatgtttaaaaaaaatcgaagagctaaaaaatacgtctaatttatgtaacccattggaatgtatttctaggttctcttcaggattaattaaataaacatgcaatttatgaaaacatataaacaattatttatcacttttatgacccaaatcacaataaaattgtcatttaggataaactggggagaatagactgaacatatggttatattcacagttatttattaacttaaatgttattccaacattagagctaatgttaaaaagatttaaactgtaacgtctaatatttggaataatatattaaagtattagcactgtggttgattttcttgaattatgttgcatcttgtactactaagcttgtgaaaataaacatttggatgttttaaaaggtaaacattatgtttgat

SEQ ID NO: 311564 - DNA, 1687 bp, Homo sapiens
ctgctgacagatacacagagaagagatcagtggtctcctgcacactatgcacttcattaataagaagggattaatgaagtgcatagtgctgctcccaggagaccactgctgacagatacacagagaagagatcagagaggaaaaactgggaagacataaatgaattatacccagccatgaaacaatgccaactgtctcttccctaaggaagagtacaagtaccctaaaattgaaaggtggtccctacactgaaaacgcacatagtttgtcaaaagtgtacaaaagggaaagagtcttattttaagctttcaggctttcttaaaaacttggggaccagaatttcaatgtatgtttccattgttgaagataacattttcttcaaagagccttaaccttttgtactggaaggaaatattttctggacttaagtagttgcctaaatttaagattcctacactttatttctgccattgatgcttttcctaaacccttatactatctttttattatctgagccttttcctaatgcagctcataggtgctagctagagctgctgctcagtattgaagactttacaaggagattagaaatctttggaaaacatatgtgatgaaattgagctatatgatttatcagagatctgattccaaagagcacagaatactgttctcagaccatgaaaccagacaacacatgtattggtttaaactcgataatgacaggaaaattccaaactagagcagtaaattcaaatggtaagatgaatcctagaaggcctctgattgcagcatgttgacaccaacctcacgttacgaacaattcacagagaatttgcctttgtggcaactgaagatggaagtctggggggcacagacaaccttatcaaacaatataaaagccaatataaattctcataagcactatagaatttgcaaattcagaacattttatacctaaaagtaattctgtctttcctaaagtgtttttaacatgaaaattagtaggaagatgtggttactatttggaaagtgtaatgtaacaaaactctcttttgttaccacaaattttgtgagtttagtactctacagattgccccataagagcagtagcttttgaaactcataattctctgaaataaatgaaagacatttaattcaaggatcaaaaattgtggccatctttgcaaatgactacctatagcctgtgaaaatacatttcaaaaaatgttatgtgcaatgaacactaaatttaagagcagttacagtgtgactcactcatgtttaaaaaaaatcgaagagctaaaaaatacgtctaatttatgtaacccattggaatgtatttctaggttctcttcaggattaattaaataaacatgcaatttatgaaaacatataaacaattatttatcacttttatgacccaaatcacaataaaattgtcatttaggataaactggggagaatagactgaacatatggttatattcacagttatttattaacttaaatgttattccaacattagagctaatgttaaaaagatttaaactgtaacgtctaatatttggaataatatattaaagtattagcactgtggttgattttcttgaattatgttgcatcttgtactactaagcttgtgaaaataaacatttggatgttttaaaaggtaaacattatgtttgat

SEQ ID NO: 311565 - DNA, 1130 bp, Homo sapiens
  misc_feature (24)..(24): n is a, c, g, or t
acattcagctcggacccactttcngagtaggaaatctttggaaaacatatgtgatgaaattgagctatatgatttatcagagatctgattccaaagagcacagaatactgttctcagaccatgaaaccagacaacacatgtattggtttaaactcgataatgacaggaaaattccaaactagagcagtaaattcaaatggtaagatgaatcctagaaggcctctgattgcagcatgttgacaccaacctcacgttacgaacaattcacagagaatttgcctttgtggcaactgaagatggaagtctggggggcacagacaaccttatcaaacaatataaaagccaatataaattctcataagcactatagaatttgcaaattcagaacattttatacctaaaagtaattctgtctttcctaaagtgtttttaacatgaaaattagtaggaagatgtggttactatttggaaagtgtaatgtaacaaaactctcttttgttaccacaaattttgtgagtttagtactctacagattgccccataagagcagtagcttttgaaactcataattctctgaaataaatgaaagacatttaattcaaggatcaaaaattgtggccatctttgcaaatgactacctatagcctgtgaaaatacatttcaaaaaatgttatgtgcaatgaacactaaatttaagagcagttacagtgtgactcactcatgtttaaaaaaaatcgaagagctaaaaaatacgtctaatttatgtaacccattggaatgtatttctaggttctcttcaggattaattaaataaacatgcaatttatgaaaacatataaacaattatttatcacttttatgacccaaatcacaataaaattgtcatttaggataaactggggagaatagactgaacatatggttatattcacagttatttattaacttaaatgttattccaacattagagctaatgttaaaaagatttaaactgtaacgtctaatatttggaataatatattaaagtattagcactgtggttgattttcttgaattatgttgcatcttgtactactaagcttgtgaaaataaacatttggatgttttaaaaggtaaacattatgtttgat

SEQ ID NO: 311566 - DNA, 4953 bp, Homo sapiens
ggccgtaatctgactcccagcacacagggagctgcggggcaggcaatgagagctgcactctggctggggaaggcatgagtgacagacccacagcaaggcggtggggtaagtgtggacctttgtgtaccagagagaacatcatggtggctttcaaaggggtctggactcaagctttctggaaagcagtcacagcggaatttctggccatgcttatttttgttctcctcagcctgggatccaccatcaactggggtggaacagaaaagcctttaccggtcgacatggttctcatctccctttgctttggactcagcattgcaaccatggtgcagtgctttggccatatcagcggtggccacatcaaccctgcagtgactgtggccatggtgtgcaccaggaagatcagcatcgccaagtctgtcttctacatcgcagcccagtgcctgggggccatcattggagcaggaatcctctatctggtcacacctcccagtgtggtgggaggcctgggagtcaccatggttcatggaaatcttaccgctggtcatggtctcctggttgagttgataatcacatttcaattggtgtttactatctttgccagctgtgattccaaacggactgatgtcactggctcaatagctttagcaattggattttctgttgcaattggacatttatttgcaatcaattatactggtgccagcatgaatcccgcccgatcctttggacctgcagttatcatgggaaattgggaaaaccattggatatattgggttgggcccatcataggagctgtcctcgctggtggcctttatgagtatgtcttctgtccagatgttgaattcaaacgtcgttttaaagaagccttcagcaaagctgcccagcaaacaaaaggaagctacatggaggtggaggacaacaggagtcaggtagagacggatgacctgattctaaaacctggagtggtgcatgtgattgacgttgaccggggagaggagaagaaggggaaagaccaatctggagaggtattgtcttcagtatgactagaagatcgcactgaaagcagacaagactccttagaactgtcctcagatttccttccacccattaaggaaacagatttgttataaattagaaatgtgcaggtttgttgtttcatgtcatattactcagtctaaacaataaatatttcataatttacaaaggaggaacggaagaaacctattgtgaattccaaatctaaaaaaagaaatatttttaaaatgttcttaagcaaatatatacctattttatctagttacctttcattaacaaccaattttaaccgtgtgtcaagatttggttaagtcttgcctgacagaactcaaagacacgtctatcagcttattccttctctactggaatattggtatagtcaattcttatttgaatatttattctattaaactgagtttaacaatggcaaaatacagtatgtcacagtcatgcacattcaagagagaaaatataacaagttcttttatgagcaatcccttatgcatagactaccttggcaaaagagcattagcaagtgtcactgctcatcagttacttccttccatttatatcacaaatacccaagtttcaattctaacttcatttcatggtatttcttcctcctcaatgcccaaggtaatgtgggactaaagcccagaaatttgaaaagaatattcagaaatccttcccaaatcataagggcacctattgagattcaagacaagcagactcgtaaaatcttgtagaggcagaggcaaagttatcatcatacaaaaatcacaaacaaaaaggagatctgtattcgggtatcaaacggttgatctgttttcagtgcacaccctcaaatgcaccacaccagttttacgatctaagcttttaacccctttaccactttgcttatttttaaaaaatttattggcaaaactggggattttgtttgtaactttggttatctatatttaaacattagatgagacatatttttgataacaagaacttagctagttgagtcctggctttttgttgattattaagctgtgttcactctagaaggtgtaaaggccctgtcccaatctctgctctctcacttctcgtgacatttgttgataatctttactgcaagtgtaatgatatttgagtgaattaaaatgcatgacagacaaggtacaacatggttgcagaataaaagggtgaggacatcagatcactctgtattcaaagcttactagacgaacaatctttcatttctggatatattgtagctaacccaacacatttttaaactatttttgttactgactcacttacttgtcaaaataattggtttttctgtcctgctttgccttttgtcactagaatgttctccagaaaccccagtttctgtcatcttaactgtctagtctagccgttaacttagacaaagaagtgcaaatgtcaatttcactaaacaaaagctattagaagtaaagcagaaacctatcactgcaaggagtgacttgtaaataactgatgatcaagggctgtcttctctcaagcatggttccaactctgtgtcactttttagcgttaatggcagttgtgtgtctgtggcagtgagataatggaccactattaaacctgattctcttcggtgctaggaaagagtgatgtgtgagattcccagagagtcgtcacaccagtgttatgcctgggagtgccactggcataccgcaggtgcctaaatcccaggcccctttctcagggggcgtggccacaccacacactgcgccagtgacacatagttacttcctggctgggacggcacctatagaaactagggtacaaatctcccaaagatggtttgcaccgtcatttcaaatgtttgcacaatataccacttagaggcttaaaatcagggtggttcagttcaaaaggtaatatcaaccgtcagcaaacatgtcagtttaaaaataagttcggttaacaaggaagtgttaagcagattttttgaatacacttacaatatactggcttataatcatttttattctgccatatggtttatttcatatacactcacttttacactcacttccaattatagcattcaataagttacggttaaagaaaagtgaatggtgtttttgtaatttgttttctagtagctagcagagagcctggcacatagtatgtattcaaaacaagtgtgttaattaataaaaatatataaatctcatttgagatttaagaatataaataattttcttttaatctttattttgctcaatatttaataggaagtatgatttcaaggactactaaaggaaggcaatatacatgtgaaaaccataaaatacattttttgcattctactatttttaggggcatgaaatgaatgaaagctttagcacttttttgcccctacatatgagacaacatattttgtatttcactcaaggctctgccagtaaaaagtaatgaaattgtacctttctaatgacatctatgcagcaggggtctatcgccttgtggatggcaccaaattatccaagtgtattaggagactggggcttttttctttaatcccttcttattaatgaagtgcatagtgctgctcccaggagaccactgctgacagatacacagagaagagatcagagaggaaaaactgggaagacataaatgaattatacccagccatgaaacaatgccaactgtctcttccctaaggaagagtacaagtaccctaaaattgaaaggtggtccctacactgaaaacgcacatagtttgtcaaaagtgtacaaaagggaaagagtcttattttaagctttcaggctttcttaaaaacttggggaccagaatttcaatgtatgtttccattgttgaagataacattttcttcaaagagccttaaccttttgtactggaaggaaatattttctggacttaagtagttgcctaaatttaagattcctacactttatttctgccattgatgcttttcctaaacccttatactatctttttattatctgagccttttcctaatgcagctcataggtgctagctagagctgctgctcagtattgaagactttacaaggagattagaaatctttggaaaacatatgtgatgaaattgagctatatgatttatcagagatctgattccaaagagcacagaatactgttctcagaccatgaaaccagacaacacatgtattggtttaaactcgataatgacaggaaaattccaaactagagcagtaaattcaaatggtaagatgaatcctagaaggcctctgattgcagcatgttgacaccaacctcacgttacgaacaattcacagagaatttgcctttgtggcaactgaagatggaagtctggggggcacagacaaccttatcaaacaatataaaagccaatataaattctcataagcactatagaatttgcaaattcagaacattttatacctaaaagtaattctgtctttcctaaagtgtttttaacatgaaaattagtaggaagatgtggttactatttggaaagtgtaatgtaacaaaactctcttttgttaccacaaattttgtgagtttagtactctacagattgccccataagagcagtagcttttgaaactcataattctctgaaataaatgaaagacatttaattcaaggatcaaaaattgtggccatctttgcaaatgactacctatagcctgtgaaaatacatttcaaaaaatgttatgtgcaatgaacactaaatttaagagcagttacagtgtgactcactcatgtttaaaaaaaatcgaagagctaaaaaatacgtctaatttatgtaacccattggaatgtatttctaggttctcttcaggattaattaaataaacatgcaatttatgaaaacatataaacaattatttatcactt

SEQ ID NO: 311567 - DNA, 5096 bp, Homo sapiens
ggccgtaatctgactcccagcacacagggagctgcggggcaggcaatgagagctgcactctggctggggaaggcatgagtgacagacccacagcaaggcggtggggtaagtgtggacctttgtgtaccagagagaacatcatggtggctttcaaaggggtctggactcaagctttctggaaagcagtcacagcggaatttctggccatgcttatttttgttctcctcagcctgggatccaccatcaactggggtggaacagaaaagcctttaccggtcgacatggttctcatctccctttgctttggactcagcattgcaaccatggtgcagtgctttggccatatcagcggtggccacatcaaccctgcagtgactgtggccatggtgtgcaccaggaagatcagcatcgccaagtctgtcttctacatcgcagcccagtgcctgggggccatcattggagcaggaatcctctatctggtcacacctcccagtgtggtgggaggcctgggagtcaccatggttcatggaaatcttaccgctggtcatggtctcctggttgagttgataatcacatttcaattggtgtttactatctttgccagctgtgattccaaacggactgatgtcactggctcaatagctttagcaattggattttctgttgcaattggacatttatttgcaatcaattatactggtgccagcatgaatcccgcccgatcctttggacctgcagttatcatgggaaattgggaaaaccattggatatattgggttgggcccatcataggagctgtcctcgctggtggcctttatgagtatgtcttctgtccagatgttgaattcaaacgtcgttttaaagaagccttcagcaaagctgcccagcaaacaaaaggaagctacatggaggtggaggacaacaggagtcaggtagagacggatgacctgattctaaaacctggagtggtgcatgtgattgacgttgaccggggagaggagaagaaggggaaagaccaatctggagaggtattgtcttcagtatgactagaagatcgcactgaaagcagacaagactccttagaactgtcctcagatttccttccacccattaaggaaacagatttgttataaattagaaatgtgcaggtttgttgtttcatgtcatattactcagtctaaacaataaatatttcataatttacaaaggaggaacggaagaaacctattgtgaattccaaatctaaaaaaagaaatatttttaaaatgttcttaagcaaatatatacctattttatctagttacctttcattaacaaccaattttaaccgtgtgtcaagatttggttaagtcttgcctgacagaactcaaagacacgtctatcagcttattccttctctactggaatattggtatagtcaattcttatttgaatatttattctattaaactgagtttaacaatggcaaaatacagtatgtcacagtcatgcacattcaagagagaaaatataacaagttcttttatgagcaatcccttatgcatagactaccttggcaaaagagcattagcaagtgtcactgctcatcagttacttccttccatttatatcacaaatacccaagtttcaattctaacttcatttcatggtatttcttcctcctcaatgcccaaggtaatgtgggactaaagcccagaaatttgaaaagaatattcagaaatccttcccaaatcataagggcacctattgagattcaagacaagcagactcgtaaaatcttgtagaggcagaggcaaagttatcatcatacaaaaatcacaaacaaaaaggagatctgtattcgggtatcaaacggttgatctgttttcagtgcacaccctcaaatgcaccacaccagttttacgatctaagcttttaacccctttaccactttgcttatttttaaaaaatttattggcaaaactggggattttgtttgtaactttggttatctatatttaaacattagatgagacatatttttgataacaagaacttagctagttgagtcctggctttttgttgattattaagctgtgttcactctagaaggtgtaaaggccctgtcccaatctctgctctctcacttctcgtgacatttgttgataatctttactgcaagtgtaatgatatttgagtgaattaaaatgcatgacagacaaggtacaacatggttgcagaataaaagggtgaggacatcagatcactctgtattcaaagcttactagacgaacaatctttcatttctggatatattgtagctaacccaacacatttttaaactatttttgttactgactcacttacttgtcaaaataattggtttttctgtcctgctttgccttttgtcactagaatgttctccagaaaccccagtttctgtcatcttaactgtctagtctagccgttaacttagacaaagaagtgcaaatgtcaatttcactaaacaaaagctattagaagtaaagcagaaacctatcactgcaaggagtgacttgtaaataactgatgatcaagggctgtcttctctcaagcatggttccaactctgtgtcactttttagcgttaatggcagttgtgtgtctgtggcagtgagataatggaccactattaaacctgattctcttcggtgctaggaaagagtgatgtgtgagattcccagagagtcgtcacaccagtgttatgcctgggagtgccactggcataccgcaggtgcctaaatcccaggcccctttctcagggggcgtggccacaccacacactgcgccagtgacacatagttacttcctggctgggacggcacctatagaaactagggtacaaatctcccaaagatggtttgcaccgtcatttcaaatgtttgcacaatataccacttagaggcttaaaatcagggtggttcagttcaaaaggtaatatcaaccgtcagcaaacatgtcagtttaaaaataagttcggttaacaaggaagtgttaagcagattttttgaatacacttacaatatactggcttataatcatttttattctgccatatggtttatttcatatacactcacttttacactcacttccaattatagcattcaataagttacggttaaagaaaagtgaatggtgtttttgtaatttgttttctagtagctagcagagagcctggcacatagtatgtattcaaaacaagtgtgttaattaataaaaatatataaatctcatttgagatttaagaatataaataattttcttttaatctttattttgctcaatatttaataggaagtatgatttcaaggactactaaaggaaggcaatatacatgtgaaaaccataaaatacattttttgcattctactatttttaggggcatgaaatgaatgaaagctttagcacttttttgcccctacatatgagacaacatattttgtatttcactcaaggctctgccagtaaaaagtaatgaaattgtacctttctaatgacatctatgcagcaggggtctatcgccttgtggatggcaccaaattatccaagtgtattaggagactggggcttttttctttaatcccttcttattaatgaagtgcatagtgctgctcccaggagaccactgctgacagatacacagagaagagatcagagaggaaaaactgggaagacataaatgaattatacccagccatgaaacaatgccaactgtctcttccctaaggaagagtacaagtaccctaaaattgaaaggtggtccctacactgaaaacgcacatagtttgtactggaaggaaatattttctggacttaagtagttgcctaaatttaagattcctacactttatttctgccattgatgcttttcctaaacccttatactatctttttattatctgagccttttcctaatgcagctcataggtgctagctagagctgctgctcagtattgaagactttacaaggagattagaaatctttggaaaacatatgtgatgaaattgagctatatgatttatcagagatctgattccaaagagcacagaatactgttctcagaccatgaaaccagacaacacatgtattggtttaaactcgataatgacaggaaaattccaaactagagcagtaaattcaaatggtaagatgaatcctagaaggcctctgattgcagcatgttgacaccaacctcacgttacgaacaattcacagagaatttgcctttgtggcaactgaagatggaagtctggggggcacagacaaccttatcaaacaatataaaagccaatataaattctcataagcactatagaatttgcaaattcagaacattttatacctaaaagtaattctgtctttcctaaagtgtttttaacatgaaaattagtaggaagatgtggttactatttggaaagtgtaatgtaacaaaactctcttttgttaccacaaattttgtgagtttagtactctacagattgccccataagagcagtagcttttgaaactcataattctctgaaataaatgaaagacatttaattcaaggatcaaaaattgtggccatctttgcaaatgactacctatagcctgtgaaaatacatttcaaaaaatgttatgtgcaatgaacactaaatttaagagcagttacagtgtgactcactcatgtttaaaaaaaatcgaagagctaaaaaatacgtctaatttatgtaacccattggaatgtatttctaggttctcttcaggattaattaaataaacatgcaatttatgaaaacatataaacaattatttatcacttttatgacccaaatcacaataaaattgtcatttaggataaactggggagaatagactgaacatatggttatattcacagttatttattaacttaaatgttattccaacattagagctaatgttaaaaagatttaaactgtaacgtctaatatttggaataatatattaaagtattagcactgtggttgattttcttgaattatgttgcatcttgtactactaagcttgtgaaaataaacatttggatgttttaaaaggtaaacattatgtttgat

SEQ ID NO: 311568 - DNA, 5173 bp, Homo sapiens
ggccgtaatctgactcccagcacacagggagctgcggggcaggcaatgagagctgcactctggctggggaaggcatgagtgacagacccacagcaaggcggtggggtaagtgtggacctttgtgtaccagagagaacatcatggtggctttcaaaggggtctggactcaagctttctggaaagcagtcacagcggaatttctggccatgcttatttttgttctcctcagcctgggatccaccatcaactggggtggaacagaaaagcctttaccggtcgacatggttctcatctccctttgctttggactcagcattgcaaccatggtgcagtgctttggccatatcagcggtggccacatcaaccctgcagtgactgtggccatggtgtgcaccaggaagatcagcatcgccaagtctgtcttctacatcgcagcccagtgcctgggggccatcattggagcaggaatcctctatctggtcacacctcccagtgtggtgggaggcctgggagtcaccatggttcatggaaatcttaccgctggtcatggtctcctggttgagttgataatcacatttcaattggtgtttactatctttgccagctgtgattccaaacggactgatgtcactggctcaatagctttagcaattggattttctgttgcaattggacatttatttgcaatcaattatactggtgccagcatgaatcccgcccgatcctttggacctgcagttatcatgggaaattgggaaaaccattggatatattgggttgggcccatcataggagctgtcctcgctggtggcctttatgagtatgtcttctgtccagatgttgaattcaaacgtcgttttaaagaagccttcagcaaagctgcccagcaaacaaaaggaagctacatggaggtggaggacaacaggagtcaggtagagacggatgacctgattctaaaacctggagtggtgcatgtgattgacgttgaccggggagaggagaagaaggggaaagaccaatctggagaggtattgtcttcagtatgactagaagatcgcactgaaagcagacaagactccttagaactgtcctcagatttccttccacccattaaggaaacagatttgttataaattagaaatgtgcaggtttgttgtttcatgtcatattactcagtctaaacaataaatatttcataatttacaaaggaggaacggaagaaacctattgtgaattccaaatctaaaaaaagaaatatttttaaaatgttcttaagcaaatatatacctattttatctagttacctttcattaacaaccaattttaaccgtgtgtcaagatttggttaagtcttgcctgacagaactcaaagacacgtctatcagcttattccttctctactggaatattggtatagtcaattcttatttgaatatttattctattaaactgagtttaacaatggcaaaatacagtatgtcacagtcatgcacattcaagagagaaaatataacaagttcttttatgagcaatcccttatgcatagactaccttggcaaaagagcattagcaagtgtcactgctcatcagttacttccttccatttatatcacaaatacccaagtttcaattctaacttcatttcatggtatttcttcctcctcaatgcccaaggtaatgtgggactaaagcccagaaatttgaaaagaatattcagaaatccttcccaaatcataagggcacctattgagattcaagacaagcagactcgtaaaatcttgtagaggcagaggcaaagttatcatcatacaaaaatcacaaacaaaaaggagatctgtattcgggtatcaaacggttgatctgttttcagtgcacaccctcaaatgcaccacaccagttttacgatctaagcttttaacccctttaccactttgcttatttttaaaaaatttattggcaaaactggggattttgtttgtaactttggttatctatatttaaacattagatgagacatatttttgataacaagaacttagctagttgagtcctggctttttgttgattattaagctgtgttcactctagaaggtgtaaaggccctgtcccaatctctgctctctcacttctcgtgacatttgttgataatctttactgcaagtgtaatgatatttgagtgaattaaaatgcatgacagacaaggtacaacatggttgcagaataaaagggtgaggacatcagatcactctgtattcaaagcttactagacgaacaatctttcatttctggatatattgtagctaacccaacacatttttaaactatttttgttactgactcacttacttgtcaaaataattggtttttctgtcctgctttgccttttgtcactagaatgttctccagaaaccccagtttctgtcatcttaactgtctagtctagccgttaacttagacaaagaagtgcaaatgtcaatttcactaaacaaaagctattagaagtaaagcagaaacctatcactgcaaggagtgacttgtaaataactgatgatcaagggctgtcttctctcaagcatggttccaactctgtgtcactttttagcgttaatggcagttgtgtgtctgtggcagtgagataatggaccactattaaacctgattctcttcggtgctaggaaagagtgatgtgtgagattcccagagagtcgtcacaccagtgttatgcctgggagtgccactggcataccgcaggtgcctaaatcccaggcccctttctcagggggcgtggccacaccacacactgcgccagtgacacatagttacttcctggctgggacggcacctatagaaactagggtacaaatctcccaaagatggtttgcaccgtcatttcaaatgtttgcacaatataccacttagaggcttaaaatcagggtggttcagttcaaaaggtaatatcaaccgtcagcaaacatgtcagtttaaaaataagttcggttaacaaggaagtgttaagcagattttttgaatacacttacaatatactggcttataatcatttttattctgccatatggtttatttcatatacactcacttttacactcacttccaattatagcattcaataagttacggttaaagaaaagtgaatggtgtttttgtaatttgttttctagtagctagcagagagcctggcacatagtatgtattcaaaacaagtgtgttaattaataaaaatatataaatctcatttgagatttaagaatataaataattttcttttaatctttattttgctcaatatttaataggaagtatgatttcaaggactactaaaggaaggcaatatacatgtgaaaaccataaaatacattttttgcattctactatttttaggggcatgaaatgaatgaaagctttagcacttttttgcccctacatatgagacaacatattttgtatttcactcaaggctctgccagtaaaaagtaatgaaattgtacctttctaatgacatctatgcagcaggggtctatcgccttgtggatggcaccaaattatccaagtgtattaggagactggggcttttttctttaatcccttcttattaatgaagtgcatagtgctgctcccaggagaccactgctgacagatacacagagaagagatcagagaggaaaaactgggaagacataaatgaattatacccagccatgaaacaatgccaactgtctcttccctaaggaagagtacaagtaccctaaaattgaaaggtggtccctacactgaaaacgcacatagtttgtcaaaagtgtacaaaagggaaagagtcttattttaagctttcaggctttcttaaaaacttggggaccagaatttcaatgtatgtttccattgttgaagataacattttcttcaaagagccttaaccttttgtactggaaggaaatattttctggacttaagtagttgcctaaatttaagattcctacactttatttctgccattgatgcttttcctaaacccttatactatctttttattatctgagccttttcctaatgcagctcataggtgctagctagagctgctgctcagtattgaagactttacaaggagattagaaatctttggaaaacatatgtgatgaaattgagctatatgatttatcagagatctgattccaaagagcacagaatactgttctcagaccatgaaaccagacaacacatgtattggtttaaactcgataatgacaggaaaattccaaactagagcagtaaattcaaatggtaagatgaatcctagaaggcctctgattgcagcatgttgacaccaacctcacgttacgaacaattcacagagaatttgcctttgtggcaactgaagatggaagtctggggggcacagacaaccttatcaaacaatataaaagccaatataaattctcataagcactatagaatttgcaaattcagaacattttatacctaaaagtaattctgtctttcctaaagtgtttttaacatgaaaattagtaggaagatgtggttactatttggaaagtgtaatgtaacaaaactctcttttgttaccacaaattttgtgagtttagtactctacagattgccccataagagcagtagcttttgaaactcataattctctgaaataaatgaaagacatttaattcaaggatcaaaaattgtggccatctttgcaaatgactacctatagcctgtgaaaatacatttcaaaaaatgttatgtgcaatgaacactaaatttaagagcagttacagtgtgactcactcatgtttaaaaaaaatcgaagagctaaaaaatacgtctaatttatgtaacccattggaatgtatttctaggttctcttcaggattatgacccaaatcacaataaaattgtcatttaggataaactggggagaatagactgaacatatggttatattcacagttatttattaacttaaatgttattccaacattagagctaatgttaaaaagatttaaactgtaacgtctaatatttggaataatatattaaagtattagcactgtggttgattttcttgaattatgttgcatcttgtactactaagcttgtgaaaataaacatttggatgttttaaaaggtaaacattatgtttgat

SEQ ID NO: 311569 - DNA, 3272 bp, Homo sapiens
ggccgtaatctgactcccagcacacagggagctgcggggcaggcaatgagagctgcactctggctggggaaggcatgagtgacagacccacagcaaggcggtggggtaagtgtggacctttgtgtaccagagagaacatcatggtggctttcaaaggggtctggactcaagctttctggaaagcagtcacagcggaatttctggccatgcttatttttgttctcctcagcctgggatccaccatcaactggggtggaacagaaaagcctttaccggtcgacatggttctcatctccctttgctttggactcagcattgcaaccatggtgcagtgctttggccatatcagcggtggccacatcaaccctgcagtgactgtggccatggtgtgcaccaggaagatcagcatcgccaagtctgtcttctacatcgcagcccagtgcctgggggccatcattggagcaggaatcctctatctggtcacacctcccagtgtggtgggaggcctgggagtcaccatggttcatggaaatcttaccgctggtcatggtctcctggttgagttgataatcacatttcaattggtgtttactatctttgccagctgtgattccaaacggactgatgtcactggctcaatagctttagcaattggattttctgttgcaattggacatttatttgcaatcaattatactggtgccagcatgaatcccgcccgatcctttggacctgcagttatcatgggaaattgggaaaaccattggatatattgggttgggcccatcataggagctgtcctcgctggtggcctttatgagtatgtcttctgtccagatgttgaattcaaacgtcgttttaaagaagccttcagcaaagctgcccagcaaacaaaaggaagctacatggaggtggaggacaacaggagtcaggtagagacggatgacctgattctaaaacctggagtggtgcatgtgattgacgttgaccggggagaggagaagaaggggaaagaccaatctggagaggtattgtcttcagtatgactagaagatcgcactgaaagcagacaagactccttagaactgtcctcagatttccttccacccattaaggaaacagatttgttataaattagaaatgtgcaggtttgttgtttcatgtcatattactcagtctaaacaataaatatttcataatttacaaaggaggaacggaagaaacctattgtgaattccaaatctaaaaaaagaaatatttttaaaatgttcttaagcaaatatatacctattttatctagttacctttcattaacaaccaattttaaccgtgtgtcaagatttggttaagtcttgcctgacagaactcaaagacacgtctatcagcttattccttctctactggaatattggtatagtcaattcttatttgaatatttattctattaaactgagtttaacaatggcaaaatacagtatgtcacagtcatgcacattcaagagagaaaatataacaagttcttttatgagcaatcccttatgcatagactaccttggcaaaagagcattagcaagtgtcactgctcatcagttacttccttccatttatatcacaaatacccaagtttcaattctaacttcatttcatggtatttcttcctcctcaatgcccaaggtaatgtgggactaaagcccagaaatttgaaaagaatattcagaaatccttcccaaatcataagggcacctattgagattcaagacaagcagactcgtaaaatcttgtagaggcagaggcaaagttatcatcatacaaaaatcacaaacaaaaaggagatctgtattcgggtatcaaacggttgatctgttttcagtgcacaccctcaaatgcaccacaccagttttacgatctaagcttttaacccctttaccactttgcttatttttaaaaaatttattggcaaaactggggattttgtttgtaactttggttatctatatttaaacattagatgagacatatttttgataacaagaacttagctagttgagtcctggctttttgttgattattaagctgtgttcactctagaaggtgtaaaggccctgtcccaatctctgctctctcacttctcgtgacatttgttgataatctttactgcaagtgtaatgatatttgagtgaattaaaatgcatgacagacaaggtacaacatggttgcagaataaaagggtgaggacatcagatcactctgtattcaaagcttactagacgaacaatctttcatttctggatatattgtagctaacccaacacatttttaaactatttttgttactgactcacttacttgtcaaaataattggtttttctgtcctgctttgccttttgtcactagaatgttctccagaaaccccagtttctgtcatcttaactgtctagtctagccgttaacttagacaaagaagtgcaaatgtcaatttcactaaacaaaagctattagaagtaaagcagaaacctatcactgcaaggagtgacttgtaaataactgatgatcaagggctgtcttctctcaagcatggttccaactctgtgtcactttttagcgttaatggcagttgtgtgtctgtggcagtgagataatggaccactattaaacctgattctcttcggtgctaggaaagagtgatgtgtgagattcccagagagtcgtcacaccagtgttatgcctgggagtgccactggcataccgcaggtgcctaaatcccaggcccctttctcagggggcgtggccacaccacacactgcgccagtgacacatagttacttcctggctgggacggcacctatagaaactagggtacaaatctcccaaagatggtttgcaccgtcatttcaaatgtttgcacaatataccacttagaggcttaaaatcagggtggttcagttcaaaaggtaatatcaaccgtcagcaaacatgtcagtttaaaaataagttcggttaacaaggaagtgttaagcagattttttgaatacacttacaatatactggcttataatcatttttattctgccatatggtttatttcatatacactcacttttacactcacttccaattatagcattcaataagttacggttaaagaaaagtgaatggtgtttttgtaatttgttttctagtagctagcagagagcctggcacatagtatgtattcaaaacaagtgtgttaattaataaaaatatataaatctcatttgagatttaagaatata

SEQ ID NO: 311570 - DNA, 559 bp, Homo sapiens
tcagtcggtaccagcagtacgctcatcaactacatggcaagttgcatatcggggagtcctgaatagccctgtgaaggctgttcgtgacacgctcatcacccagtgtgcccagatcctggcctgttacagaaagaactgtgctagcccctcctctgcaggacagttgatccttcctgagtgcatgaagctactcccagtttacctgaactgtgtgttgaagagtgatgtcctgcagcctggagctgaagtcactactgatgaccgtgcctatgtccgacagctagttacctccatggatgtgactgagaccaatgtcttcttctaccctcggctcttacctttgacaaagtctcccgttgagagtactaccgaaccaccagcagttcgagcctctgaagagcgtctaagcaatggggatatatatttactggagaatgggctcaacctcttcctctgggtgggagcaagcgtccaacagggtgttgtccagagccttttcattggtttatttttcaatgcatctttaatttgtaaagaaataaaataaattaagatgtaa

SEQ ID NO: 311571 - DNA, 422 bp, Homo sapiens
  misc_feature (39)..(39): n is a, c, g, or t
  misc_feature (370)..(371): n is a, c, g, or t
gaacatcgagctcgcaccctgccatttactccatggccnagtttgcatatcggggagtcctgaatagccctgtgaaggctgttcgtgacacgctcatcacccagtgtgcccagatcctggcctgttacagaaagaactgtgctagcccctcctctgcaggacagttgatccttcctgagtgcatgaagctactcccagtttacctgaactgtgtgttgaagagtgatgtcctgcagcctggagctgaagtcactactgatgaccgtgcctatgtccgacagctagttacctccatggatgtgactgagaccaatgtcttcttctaccctcggctcttacctttgagtgcctttcctcctgaccattctgnngctgctgccaaggtaagttcttatgacccatttgttcctgatgccacctct

SEQ ID NO: 311572 - DNA, 4531 bp, Homo sapiens
gaaccggaagtggagcctgggagccttgacgttaggaacgaagtctaacctggatctggagccgggagataatctgaatgctggctggggcagaaaattactaagatcctgtggaagtgtgaggattattaaactgatcactgtctgataaggtgagatcaaattgggaatgctttcataatgaacgtcaaccagtcagttccacctgtgccaccatttgggcagccccagcccatctacccagggtatcatcagtccagctatggtgggcaatcagggtccacagcccccgccattccctatggagcctacaatggcccagtaccaggctatcagcaaacacctccccaaggtatgtcaagagccccaccttcctcgggggcacctccagcctcaacagcacaggctccttgtggccaggctgcatatggccagtttggccaaggagatgtacagaatgggccaagctccactgttcagatgcaaaggctgcctgggtctcagccatttgggtccccattggcccctgtgggcaaccagccacctgtgcttcagccctatggccctcccccgacaagtgcacaggtggctacgcagctgtctggaatgcagatcagcggtgctgtggccccagcccctccttcttcagggctgggctttggcccaccaacatcgctggcttcagcctcaggaagtttccctaactctggtctgtatggctcctatcctcagggccaggctcctccccttagccaggcccaaggtcatcctgggatccagactccccagcgatctgccccatcacaggcctccagcttcacacccccagcttcagggggtcctcggctgccttcgatgactggtccactcctgcctggacagagttttggagggccctcagtgagccagcccaaccatgtgtcttcacctcctcaagctctgccccctggcacccagatgactgggcccctgggaccactgccacctatgcactccccgcagcagccaggctatcagccccaacaaaatggttccttcggaccagcccggggccctcagtctaattatggaggcccctacccagcagcacccacctttggcagtcagcctgggcctcctcagccactgcctcctaagcgcctggaccctgatgccatcccaagccctattcaggtcattgaagatgacaggaacaaccggggtacagagccatttgttactggagtacggggccaggtgccacccttagtcactaccaacttcctggtgaaagaccaagggaatgcaagtccccgatacatccgatgtacatcctataatatcccttgcacatctgacatggctaagcaggctcaggtgcccctggcagcagtcatcaaaccgctggcaaggctgcccccagaggaggcttcaccgtatgttgtggaccatggggaatctggccctttgcgctgcaaccgctgcaaagcatacatgtgtcccttcatgcagttcattgaaggagggaggcgtttccagtgctgtttttgcagctgtatcaatgatgttcccccccagtattttcagcacctggatcataccggcaaacgtgtggatgcttatgaccgccctgagctatccctgggctcttatgaattcttggccactgtagattactgcaagaacaataagttccccagccctcctgcctttatcttcatgattgacgtctcctacaatgccatcaggactggtcttgttaggctcctctgtgaggagctcaagtcactgttagactttctacctagggagggtggggcagaagagtcagcaatccgcgttggctttgtcacctacaataaggtgctccacttctataatgtgaagagctcattggcccagccacagatgatggttgtgtctgatgtggctgacatgtttgtgccactgctggatggcttcctggtcaacgtcaatgagtctcgggcagttatcaccagcttattggatcagattccagaaatgtttgcagacacaagggaaacagagacagtatttgtaccagttatccaggctggaatggaggctctgaaggctgctgagtgtgcagggaagctctttctattccatacatccctgcccattgcagaggccccagggaaactgaagaacagagatgacaggaagctgatcaatacagacaaggagaagactctgttccagcctcagacaggtgcctatcagaccctggccaaagagtgtgtggcccaaggctgctgtgtagatctctttctcttccctaaccagtatgtggatgtggccacactctctgttgtgccccagctcactggtggctctgtctacaaatatgcttcctttcaggtggagaacgaccaggagcggttcctgagtgacctgcgtcgtgatgtccagaaggttgttggctttgatgctgtgatgcgggtccggacaagcactggtatccgtgctgtagatttctttggagctttctacatgagcaacacgacagatgtggagctggctgggctagatggggacaaaacagtgactgtggagttcaagcatgacgatcggctcaatgaagagagcggagctctcctgcagtgtgccctgctttacaccagctgtgcagggcagcgtcggctccgcatccataatctggccctgaactgctgcacccagctggctgatctatatcgaaactgtgagactgacacgctcatcaactacatggccaagtttgcatatcggggagtcctgaatagccctgtgaaggctgttcgtgacacgctcatcacccagtgtgcccagatcctggcctgttacagaaagaactgtgctagcccctcctctgcaggacagttgatccttcctgagtgcatgaagctactcccagtttacctgaactgtgtgttgaagagtgatgtcctgcagcctggagctgaagtcactactgatgaccgtgcctatgtccgacagctagttacctccatggatgtgactgagaccaatgtcttcttctaccctcggctcttacctttgacaaagtctcccgttgagagtactaccgaaccaccagcagttcgagcctctgaagagcgtctaagcaatggggatatatatttactggagaatgggctcaacctcttcctctgggtgggagcaagcgtccaacagggtgttgtccagagccttttcagcgtctcctccttcagtcagatcaccagtggtttgagtgttctgccagttctggataatccactgtccaagaaggttcgaggcctcattgatagcttacgggcacagagatcccggtacatgaagcttaccgtggtgaaacaggaagacaagatggagatgctgttcaagcacttcctggtggaagacaagagtctgagtgggggagcatcttatgtggactttctctgtcatatgcacaaggagattcggcagctactgagctaaagcaagtgggtaaatggcatagggcccaggctagcttccagaaagcaccccaggatgtcagagaaattgggacagtaacatatcttatgtaagctgacctcagtctctctggggggagggggagatataaggagacaccttctttctgggctcaagtatcctgccactctgtcatgtcctgctgatggaaggtgcccctgttccctcattctaccctctttttcctgctaatcctgtcataatgaatgtagcttctcagttcactgtatatgattcggtattgggggtttggaggcacccagaccctggcaatattatgtgtccctttggaccagtctcccaagaggagaggggcaggcaggaaagagtggggatcctaaggttactacagggggctcagtgtcatccacaacttcctatattagggataaaacatataggtgcacaagagctggggtatagcccataggtggtggagagaaaagtggtcagtccttcttgggcctggaggttagcagtcaagtttctctgctttcactgctcgctcgctctctcctgcaatgattgatgatcactccgtggatagagaggcacactgtcagaggtgaccggagaactgagttgcaaaatatattaagatctggtagaggtaccagcttcctttccagctggagaggccccaacactggatggttctgtagggagcctagggagcctggtcatcaacttgcaatacctcacagagccagttcacatcccactctgagctcccacgagaaacactgcttctccaggcccggggttgttggggagagaggcagaggcagctggagcgccgttctctcctgctgggacaccgcttgggctttggtattgactgagtggctgacagttatcttccaaccccaactggcttgggggcaggacaagggctaggcttgatggtggccaggcttgcctgctccccacctgggatgcccctgctctggacctctcatttctcttcattggtttatttttcaatgcatctttaatttgtaaagaaataaaataaattaagatgtaa

SEQ ID NO: 311573 - DNA, 4444 bp, Homo sapiens
gaaccggaagtggagcctgggagccttgacgttaggaacgaagtctaacctggatctggagccgggtgagatcaaattgggaatgctttcataatgaacgtcaaccagtcagttccacctgtgccaccatttgggcagccccagcccatctacccagggtatcatcagtccagctatggtgggcaatcagggtccacagcccccgccattccctatggagcctacaatggcccagtaccaggctatcagcaaacacctccccaaggtatgtcaagagccccaccttcctcgggggcacctccagcctcaacagcacaggctccttgtggccaggctgcatatggccagtttggccaaggagatgtacagaatgggccaagctccactgttcagatgcaaaggctgcctgggtctcagccatttgggtccccattggcccctgtgggcaaccagccacctgtgcttcagccctatggccctcccccgacaagtgcacaggtggctacgcagctgtctggaatgcagatcagcggtgctgtggccccagcccctccttcttcagggctgggctttggcccaccaacatcgctggcttcagcctcaggaagtttccctaactctggtctgtatggctcctatcctcagggccaggctcctccccttagccaggcccaaggtcatcctgggatccagactccccagcgatctgccccatcacaggcctccagcttcacacccccagcttcagggggtcctcggctgccttcgatgactggtccactcctgcctggacagagttttggagggccctcagtgagccagcccaaccatgtgtcttcacctcctcaagctctgccccctggcacccagatgactgggcccctgggaccactgccacctatgcactccccgcagcagccaggctatcagccccaacaaaatggttccttcggaccagcccggggccctcagtctaattatggaggcccctacccagcagcacccacctttggcagtcagcctgggcctcctcagccactgcctcctaagcgcctggaccctgatgccatcccaagccctattcaggtcattgaagatgacaggaacaaccggggtacagagccatttgttactggagtacggggccaggtgccacccttagtcactaccaacttcctggtgaaagaccaagggaatgcaagtccccgatacatccgatgtacatcctataatatcccttgcacatctgacatggctaagcaggctcaggtgcccctggcagcagtcatcaaaccgctggcaaggctgcccccagaggaggcttcaccgtatgttgtggaccatggggaatctggccctttgcgctgcaaccgctgcaaagcatacatgtgtcccttcatgcagttcattgaaggagggaggcgtttccagtgctgtttttgcagctgtatcaatgatgttcccccccagtattttcagcacctggatcataccggcaaacgtgtggatgcttatgaccgccctgagctatccctgggctcttatgaattcttggccactgtagattactgcaagaacaataagttccccagccctcctgcctttatcttcatgattgacgtctcctacaatgccatcaggactggtcttgttaggctcctctgtgaggagctcaagtcactgttagactttctacctagggagggtggggcagaagagtcagcaatccgcgttggctttgtcacctacaataaggtgctccacttctataatgtgaagagctcattggcccagccacagatgatggttgtgtctgatgtggctgacatgtttgtgccactgctggatggcttcctggtcaacgtcaatgagtctcgggcagttatcaccagcttattggatcagattccagaaatgtttgcagacacaagggaaacagagacagtatttgtaccagttatccaggctggaatggaggctctgaaggctgctgagtgtgcagggaagctctttctattccatacatccctgcccattgcagaggccccagggaaactgaagaacagagatgacaggaagctgatcaatacagacaaggagaagactctgttccagcctcagacaggtgcctatcagaccctggccaaagagtgtgtggcccaaggctgctgtgtagatctctttctcttccctaaccagtatgtggatgtggccacactctctgttgtgccccagctcactggtggctctgtctacaaatatgcttcctttcaggtggagaacgaccaggagcggttcctgagtgacctgcgtcgtgatgtccagaaggttgttggctttgatgctgtgatgcgggtccggacaagcactggtatccgtgctgtagatttctttggagctttctacatgagcaacacgacagatgtggagctggctgggctagatggggacaaaacagtgactgtggagttcaagcatgacgatcggctcaatgaagagagcggagctctcctgcagtgtgccctgctttacaccagctgtgcagggcagcgtcggctccgcatccataatctggccctgaactgctgcacccagctggctgatctatatcgaaactgtgagactgacacgctcatcaactacatggccaagtttgcatatcggggagtcctgaatagccctgtgaaggctgttcgtgacacgctcatcacccagtgtgcccagatcctggcctgttacagaaagaactgtgctagcccctcctctgcaggacagttgatccttcctgagtgcatgaagctactcccagtttacctgaactgtgtgttgaagagtgatgtcctgcagcctggagctgaagtcactactgatgaccgtgcctatgtccgacagctagttacctccatggatgtgactgagaccaatgtcttcttctaccctcggctcttacctttgacaaagtctcccgttgagagtactaccgaaccaccagcagttcgagcctctgaagagcgtctaagcaatggggatatatatttactggagaatgggctcaacctcttcctctgggtgggagcaagcgtccaacagggtgttgtccagagccttttcagcgtctcctccttcagtcagatcaccagtggtttgagtgttctgccagttctggataatccactgtccaagaaggttcgaggcctcattgatagcttacgggcacagagatcccggtacatgaagcttaccgtggtgaaacaggaagacaagatggagatgctgttcaagcacttcctggtggaagacaagagtctgagtgggggagcatcttatgtggactttctctgtcatatgcacaaggagattcggcagctactgagctaaagcaagtgggtaaatggcatagggcccaggctagcttccagaaagcaccccaggatgtcagagaaattgggacagtaacatatcttatgtaagctgacctcagtctctctggggggagggggagatataaggagacaccttctttctgggctcaagtatcctgccactctgtcatgtcctgctgatggaaggtgcccctgttccctcattctaccctctttttcctgctaatcctgtcataatgaatgtagcttctcagttcactgtatatgattcggtattgggggtttggaggcacccagaccctggcaatattatgtgtccctttggaccagtctcccaagaggagaggggcaggcaggaaagagtggggatcctaaggttactacagggggctcagtgtcatccacaacttcctatattagggataaaacatataggtgcacaagagctggggtatagcccataggtggtggagagaaaagtggtcagtccttcttgggcctggaggttagcagtcaagtttctctgctttcactgctcgctcgctctctcctgcaatgattgatgatcactccgtggatagagaggcacactgtcagaggtgaccggagaactgagttgcaaaatatattaagatctggtagaggtaccagcttcctttccagctggagaggccccaacactggatggttctgtagggagcctagggagcctggtcatcaacttgcaatacctcacagagccagttcacatcccactctgagctcccacgagaaacactgcttctccaggcccggggttgttggggagagaggcagaggcagctggagcgccgttctctcctgctgggacaccgcttgggctttggtattgactgagtggctgacagttatcttccaaccccaactggcttgggggcaggacaagggctaggcttgatggtggccaggcttgcctgctccccacctgggatgcccctgctctggacctctcatttctcttcattggtttatttttcaatgcatctttaatttgtaaagaaataaaataaattaagatgtaa

SEQ ID NO: 311574 - DNA, 5028 bp, Homo sapiens
  misc_feature (5026)..(5026): n is a, c, g, or t
gaaccggaagtggagcctgggagccttgacgttaggaacgaagtctaacctggatctggagccgggtgagatcaaattgggaatgctttcataatgaacgtcaaccagtcagttccacctgtgccaccatttgggcagccccagcccatctacccagggtatcatcagtccagctatggtgggcaatcagggtccacagcccccgccattccctatggagcctacaatggcccagtaccaggctatcagcaaacacctccccaaggtatgtcaagagccccaccttcctcgggggcacctccagcctcaacagcacaggctccttgtggccaggctgcatatggccagtttggccaaggagatgtacagaatgggccaagctccactgttcagatgcaaaggctgcctgggtctcagccatttgggtccccattggcccctgtgggcaaccagccacctgtgcttcagccctatggccctcccccgacaagtgcacaggtggctacgcagctgtctggaatgcagatcagcggtgctgtggccccagcccctccttcttcagggctgggctttggcccaccaacatcgctggcttcagcctcaggaagtttccctaactctggtctgtatggctcctatcctcagggccaggctcctccccttagccaggcccaaggtcatcctgggatccagactccccagcgatctgccccatcacaggcctccagcttcacacccccagcttcagggggtcctcggctgccttcgatgactggtccactcctgcctggacagagttttggagggccctcagtgagccagcccaaccatgtgtcttcacctcctcaagctctgccccctggcacccagatgactgggcccctgggaccactgccacctatgcactccccgcagcagccaggctatcagccccaacaaaatggttccttcggaccagcccggggccctcagtctaattatggaggcccctacccagcagcacccacctttggcagtcagcctgggcctcctcagccactgcctcctaagcgcctggaccctgatgccatcccaagccctattcaggtcattgaagatgacaggaacaaccggggtacagagccatttgttactggagtacggggccaggtgccacccttagtcactaccaacttcctggtgaaagaccaagggaatgcaagtccccgatacatccgatgtacatcctataatatcccttgcacatctgacatggctaagcaggctcaggtgcccctggcagcagtcatcaaaccgctggcaaggctgcccccagaggaggcttcaccgtatgttgtggaccatggggaatctggccctttgcgctgcaaccgctgcaaagcatacatgtgtcccttcatgcagttcattgaaggagggaggcgtttccagtgctgtttttgcagctgtatcaatgatgttcccccccagtattttcagcacctggatcataccggcaaacgtgtggatgcttatgaccgccctgagctatccctgggctcttatgaattcttggccactgtagattactgcaagaacaataagttccccagccctcctgcctttatcttcatgattgacgtctcctacaatgccatcaggactggtcttgttaggctcctctgtgaggagctcaagtcactgttagactttctacctagggagggtggggcagaagagtcagcaatccgcgttggctttgtcacctacaataaggtgctccacttctataatgtgaagagctcattggcccagccacagatgatggttgtgtctgatgtggctgacatgtttgtgccactgctggatggcttcctggtcaacgtcaatgagtctcgggcagttatcaccagcttattggatcagattccagaaatgtttgcagacacaagggaaacagagacagtatttgtaccagttatccaggctggaatggaggctctgaaggctgctgagtgtgcagggaagctctttctattccatacatccctgcccattgcagaggccccagggaaactgaagaacagagatgacaggaagctgatcaatacagacaaggagaagactctgttccagcctcagacaggtgcctatcagaccctggccaaagagtgtgtggcccaaggctgctgtgtagatctctttctcttccctaaccagtatgtggatgtggccacactctctgttgtgccccagctcactggtggctctgtctacaaatatgcttcctttcaggtggagaacgaccaggagcggttcctgagtgacctgcgtcgtgatgtccagaaggttgttggctttgatgctgtgatgcgggtccggacaagcactggtatccgtgctgtagatttctttggagctttctacatgagcaacacgacagatgtggagctggctgggctagatggggacaaaacagtgactgtggagttcaagcatgacgatcggctcaatgaagagagcggagctctcctgcagtgtgccctgctttacaccagctgtgcagggcagcgtcggctccgcatccataatctggccctgaactgctgcacccagctggctgatctatatcgaaactgtgagactgacacgctcatcaactacatggccaagtttgcatatcggggagtcctgaatagccctgtgaaggctgttcgtgacacgctcatcacccagtgtgcccagatcctggcctgttacagaaagaactgtgctagcccctcctctgcaggacagttgatccttcctgagtgcatgaagctactcccagtttacctgaactgtgtgttgaagagtgatgtcctgcagcctggagctgaagtcactactgatgaccgtgcctatgtccgacagctagttacctccatggatgtgactgagaccaatgtcttcttctaccctcggctcttacctttgacaaagtctcccgttgagagtactaccgaaccaccagcagttcgagcctctgaagagcgtctaagcaatggggatatatatttactggagaatgggctcaacctcttcctctgggtgggagcaagcgtccaacagggtgttgtccagagccttttcagcgtctcctccttcagtcagatcaccagtggtttgagtgttctgccagttctggataatccactgtccaagaaggttcgaggcctcattgatagcttacgggcacagagatcccggtacatgaagcttaccgtggtgaaacaggaagacaagatggagatgctgttcaagcacttcctggtggaagacaagagtctgagtgggggagcatcttatgtggactttctctgtcatatgcacaaggagattcggcagctactgagctaaagcaagtgggtaaatggcatagggcccaggctagcttccagaaagcaccccaggatgtcagagaaattgggacagtaacatatcttatgtaagctgacctcagtctctctggggggagggggagatataaggagacaccttctttctgggctcaagtatcctgccactctgtcatgtcctgctgatggaaggtgcccctgttccctcattctaccctctttttcctgctaatcctgtcataatgaatgtagcttctcagttcactgtatatgattcggtattgggggtttggaggcacccagaccctggcaatattatgtgtccctttggaccagtctcccaagaggagaggggcaggcaggaaagagtggggatcctaaggttactacagggggctcagtgtcatccacaacttcctatattagggataaaacatataggtgcacaagagctggggtatagcccataggtggtggagagaaaagtggtcagtccttcttgggcctggaggttagcagtcaagtttctctgctttcactgctcgctcgctctctcctgcaatgattgatgatcactccgtggatagagaggcacactgtcagaggtgaccggagaactgagttgcaaaatatattaagatctggtagaggtaccagcttcctttccagctggagaggccccaacactggatggttctgtagggagcctagggagcctggtcatcaacttgcaatacctcacagagccagttcacatcccactctgagctcccacgagaaacactgcttctccaggcccggggttgttggggagagaggcagaggcagctggagcgccgttctctcctgctgggacaccgcttgggctttggtattgactgagtggctgacagttatcttccaaccccaactggcttgggggcaggacaagggctaggcttgatggtggccaggcttgcctgctccccacctgggatgcccctgctctggacctctcatttctcttcattggtttatttttcaatgcatctttaatttgtaaagaaataaaataaattaagatgtaaaaaaaaaaaaaaaaaaaaaaaaaaaaaaaaaaaaagaaaaaacaaacaaaaaaagaggggggcgagccacactaaagaaatattccccccagagggggcgccacaaaatcaagaacgcgcggtcaccgcccggatatgtacgcgaaaacaagagggggcccccctattagagagcggcgccgtcataaaaacacacaggaaagcagggccgacttgaaaacaaacgggtgatgacgggggagaaaacgccggatacgaggggggacacaccttaggaggaggcgaggcccctaacactccgggggggggggcacacttggggggaccagtcgccccctccagagtattaagcgcccactgagggagaaccttaaagggtcaacgcggcaaccggggtgttaacacacccgcggcaaattgctgcggcgggctatgagagagtgcggcccaagggagtattttctaggggaaagattttttaccccgcggggcttggtcagaaaaacgcgggctgtggagggacacatatgagatccggagatcagtatatattcaatcgcgaccatgggagaagaggggggnat

SEQ ID NO: 311575 - DNA, 5269 bp, Homo sapiens
  misc_feature (5263)..(5263): n is a, c, g, or t
  misc_feature (5265)..(5265): n is a, c, g, or t
  misc_feature (5269)..(5269): n is a, c, g, or t
gaaccggaagtggagcctgggagccttgacgttaggaacgaagtctaacctggatctggagccgggtgagatcaaattgggaatgctttcataatgaacgtcaaccagtcagttccacctgtgccaccatttgggcagccccagcccatctacccagggtatcatcagtccagctatggtgggcaatcagggtccacagcccccgccattccctatggagcctacaatggcccagtaccaggctatcagcaaacacctccccaaggtatgtcaagagccccaccttcctcgggggcacctccagcctcaacagcacaggctccttgtggccaggctgcatatggccagtttggccaaggagatgtacagaatgggccaagctccactgttcagatgcaaaggctgcctgggtctcagccatttgggtccccattggcccctgtgggcaaccagccacctgtgcttcagccctatggccctcccccgacaagtgcacaggtggctacgcagctgtctggaatgcagatcagcggtgctgtggccccagcccctccttcttcagggctgggctttggcccaccaacatcgctggcttcagcctcaggaagtttccctaactctggtctgtatggctcctatcctcagggccaggctcctccccttagccaggcccaaggtcatcctgggatccagactccccagcgatctgccccatcacaggcctccagcttcacacccccagcttcagggggtcctcggctgccttcgatgactggtccactcctgcctggacagagttttggagggccctcagtgagccagcccaaccatgtgtcttcacctcctcaagctctgccccctggcacccagatgactgggcccctgggaccactgccacctatgcactccccgcagcagccaggctatcagccccaacaaaatggttccttcggaccagcccggggccctcagtctaattatggaggcccctacccagcagcacccacctttggcagtcagcctgggcctcctcagccactgcctcctaagcgcctggaccctgatgccatcccaagccctattcaggtcattgaagatgacaggaacaaccggggtacagagccatttgttactggagtacggggccaggtgccacccttagtcactaccaacttcctggtgaaagaccaagggaatgcaagtccccgatacatccgatgtacatcctataatatcccttgcacatctgacatggctaagcaggctcaggtgcccctggcagcagtcatcaaaccgctggcaaggctgcccccagaggaggcttcaccgtatgttgtggaccatggggaatctggccctttgcgctgcaaccgctgcaaagcatacatgtgtcccttcatgcagttcattgaaggagggaggcgtttccagtgctgtttttgcagctgtatcaatgatgttcccccccagtattttcagcacctggatcataccggcaaacgtgtggatgcttatgaccgccctgagctatccctgggctcttatgaattcttggccactgtagattactgcaagaacaataagttccccagccctcctgcctttatcttcatgattgacgtctcctacaatgccatcaggactggtcttgttaggctcctctgtgaggagctcaagtcactgttagactttctacctagggagggtggggcagaagagtcagcaatccgcgttggctttgtcacctacaataaggtgctccacttctataatgtgaagagctcattggcccagccacagatgatggttgtgtctgatgtggctgacatgtttgtgccactgctggatggcttcctggtcaacgtcaatgagtctcgggcagttatcaccagcttattggatcagattccagaaatgtttgcagacacaagggaaacagagacagtatttgtaccagttatccaggctggaatggaggctctgaaggctgctgagtgtgcagggaagctctttctattccatacatccctgcccattgcagaggccccagggaaactgaagaacagagatgacaggaagctgatcaatacagacaaggagaagactctgttccagcctcagacaggtgcctatcagaccctggccaaagagtgtgtggcccaaggctgctgtgtagatctctttctcttccctaaccagtatgtggatgtggccacactctctgttgtgccccagctcactggtggctctgtctacaaatatgcttcctttcaggtggagaacgaccaggagcggttcctgagtgacctgcgtcgtgatgtccagaaggttgttggctttgatgctgtgatgcgggtccggacaagcactggtatccgtgctgtagatttctttggagctttctacatgagcaacacgacagatgtggagctggctgggctagatggggacaaaacagtgactgtggagttcaagcatgacgatcggctcaatgaagagagcggagctctcctgcagtgtgccctgctttacaccagctgtgcagggcagcgtcggctccgcatccataatctggccctgaactgctgcacccagctggctgatctatatcgaaactgtgagactgacacgctcatcaactacatggccaagtttgcatatcggggagtcctgaatagccctgtgaaggctgttcgtgacacgctcatcacccagtgtgcccagatcctggcctgttacagaaagaactgtgctagcccctcctctgcaggacagttgatccttcctgagtgcatgaagctactcccagtttacctgaactgtgtgttgaagagtgatgtcctgcagcctggagctgaagtcactactgatgaccgtgcctatgtccgacagctagttacctccatggatgtgactgagaccaatgtcttcttctaccctcggctcttacctttgacaaagtctcccgttgagagtactaccgaaccaccagcagttcgagcctctgaagagcgtctaagcaatggggatatatatttactggagaatgggctcaacctcttcctctgggtgggagcaagcgtccaacagggtgttgtccagagccttttcagcgtctcctccttcagtcagatcaccagtggtttgagtgttctgccagttctggataatccactgtccaagaaggttcgaggcctcattgatagcttacgggcacagagatcccggtacatgaagcttaccgtggtgaaacaggaagacaagatggagatgctgttcaagcacttcctggtggaagacaagagtctgagtgggggagcatcttatgtggactttctctgtcatatgcacaaggagattcggcagctactgagctaaagcaagtgggtaaatggcatagggcccaggctagcttccagaaagcaccccaggatgtcagagaaattgggacagtaacatatcttatgtaagctgacctcagtctctctggggggagggggagatataaggagacaccttctttctgggctcaagtatcctgccactctgtcatgtcctgctgatggaaggtgcccctgttccctcattctaccctctttttcctgctaatcctgtcataatgaatgtagcttctcagttcactgtatatgattcggtattgggggtttggaggcacccagaccctggcaatattatgtgtccctttggaccagtctcccaagaggagaggggcaggcaggaaagagtggggatcctaaggttactacagggggctcagtgtcatccacaacttcctatattagggataaaacatataggtgcacaagagctggggtatagcccataggtggtggagagaaaagtggtcagtccttcttgggcctggaggttagcagtcaagtttctctgctttcactgctcgctcgctctctcctgcaatgattgatgatcactccgtggatagagaggcacactgtcagaggtgaccggagaactgagttgcaaaatatattaagatctggtagaggtaccagcttcctttccagctggagaggccccaacactggatggttctgtagggagcctagggagcctggtcatcaacttgcaatacctcacagagccagttcacatcccactctgagctcccacgagaaacactgcttctccaggcccggggttgttggggagagaggcagaggcagctggagcgccgttctctcctgctgggacaccgcttgggctttggtattgactgagtggctgacagttatcttccaaccccaactggcttgggggcaggacaagggctaggcttgatggtggccaggcttgcctgctccccacctgggatgcccctgctctggacctctcatttctcttcattggtttatttttcaatgcatctttaatttgtaaagaaataaaataaattaagatgtaaccattagcctcatctttactcccgaaagctcactttgcttttagtcctggccgtcggctgagcgagctgcgcatgcgccacgtgcccccgtggcgtagggcctcgtccggtcacgactatccgctgggcggggtcggtgctggccgagggggcgccggctgccggagtggacatggcggccggccccattagggtggtgttggtccttctaggggtgctcagtgtctgtgcagccagcggccatgggtccgtagcggagagggaggccggcggggaggcggagtgggcggaaccgtgggatggcgcggttttccggccgccctcggcgctgggcgcagtgggggtgacgcgcagctctgggacgccgcggccagggagggaggaggcgggggacttgccggtactgctgtggtggagcccagggctattcccccacttcccgggagactcggagcgcatcgagtgtgcgcgcggcgcgtgcgtggcgtcccggaaccgccgagcgctgagggactcgcggacgcgcgcgctgctcttctacggcacagacttccgcgcgtcggccgccccgctgccgcgcctggcgcaccagagctgggcgctcctccacgaggagtcgcccctcaacaacttcttgctgagccacggcccgggcatccgcctcttcaatcttacctccaccttcagtcgccactcggattacccgctgtcgctgcagtggctgcccgggaccgcctatctgcgccgcccggtgcctccgcccatggaacgcgcggagtggcgccgccgcggctacgcgccgctgctctatctgcaccncntgcn

SEQ ID NO: 311576 - DNA, 3257 bp, Homo sapiens
  misc_feature (24)..(24): n is a, c, g, or t
tgctgcttctcctcctcgggtttnttggggagagaggcagagccagctggagcgccgttctctcctgctgggacaccgcttgggctttggtattgactgagtggctgatagttatcttccaaccccagaggaggcttcaccgtatgttgtggaccatggggaatctggccctttgcgctgcaaccgctgcaaagcatacatgtgtcccttcatgcagttcattgaaggagggaggcgtttccagtgctgtttttgcagctgtatcaatgatgttcccccccagtattttcagcacctggatcataccggcaaacgtgtggatgcttatgaccgccctgagctatccctgggctcttatgaattcttggccactgtagattactgcaagaacaataagttccccagccctcctgcctttatcttcatgattgacgtctcctacaatgccatcaggactggtcttgttaggctcctctgtgaggagctcaagtcactgttagactttctacctagggagggtggggcagaagagtcagcaatccgcgttggctttgtcacctacaataaggtgctccacttctataatgtgaagagctcattggcccagccacagatgatggttgtgtctgatgtggctgacatgtttgtgccactgctggatggcttcctggtcaacgtcaatgagtctcgggcagttatcaccagcttattggatcagattccagaaatgtttgcagacacaagggaaacagagacagtatttgtaccagttatccaggctggaatggaggctctgaaggctgctgagtgtgcagggaagctctttctattccatacatccctgcccattgcagaggccccagggaaactgaagaacagagatgacaggaagctgatcaatacagacaaggagaagactctgttccagcctcagacaggtgcctatcagaccctggccaaagagtgtgtggcccaaggctgctgtgtagatctctttctcttccctaaccagtatgtggatgtggccacactctctgttgtgccccagctcactggtggctctgtctacaaatatgcttcctttcaggtggagaacgaccaggagcggttcctgagtgacctgcgtcgtgatgtccagaaggttgttggctttgatgctgtgatgcgggtccggacaagcactggtatccgtgctgtagatttctttggagctttctacatgagcaacacgacagatgtggagctggctgggctagatggggacaaaacagtgactgtggagttcaagcatgacgatcggctcaatgaagagagcggagctctcctgcagtgtgccctgctttacaccagctgtgcagggcagcgtcggctccgcatccataatctggccctgaactgctgcacccagctggctgatctatatcgaaactgtgagactgacacgctcatcaactacatggccaagtttgcatatcggggagtcctgaatagccctgtgaaggctgttcgtgacacgctcatcacccagtgtgcccagatcctggcctgttacagaaagaactgtgctagcccctcctctgcaggacagttgatccttcctgagtgcatgaagctactcccagtttacctgaactgtgtgttgaagagtgatgtcctgcagcctggagctgaagtcactactgatgaccgtgcctatgtccgacagctagttacctccatggatgtgactgagaccaatgtcttcttctaccctcggctcttacctttgacaaagtctcccgttgagagtactaccgaaccaccagcagttcgagcctctgaagagcgtctaagcaatggggatatatatttactggagaatgggctcaacctcttcctctgggtgggagcaagcgtccaacagggtgttgtccagagccttttcagcgtctcctccttcagtcagatcaccagtggtttgagtgttctgccagttctggataatccactgtccaagaaggttcgaggcctcattgatagcttacgggcacagagatcccggtacatgaagcttaccgtggtgaaacaggaagacaagatggagatgctgttcaagcacttcctggtggaagacaagagtctgagtgggggagcatcttatgtggactttctctgtcatatgcacaaggagattcggcagctactgagctaaagcaagtgggtaaatggcatagggcccaggctagcttccagaaagcaccccaggatgtcagagaaattgggacagtaacatatcttatgtaagctgacctcagtctctctggggggagggggagatataaggagacaccttctttctgggctcaagtatcctgccactctgtcatgtcctgctgatggaaggtgcccctgttccctcattctaccctctttttcctgctaatcctgtcataatgaatgtagcttctcagttcactgtatatgattcggtattgggggtttggaggcacccagaccctggcaatattatgtgtccctttggaccagtctcccaagaggagaggggcaggcaggaaagagtggggatcctaaggttactacagggggctcagtgtcatccacaacttcctatattagggataaaacatataggtgcacaagagctggggtatagcccataggtggtggagagaaaagtggtcagtccttcttgggcctggaggttagcagtcaagtttctctgctttcactgctcgctcgctctctcctgcaatgattgatgatcactccgtggatagagaggcacactgtcagaggtgaccggagaactgagttgcaaaatatattaagatctggtagaggtaccagcttcctttccagctggagaggccccaacactggatggttctgtagggagcctagggagcctggtcatcaacttgcaatacctcacagagccagttcacatcccactctgagctcccacgagaaacactgcttctccaggcccggggttgttggggagagaggcagaggcagctggagcgccgttctctcctgctgggacaccgcttgggctttggtattgactgagtggctgacagttatcttccaaccccaactggcttgggggcaggacaagggctaggcttgatggtggccaggcttgcctgctccccacctgggatgcccctgctctggacctctcatttctcttcattggtttatttttcaatgcatctttaatttgtaaagaaataaaataaattaagatgtaa

SEQ ID NO: 311577 - DNA, 4708 bp, Homo sapiens
gaaccggaagtggagcctgggagccttgacgttaggaacgaagtctaacctggatctggagccgggtgagatcaaattgggaatgctttcataatgaacgtcaaccagtcagttccacctgtgccaccatttgggcagccccagcccatctacccagggtatcatcagtccagctatggtgggcaatcagggtccacagcccccgccattccctatggagcctacaatggcccagtaccaggctatcagcaaacacctccccaaggtatgtcaagagccccaccttcctcgggggcacctccagcctcaacagcacaggctccttgtggccaggctgcatatggccagtttggccaaggagatgtacagaatgggccaagctccactgttcagatgcaaaggctgcctgggtctcagccatttgggtccccattggcccctgtgggcaaccagccacctgtgcttcagccctatggccctcccccgacaagtgcacaggtggctacgcagctgtctggaatgcagatcagcggtgctgtggccccagcccctccttcttcagggctgggctttggcccaccaacatcgctggcttcagcctcaggaagtttccctaactctggtctgtatggctcctatcctcagggccaggctcctccccttagccaggcccaaggtcatcctgggatccagactccccagcgatctgccccatcacaggcctccagcttcacacccccagcttcagggggtcctcggctgccttcgatgactggtccactcctgcctggacagagttttggagggccctcagtgagccagcccaaccatgtgtcttcacctcctcaagctctgccccctggcacccagatgactgggcccctgggaccactgccacctatgcactccccgcagcagccaggctatcagccccaacaaaatggttccttcggaccagcccggggccctcagtctaattatggaggcccctacccagcagcacccacctttggcagtcagcctgggcctcctcagccactgcctcctaagcgcctggaccctgatgccatcccaagccctattcaggtcattgaagatgacaggaacaaccggggtacagagccatttgttactggagtacggggccaggtgccacccttagtcactaccaacttcctggtgaaagaccaagggaatgcaagtccccgatacatccgatgtacatcctataatatcccttgcacatctgacatggctaagcaggctcaggtgcccctggcagcagtcatcaaaccgctggcaaggctgcccccagaggaggcttcaccgtatgttgtggaccatggggaatctggccctttgcgctgcaaccgctgcaaagcatacatgtgtcccttcatgcagttcattgaaggagggaggcgtttccagtgctgtttttgcagctgtatcaatgatgttcccccccagtattttcagcacctggatcataccggcaaacgtgtggatgcttatgaccgccctgagctatccctgggctcttatgaattcttggccactgtagattactgcaagaacaataagttccccagccctcctgcctttatcttcatgattgacgtctcctacaatgccatcaggactggtcttgttaggctcctctgtgaggagctcaagtcactgttagactttctacctagggagggtggggcagaagagtcagcaatccgcgttggctttgtcacctacaataaggtgctccacttctataatgtgaagagctcattggcccagccacagatgatggttgtgtctgatgtggctgacatgtttgtgccactgctggatggcttcctggtcaacgtcaatgagtctcgggcagttatcaccagcttattggatcagattccagaaatgtttgcagacacaagggaaacagagacagtatttgtaccagttatccaggctggaatggaggctctgaaggctgctgagtgtgcagggaagctctttctattccatacatccctgcccattgcagaggccccagggaaactgaagaacagagatgacaggaagctgatcaatacagacaaggagaagactctgttccagcctcagacaggtgcctatcagaccctggccaaagagtgtgtggcccaaggctgctgtgtagatctctttctcttccctaaccagtatgtggatgtggccacactctctgttgtgccccagctcactggtggctctgtctacaaatatgcttcctttcaggtggagaacgaccaggagcggttcctgagtgacctgcgtcgtgatgtccagaaggttgttggctttgatgctgtgatgcgggtccggacaagcactggtatccgtgctgtagatttctttggagctttctacatgagcaacacgacagatgtggagctggctgggctagatggggacaaaacagtgactgtggagttcaagcatgacgatcggctcaatgaagagagcggagctctcctgcagtgtgccctgctttacaccagctgtgcagggcagcgtcggctccgcatccataatctggccctgaactgctgcacccagctggctgatctatatcgaaactgtgagactgacacgctcatcaactacatggccaagtttgcatatcggggagtcctgaatagccctgtgaaggctgttcgtgacacgctcatcacccagtgtgcccagatcctggcctgttacagaaagaactgtgctagcccctcctctgcaggacagttgatccttcctgagtgcatgaagctactcccagtttacctgaactgtgtgttgaagagtgatgtcctgcagcctggagctgaagtcactactgatgaccgtgcctatgtccgacagctagttacctccatggatgtgactgagaccaatgtcttcttctaccctcggctcttacctttggtgcgattgagggttggagtatgagatcttgcacggagcaaagggcctcttaggaggaggaaaggataggctagtatcagtcagacactagtggaatttgtttttatgtattttagctgatgtaattttcacactgagagagttactgagaccccagaaggggtggtgtctgaggacttagctttcaaaattttgtgtgtggtgcgggggggcagacttgtcttatggtccttggtaaccttttgctcccttccttttgtctagacaaagtctcccgttgagagtactaccgaaccaccagcagttcgagcctctgaagagcgtctaagcaatggggatatatatttactggagaatgggctcaacctcttcctctgggtgggagcaagcgtccaacagggtgttgtccagagccttttcagcgtctcctccttcagtcagatcaccagtggtttgagtgttctgccagttctggataatccactgtccaagaaggttcgaggcctcattgatagcttacgggcacagagatcccggtacatgaagcttaccgtggtgaaacaggaagacaagatggagatgctgttcaagcacttcctggtggaagacaagagtctgagtgggggagcatcttatgtggactttctctgtcatatgcacaaggagattcggcagctactgagctaaagcaagtgggtaaatggcatagggcccaggctagcttccagaaagcaccccaggatgtcagagaaattgggacagtaacatatcttatgtaagctgacctcagtctctctggggggagggggagatataaggagacaccttctttctgggctcaagtatcctgccactctgtcatgtcctgctgatggaaggtgcccctgttccctcattctaccctctttttcctgctaatcctgtcataatgaatgtagcttctcagttcactgtatatgattcggtattgggggtttggaggcacccagaccctggcaatattatgtgtccctttggaccagtctcccaagaggagaggggcaggcaggaaagagtggggatcctaaggttactacagggggctcagtgtcatccacaacttcctatattagggataaaacatataggtgcacaagagctggggtatagcccataggtggtggagagaaaagtggtcagtccttcttgggcctggaggttagcagtcaagtttctctgctttcactgctcgctcgctctctcctgcaatgattgatgatcactccgtggatagagaggcacactgtcagaggtgaccggagaactgagttgcaaaatatattaagatctggtagaggtaccagcttcctttccagctggagaggccccaacactggatggttctgtagggagcctagggagcctggtcatcaacttgcaatacctcacagagccagttcacatcccactctgagctcccacgagaaacactgcttctccaggcccggggttgttggggagagaggcagaggcagctggagcgccgttctctcctgctgggacaccgcttgggctttggtattgactgagtggctgacagttatcttccaaccccaactggcttgggggcaggacaagggctaggcttgatggtggccaggcttgcctgctccccacctgggatgcccctgctctggacctctcatttctcttcattggtttatttttcaatgcatctttaatttgtaaagaaataaaataaattaagatgtaa

SEQ ID NO: 311578 - DNA, 4371 bp, Homo sapiens
gaaccggaagtggagcctgggagccttgacgttaggaacgaagtctaacctggatctggagccgggtgagatcaaattgggaatgctttcataatgaacgtcaaccagtcagttccacctgtgccaccatttgggcagccccagcccatctacccagggtatcatcagtccagctatggtgggcaatcagggtccacagcccccgccattccctatggagcctacaatggcccagtaccaggctatcagcaaacacctccccaaggtatgtcaagagccccaccttcctcgggggcacctccagcctcaacagcacaggctccttgtggccaggctgcatatggccagtttggccaaggagatgtacagaatgggccaagctccactgttcagatgcaaaggctgcctgggtctcagccatttgggtccccattggcccctgtgggcaaccagccacctgtgcttcagccctatggccctcccccgacaagtgcacaggtggctacgcagctgtctggaatgcagatcagcggtgctgtggccccagcccctccttcttcagggctgggctttggcccaccaacatcgctggcttcagcctcaggaagtttccctaactctggtctgtatggctcctatcctcagggccaggctcctccccttagccaggcccaaggtcatcctgggatccagactccccagcgatctgccccatcacaggcctccagcttcacacccccagcttcagggggtcctcggctgccttcgatgactggtccactcctgcctggacagagttttggagggccctcagtgagccagcccaaccatgtgtcttcacctcctcaagctctgccccctggcacccagatgactgggcccctgggaccactgccacctatgcactccccgcagcagccaggctatcagccccaacaaaatggttccttcggaccagcccggggccctcagtctaattatggaggcccctacccagcagcacccacctttggcagtcagcctgggcctcctcagccactgcctcctaagcgcctggaccctgatgccatcccaagccctattcaggtcattgaagatgacaggaacaaccggggtacagagccatttgttactggagtacggggccaggtgccacccttagtcactaccaacttcctggtgaaagaccaagggaatgcaagtccccgatacatccgatgtacatcctataatatcccttgcacatctgacatggctaagcaggctcaggtgcccctggcagcagtcatcaaaccgctggcaaggctgcccccagaggaggcttcaccgtatgttgtggaccatggggaatctggccctttgcgctgcaaccgctgcaaagcatacatgtgtcccttcatgcagttcattgaaggagggaggcgtttccagtgctgtttttgcagctgtatcaatgatgttcccccccagtattttcagcacctggatcataccggcaaacgtgtggatgcttatgaccgccctgagctatccctgggctcttatgaattcttggccactgtagattactgcaagaacaataagttccccagccctcctgcctttatcttcatgattgacgtctcctacaatgccatcaggactggtcttgttaggctcctctgtgaggagctcaagtcactgttagactttctacctagggagggtggggcagaagagtcagcaatccgcgttggctttgtcacctacaataaggtgctccacttctataatgtgaagagctcattggcccagccacagatgatggttgtgtctgatgtggctgacatgtttgtgccactgctggatggcttcctggtcaacgtcaatgagtctcgggcagttatcaccagcttattggatcagattccagaaatgtttgcagacacaagggaaacagagacagtatttgtaccagttatccaggctggaatggaggctctgaaggctgctgagtgtgcagggaagctctttctattccatacatccctgcccattgcagaggccccagggaaactgaagaacagagatgacaggaagctgatcaatacagacaaggagaagactctgttccagcctcagacaggtgcctatcagaccctggccaaagagtgtgtggcccaaggctgctgtgtagatctctttctcttccctaaccagtatgtggatgtggccacactctctgttgtgccccagctcactggtggctctgtctacaaatatgcttcctttcaggtggagaacgaccaggagcggttcctgagtgacctgcgtcgtgatgtccagaaggttgttggctttgatgctgtgatgcgggtccggacaagcactggtatccgtgctgtagatttctttggagctttctacatgagcaacacgacagatgtggagctggctgggctagatggggacaaaacagtgactgtggagttcaagcatgacgatcggctcaatgaagagagcggagctctcctgcagtgtgccctgctttacaccagctgtgcagggcagcgtcggctccgcatccataatctggccctgaactgctgcacccagctggctgatctatatcgaaactgtgagactgacacgctcatcaactacatggccaagtttgcatatcggggagtcctgaatagccctgtgaaggctgttcgtgacacgctcatcacccagtgtgcccagatcctggcctgttacagaaagaactgtgctagcccctcctctgcaggacagttgatccttcctgagtgcatgaagctactcccagtttacctgaactgtgtgttgaagagtgatgtcctgcagcctggagctgaagtcactactgatgaccgtgcctatgtccgacagctagttacctccatggatgtgactgagaccaatgtcttcttctaccctcggctcttacctttgacaaagtctcccgttgagagtactaccgaaccaccagcagttcgagcctctgaagagcgtctaagcaatggggatatatatttactggagaatgggctcaacctcttcctctgggtgggagtgttctgccagttctggataatccactgtccaagaaggttcgaggcctcattgatagcttacgggcacagagatcccggtacatgaagcttaccgtggtgaaacaggaagacaagatggagatgctgttcaagcacttcctggtggaagacaagagtctgagtgggggagcatcttatgtggactttctctgtcatatgcacaaggagattcggcagctactgagctaaagcaagtgggtaaatggcatagggcccaggctagcttccagaaagcaccccaggatgtcagagaaattgggacagtaacatatcttatgtaagctgacctcagtctctctggggggagggggagatataaggagacaccttctttctgggctcaagtatcctgccactctgtcatgtcctgctgatggaaggtgcccctgttccctcattctaccctctttttcctgctaatcctgtcataatgaatgtagcttctcagttcactgtatatgattcggtattgggggtttggaggcacccagaccctggcaatattatgtgtccctttggaccagtctcccaagaggagaggggcaggcaggaaagagtggggatcctaaggttactacagggggctcagtgtcatccacaacttcctatattagggataaaacatataggtgcacaagagctggggtatagcccataggtggtggagagaaaagtggtcagtccttcttgggcctggaggttagcagtcaagtttctctgctttcactgctcgctcgctctctcctgcaatgattgatgatcactccgtggatagagaggcacactgtcagaggtgaccggagaactgagttgcaaaatatattaagatctggtagaggtaccagcttcctttccagctggagaggccccaacactggatggttctgtagggagcctagggagcctggtcatcaacttgcaatacctcacagagccagttcacatcccactctgagctcccacgagaaacactgcttctccaggcccggggttgttggggagagaggcagaggcagctggagcgccgttctctcctgctgggacaccgcttgggctttggtattgactgagtggctgacagttatcttccaaccccaactggcttgggggcaggacaagggctaggcttgatggtggccaggcttgcctgctccccacctgggatgcccctgctctggacctctcatttctcttcattggtttatttttcaatgcatctttaatttgtaaagaaataaaataaattaagatgtaa

SEQ ID NO: 311579 - DNA, 4302 bp, Homo sapiens
gaaccggaagtggagcctgggagccttgacgttaggaacgaagtctaacctggatctggagccgggtgagatcaaattgggaatgctttcataatgaacgtcaaccagtcagttccacctgtgccaccatttgggcagccccagcccatctacccagggtatcatcagtccagctatggtgggcaatcagggtccacagcccccgccattccctatggagcctacaatggcccagtaccaggctatcagcaaacacctccccaaggtatgtcaagagccccaccttcctcgggggcacctccagcctcaacagcacaggctccttgtggccaggctgcatatggccagtttggccaaggagatgtacagaatgggccaagctccactgttcagatgcaaaggctgcctgggtctcagccatttgggtccccattggcccctgtgggcaaccagccacctgtgcttcagccctatggccctcccccgacaagtgcacaggtggctacgcagctgtctggaatgcagatcagcggtgctgtggccccagcccctccttcttcagggctgggctttggcccaccaacatcgctggcttcagcctcaggaagtttccctaactctggtctgtatggctcctatcctcagggccaggctcctccccttagccaggcccaaggtcatcctgggatccagactccccagcgatctgccccatcacaggcctccagcttcacacccccagcttcagggggtcctcggctgccttcgatgactggtccactcctgcctggacagagttttggagggccctcagtgagccagcccaaccatgtgtcttcacctcctcaagctctgccccctggcacccagatgactgggcccctgggaccactgccacctatgcactccccgcagcagccaggctatcagccccaacaaaatggttccttcggaccagcccggggccctcagtctaattatggaggcccctacccagcagcacccacctttggcagtcagcctgggcctcctcagccactgcctcctaagcgcctggaccctgatgccatcccaagccctattcaggtcattgaagatgacaggaacaaccggggtacagagccatttgttactggagtacggggccaggtgccacccttagtcactaccaacttcctggtgaaagaccaagggaatgcaagtccccgatacatccgatgtacatcctataatatcccttgcacatctgacatggctaagcaggctcaggtgcccctggcagcagtcatcaaaccgctggcaaggctgcccccagaggaggcttcaccgtatgttgtggaccatggggaatctggccctttgcgctgcaaccgctgcaaagcatacatgtgtcccttcatgcagttcattgaaggagggaggcgtttccagtgctgtttttgcagctgtatcaatgatgttcccccccagtattttcagcacctggatcataccggcaaacgtgtggatgcttatgaccgccctgagctatccctgggctcttatgaattcttggccactgtagattactgcaagaacaataagttccccagccctcctgcctttatcttcatgattgacgtctcctacaatgccatcaggactggtcttgttaggctcctctgtgaggagctcaagtcactgttagactttctacctagggagggtggggcagaagagtcagcaatccgcgttggctttgtcacctacaataaggtgctccacttctataatgtgaagagctcattggcccagccacagatgatggttgtgtctgatgtggctgacatgtttgtgccactgctggatggcttcctggtcaacgtcaatgagtctcgggcagttatcaccagcttattggatcagattccagaaatgtttgcagacacaagggaaacagagacagtatttgtaccagttatccaggctggaatggaggctctgaaggctgctgagtgtgcagggaagctctttctattccatacatccctgcccattgcagaggccccagggaaactgaagaacagagatgacaggaagctgatcaatacagacaaggagaagactctgttccagcctcagacaggtgcctatcagaccctggccaaagagtgtgtggcccaaggctgctgtgtagatctctttctcttccctaaccagtatgtggatgtggccacactctctgttgtgccccagctcactggtggctctgtctacaaatatgcttcctttcaggtggagaacgaccaggagcggttcctgagtgacctgcgtcgtgatgtccagaaggttgttggctttgatgctgtgatgcgggtccggacaagcactggtatccgtgctgtagatttctttggagctttctacatgagcaacacgacagatgtggagctggctgggctagatggggacaaaacagtgactgtggagttcaagcatgacgatcggctcaatgaagagagcggagctctcctgcagtgtgccctgctttacaccagctgtgcagggcagcgtcggctccgcatccataatctggccctgaactgctgcacccagctggctgatctatatcgaaactgtgagactgacacgctcatcaactacatggccaagtttgcatatcggggagtcctgaatagccctgtgaaggctgttcgtgacacgctcatcacccagtgtgcccagatcctggcctgttacagaaagaactgtgctagcccctcctctgcaggacagttgatccttcctgagtgcatgaagctactcccagtttacctgaactgtgtgttgaagagtgatgtcctgcagcctggagctgaagtcactactgatgaccgtgcctatgtccgacagctagttacctccatggatgtgactgagaccaatgtcttcttctaccctcggctcttacctttgacaaagtctcccgttgagagtactaccgaaccaccagcagttcgagcctctgaagagcgtctaagcaatggggatatatatttactggagaatgggctcaacctcttcctctgggtgggagcaagcgtccaacagggtgttgtccagagccttttcagcgtctcctccttcagtcagatcaccagtggtttgagtgttctgccagttctggataatccactgtccaagaaggttcgaggcctcattgatagcttacgggcacagagatcccggtacatgaagcttaccgtggtgaaacaggaagacaagatggagatgctgttcaagcacttcctggtggaagacaagagtctgagtgggggagcatcttatgtggactttctctgtcatatgcacaaggagattcggcagctactgagctaaagcaagtgggtaaatggcatagggcccaggctagcttccagaaagcaccccaggatgtcagagaaattgggacagtaacatatcttatgtaagctgacctcagtctctctggggggagggggagatataaggagacaccttctttctgggctcaagtatcctgccactctgtcatgtcctgctgatggaaggtgcccctgttccctcattctaccctctttttcctgctaatcctgtcataatgaatgtagcttctcagttcactgtatatgattcggtattgggggtttggaggcacccagaccctggcaatattatgtgtccctttggaccagtctcccaagaggagaggggcaggcaggaaagaggttagcagtcaagtttctctgctttcactgctcgctcgctctctcctgcaatgattgatgatcactccgtggatagagaggcacactgtcagaggtgaccggagaactgagttgcaaaatatattaagatctggtagaggtaccagcttcctttccagctggagaggccccaacactggatggttctgtagggagcctagggagcctggtcatcaacttgcaatacctcacagagccagttcacatcccactctgagctcccacgagaaacactgcttctccaggcccggggttgttggggagagaggcagaggcagctggagcgccgttctctcctgctgggacaccgcttgggctttggtattgactgagtggctgacagttatcttccaaccccaactggcttgggggcaggacaagggctaggcttgatggtggccaggcttgcctgctccccacctgggatgcccctgctctggacctctcatttctcttcattggtttatttttcaatgcatctttaatttgtaaagaaataaaataaattaagatgtaa

SEQ ID NO: 311580 - DNA, 4360 bp, Homo sapiens
gaaccggaagtggagcctgggagccttgacgttaggaacgaagtctaacctggatctggagccgggtgagatcaaattgggaatgctttcataatgaacgtcaaccagtcagttccacctgtgccaccatttgggcagccccagcccatctacccagggtatcatcagtccagctatggtgggcaatcagggtccacagcccccgccattccctatggagcctacaatggcccagtaccaggctatcagcaaacacctccccaaggtatgtcaagagccccaccttcctcgggggcacctccagcctcaacagcacaggctccttgtggccaggctgcatatggccagtttggccaaggagatgtacagaatgggccaagctccactgttcagatgcaaaggctgcctgggtctcagccatttgggtccccattggcccctgtgggcaaccagccacctgtgcttcagccctatggccctcccccgacaagtgcacaggtggctacgcagctgtctggaatgcagatcagcggtgctgtggccccagcccctccttcttcagggctgggctttggcccaccaacatcgctggcttcagcctcaggaagtttccctaactctggtctgtatggctcctatcctcagggccaggctcctccccttagccaggcccaaggtcatcctgggatccagactccccagcgatctgccccatcacaggcctccagcttcacacccccagcttcagggggtcctcggctgccttcgatgactggtccactcctgcctggacagagttttggagggccctcagtgagccagcccaaccatgtgtcttcacctcctcaagctctgccccctggcacccagatgactgggcccctgggaccactgccacctatgcactccccgcagcagccaggctatcagccccaacaaaatggttccttcggaccagcccggggccctcagtctaattatggaggcccctacccagcagcacccacctttggcagtcagcctgggcctcctcagccactgcctcctaagcgcctggaccctgatgccatcccaagccctattcaggtcattgaagatgacaggaacaaccggggtacagagccatttgttactggagtacggggccaggtgccacccttagtcactaccaacttcctggtgaaagaccaagggaatgcaagtccccgatacatccgatgtacatcctataatatcccttgcacatctgacatggctaagcaggctcaggtgcccctggcagcagtcatcaaaccgctggcaaggctgcccccagaggaggcttcaccgtatgttgtggaccatggggaatctggccctttgcgctgcaaccgctgcaaagcatacatgtgtcccttcatgcagttcattgaaggagggaggcgtttccagtgctgtttttgcagctgtatcaatgatgttcccccccagtattttcagcacctggatcataccggcaaacgtgtggatgcttatgaccgccctgagctatccctgggctcttatgaattcttggccactgtagattactgcaagaacaataagttccccagccctcctgcctttatcttcatgattgacgtctcctacaatgccatcaggactggtcttgttaggctcctctgtgaggagctcaagtcactgttagactttctacctagggagggtggggcagaagagtcagcaatccgcgttggctttgtcacctacaataaggtgctccacttctataatgtgaagagctcattggcccagccacagatgatggttgtgtctgatgtggctgacatgtttgtgccactgctggatggcttcctggtcaacgtcaatgagtctcgggcagttatcaccagcttattggatcagattccagaaatgtttgcagacacaagggaaacagagacagtatttgtaccagttatccaggctggaatggaggctctgaaggctgctgagtgtgcagggaagctctttctattccatacatccctgcccattgcagaggccccagggaaactgaagaacagagatgacaggaagctgatcaatacagacaaggagaagactctgttccagcctcagacaggtgcctatcagaccctggccaaagagtgtgtggcccaaggctgctgtgtagatctctttctcttccctaaccagtatgtggatgtggccacactctctgttgtgccccagctcactggtggctctgtctacaaatatgcttcctttcaggtggagaacgaccaggagcggttcctgagtgacctgcgtcgtgatgtccagaaggttgttggctttgatgctgtgatgcgggtccggacaagcactggtatccgtgctgtagatttctttggagctttctacatgagcaacacgacagatgtggagctggctgggctagatggggacaaaacagtgactgtggagttcaagcatgacgatcggctcaatgaagagagcggagctctcctgcagtgtgccctgctttacaccagctgtgcagggcagcgtcggctccgcatccataatctggccctgaactgctgcacccagctggctgatctatatcgaaactgtgagactgacacgctcatcaactacatggccaagtttgcatatcggggagtcctgaatagccctgtgaaggctgttcgtgacacgctcatcacccagtgtgcccagatcctggcctgttacagaaagaactgtgctagcccctcctctgcaggacagttgatccttcctgagtgcatgaagctactcccagtttacctgaactgtgtgttgaagagtgatgtcctgcagcctggagctgaagtcactactgatgaccgtgcctatgtccgacagctagttacctccatggatgtgactgagaccaatgtcttcttctaccctcggctcttacctttgacaaagtctcccgttgagagtactaccgaaccaccagcagttcgagcctctgaagagcgtctaagcaatggggatatatatttactggagaatgggctcaacctcttcctctgggtgggagcaagcgtccaacagggtgttgtccagagccttttcagcgtctcctccttcagtcagatcaccagtggtttgagtgttctgccagttctggataatccactgtccaagaaggttcgaggcctcattgatagcttacgggcacagagatcccggtacatgaagcttaccgtggtgaaacaggaagacaagatggagatgctgttcaagcacttcctggtggaagacaagagtctgagtgggggagcatcttatgtggactttctctgtcatatgcacaaggagattcggcagctactgagctaaagcaagtgggtaaatggcatagggcccaggctagcttccagaaagcaccccaggatgtcagagaaattgggacagtaacatatcttatgtaagctgacctcagtctctctggggggagggggagatataaggagacaccttctttctgggctcaagtatcctgccactctgtcatgtcctgctgatggaaggtgcccctgttccctcattctaccctctttttcctgctaatcctgtcataatgaatgtagcttctcagttcactgtatatgattcggtattgggggtttggaggcacccagaccctggcaatattatgtgtccctttggaccagtctcccaagaggagaggggcaggcaggaaagagtggggatcctaaggttactacagggggctcagtgtcatccacaacttcctatattagggataaaacatataggtgcacaagagctggggtatagcccataggtggtggagagaaaagtggtcagtccttcttgggcctggaggttagcagtcaagtttctctgctttcactgctcgctcgctctctcctgcaatgattgatgatcactccgtggatagagaggcacactgtcagaggtgaccggagaactgagttgcaaaatatattaagatctggtagaggtaccagcttcctttccagctggagaggccccaacactggatggttctgtagggagcctagggagcctggtcatcaacttgcaatacctcacagagccagttcacatcccactctgagctcccacgagaaacactgcttctccaggcccggggttgttggggagagaggcagaggcagctggagcgccgttctctcctgctgggacaccgcttgggctttggtattgactgagtggctgggatgcccctgctctggacctctcatttctcttcattggtttatttttcaatgcatctttaatttgtaaagaaataaaataaattaagatgtaa

SEQ ID NO: 311581 - DNA, 1832 bp, Homo sapiens
tcagtcggtaccagcagtacgctcatcaactacatggcaagttgcatatcggggagtcctgaatagccctgtgaaggctgttcgtgacacgctcatcacccagtgtgcccagatcctggcctgttacagaaagaactgtgctagcccctcctctgcaggacagttgatccttcctgagtgcatgaagctactcccagtttacctgaactgtgtgttgaagagtgatgtcctgcagcctggagctgaagtcactactgatgaccgtgcctatgtccgacagctagttacctccatggatgtgactgagaccaatgtcttcttctaccctcggctcttacctttgacaaagtctcccgttgagagtactaccgaaccaccagcagttcgagcctctgaagagcgtctaagcaatggggatatatatttactggagaatgggctcaacctcttcctctgggtgggagcaagcgtccaacagggtgttgtccagagccttttcagcgtctcctccttcagtcagatcaccagtggtttgagtgttctgccagttctggataatccactgtccaagaaggttcgaggcctcattgatagcttacgggcacagagatcccggtacatgaagcttaccgtggtgaaacaggaagacaagatggagatgctgttcaagcacttcctggtggaagacaagagtctgagtgggggagcatcttatgtggactttctctgtcatatgcacaaggagattcggcagctactgagctaaagcaagtgggtaaatggcatagggcccaggctagcttccagaaagcaccccaggatgtcagagaaattgggacagtaacatatcttatgtaagctgacctcagtctctctggggggagggggagatataaggagacaccttctttctgggctcaagtatcctgccactctgtcatgtcctgctgatggaaggtgcccctgttccctcattctaccctctttttcctgctaatcctgtcataatgaatgtagcttctcagttcactgtatatgattcggtattgggggtttggaggcacccagaccctggcaatattatgtgtccctttggaccagtctcccaagaggagaggggcaggcaggaaagagtggggatcctaaggttactacagggggctcagtgtcatccacaacttcctatattagggataaaacatataggtgcacaagagctggggtatagcccataggtggtggagagaaaagtggtcagtccttcttgggcctggaggttagcagtcaagtttctctgctttcactgctcgctcgctctctcctgcaatgattgatgatcactccgtggatagagaggcacactgtcagaggtgaccggagaactgagttgcaaaatatattaagatctggtagaggtaccagcttcctttccagctggagaggccccaacactggatggttctgtagggagcctagggagcctggtcatcaacttgcaatacctcacagagccagttcacatcccactctgagctcccacgagaaacactgcttctccaggcccggggttgttggggagagaggcagaggcagctggagcgccgttctctcctgctgggacaccgcttgggctttggtattgactgagtggctgacagttatcttccaaccccaactggcttgggggcaggacaagggctaggcttgatggtggccaggcttgcctgctccccacctgggatgcccctgctctggacctctcatttctcttcattggtttatttttcaatgcatctttaatttgtaaagaaataaaataaattaagatgtaa

SEQ ID NO: 311582 - DNA, 4142 bp, Homo sapiens
gaaccggaagtggagcctgggagccttgacgttaggaacgaagtctaacctggatctggagccgggtgagatcaaattgggaatgctttcataatgaacgtcaaccagtcagttccacctgtgccaccatttgggcagccccagcccatctacccagggtatcatcagtccagctatggtgggcaatcagggtccacagcccccgccattccctatggagcctacaatggcccagtaccaggctatcagcaaacacctccccaaggtatgtcaagagccccaccttcctcgggggcacctccagcctcaacagcacaggctccttgtggccaggctgcatatggccagtttggccaaggagatgtacagaatgggccaagctccactgttcagatgcaaaggctgcctgggtctcagccatttgggtccccattggcccctgtgggcaaccagccacctgtgcttcagccctatggccctcccccgacaagtgcacaggtggctacgcagctgtctggaatgcagatcagcggtgctgtggccccagcccctccttcttcagggctgggctttggcccaccaacatcgctggcttcagcctcaggaagtttccctaactctggtctgtatggctcctatcctcagggccaggctcctccccttagccaggcccaaggtcatcctgggatccagactccccagcgatctgccccatcacaggcctccagcttcacacccccagcttcagggggtcctcggctgccttcgatgactggtccactcctgcctggacagagttttggagggccctcagtgagccagcccaaccatgtgtcttcacctcctcaagctctgccccctggcacccagatgactgggcccctgggaccactgccacctatgcactccccgcagcagccaggctatcagccccaacaaaatggttccttcggaccagcccggggccctcagtctaattatggaggcccctacccagcagcacccacctttggcagtcagcctgggcctcctcagccactgcctcctaagcgcctggaccctgatgccatcccaagccctattcaggtcattgaagatgacaggaacaaccggggtacagagccatttgttactggagtacggggccaggtgccacccttagtcactaccaacttcctggtgaaagaccaagggaatgcaagtccccgatacatccgatgtacatcctataatatcccttgcacatctgacatggctaagcaggctcaggtgcccctggcagcagtcatcaaaccgctggcaaggctgcccccagaggaggcttcaccgtatgttgtggaccatggggaatctggccctttgcgctgcaaccgctgcaaagcatacatgtgtcccttcatgcagttcattgaaggagggaggcgtttccagtgctgtttttgcagctgtatcaatgatgttcccccccagtattttcagcacctggatcataccggcaaacgtgtggatgcttatgaccgccctgagctatccctgggctcttatgaattcttggccactgtagattactgcaagaacaataagttccccagccctcctgcctttatcttcatgattgacgtctcctacaatgccatcaggactggtcttgttaggctcctctgtgaggagctcaagtcactgttagactttctacctagggagggtggggcagaagagtcagcaatccgcgttggctttgtcacctacaataaggtgctccacttctataatgtgaagagctcattggcccagccacagatgatggttgtgtctgatgtggctgacatgtttgtgccactgctggatggcttcctggtcaacgtcaatgagtctcgggcagttatcaccagcttattggatcagattccagaaatgtttgcagacacaagggaaacagagacagtatttgtaccagttatccaggctggaatggaggctctgaaggctgctgagtgtgcagggaagctctttctattccatacatccctgcccattgcagaggccccagggaaactgaagaacagagatgacaggaagctgatcaatacagacaaggagaagactctgttccagcctcagacaggtgcctatcagaccctggccaaagagtgtgtggcccaaggctgctgtgtagatctctttctcttccctaaccagtatgtggatgtggccacactctctgttgtgccccagctcactggtggctctgtctacaaatatgcttcctttcaggtggagaacgaccaggagcggttcctgagtgacctgcgtcgtgatgtccagaaggttgttggctttgatgctgtgatgcgggtccggacaagcactggtatccgtgctgtagatttctttggagctttctacatgagcaacacgacagatgtggagctggctgggctagatggggacaaaacagtgactgtggagttcaagcatgacgatcggctcaatgaagagagcggagctctcctgcagtgtgccctgctttacaccagctgtgcagggcagcgtcggctccgcatccataatctggccctgaactgctgcacccagctggctgatctatatcgaaactgtgagactgacacgctcatcaactacatggccaagtttgcatatcggggagtcctgaatagccctgtgaaggctgttcgtgacacgctcatcacccagtgtgcccagatcctggcctgttacagaaagaactgtgctagcccctcctctgcaggacagttgatccttcctgagtgcatgaagctactcccagtttacctgaactgtgtgttgaagagtgatgtcctgcagcctggagctgaagtcactactgatgaccgtgcctatgtccgacagctagttacctccatggatgtgactgagaccaatgtcttcttctaccctcggctcttacctttgacaaagtctcccgttgagagtactaccgaaccaccagcagttcgagcctctgaagagcgtctaagcaatggggatatatatttactggagaatgggctcaacctcttcctctgggtgggagcaagcgtccaacagggtgttgtccagagccttttcagcgtctcctccttcagtcagatcaccagtggtttgagtgttctgccagttctggataatccactgtccaagaaggttcgaggcctcattgatagcttacgggcacagagatcccggtacatgaagcttaccgtggtgaaacaggaagacaagatggagatgctgttcaagcacttcctggtggaagacaagagtctgagtgggggagcatcttatgtggactttctctgtcatatgcacaaggagattcggcagctactgagctaaagcaagtgggtaaatggcatagggcccaggctagcttccagaaagcaccccaggatgtcagagaaattgggacagtaacatatcttatgtaagctgacctcagtctctctggggggagggggagatataaggagacaccttctttctgggctcaagtatcctgccactctgtcatgtcctgctgatggaaggtgcccctgttccctcattctaccctctttttcctgctaatcctgtcataatgaatgtagcttctcagttcactgtatatgattcggtattgggggtttggaggcacccagaccctggcaatattatgtgtccctttggaccagtctcccaagaggagaggggcaggcaggaaagagtggggatcctaaggttactacagggggctcagtgtcatccacaacttcctatattagggataaaacatataggtgcacaagagctggggtatagcccataggtggtggagagaaaagtggtcaggcccggggttgttggggagagaggcagaggcagctggagcgccgttctctcctgctgggacaccgcttgggctttggtattgactgagtggctgacagttatcttccaaccccaactggcttgggggcaggacaagggctaggcttgatggtggccaggcttgcctgctccccacctgggatgcccctgctctggacctctcatttctcttcattggtttatttttcaatgcatctttaatttgtaaagaaataaaataaattaagatgtaa

SEQ ID NO: 311583 - DNA, 4394 bp, Homo sapiens
  misc_feature (4076)..(4076): n is a, c, g, or t
  misc_feature (4078)..(4078): n is a, c, g, or t
  misc_feature (4084)..(4084): n is a, c, g, or t
  misc_feature (4093)..(4093): n is a, c, g, or t
  misc_feature (4135)..(4135): n is a, c, g, or t
  misc_feature (4162)..(4162): n is a, c, g, or t
  misc_feature (4225)..(4225): n is a, c, g, or t
  misc_feature (4230)..(4230): n is a, c, g, or t
  misc_feature (4239)..(4239): n is a, c, g, or t
  misc_feature (4244)..(4244): n is a, c, g, or t
  misc_feature (4249)..(4249): n is a, c, g, or t
  misc_feature (4261)..(4261): n is a, c, g, or t
  misc_feature (4268)..(4268): n is a, c, g, or t
  misc_feature (4287)..(4287): n is a, c, g, or t
  misc_feature (4298)..(4299): n is a, c, g, or t
  misc_feature (4324)..(4324): n is a, c, g, or t
  misc_feature (4342)..(4342): n is a, c, g, or t
gaaccggaagtggagcctgggagccttgacgttaggaacgaagtctaacctggatctggagccgggtgagatcaaattgggaatgctttcataatgaacgtcaaccagtcagttccacctgtgccaccatttgggcagccccagcccatctacccagggtatcatcagtccagctatggtgggcaatcagggtccacagcccccgccattccctatggagcctacaatggcccagtaccaggctatcagcaaacacctccccaaggtatgtcaagagccccaccttcctcgggggcacctccagcctcaacagcacaggctccttgtggccaggctgcatatggccagtttggccaaggagatgtacagaatgggccaagctccactgttcagatgcaaaggctgcctgggtctcagccatttgggtccccattggcccctgtgggcaaccagccacctgtgcttcagccctatggccctcccccgacaagtgcacaggtggctacgcagctgtctggaatgcagatcagcggtgctgtggccccagcccctccttcttcagggctgggctttggcccaccaacatcgctggcttcagcctcaggaagtttccctaactctggtctgtatggctcctatcctcagggccaggctcctccccttagccaggcccaaggtcatcctgggatccagactccccagcgatctgccccatcacaggcctccagcttcacacccccagcttcagggggtcctcggctgccttcgatgactggtccactcctgcctggacagagttttggagggccctcagtgagccagcccaaccatgtgtcttcacctcctcaagctctgccccctggcacccagatgactgggcccctgggaccactgccacctatgcactccccgcagcagccaggctatcagccccaacaaaatggttccttcggaccagcccggggccctcagtctaattatggaggcccctacccagcagcacccacctttggcagtcagcctgggcctcctcagccactgcctcctaagcgcctggaccctgatgccatcccaagccctattcaggtcattgaagatgacaggaacaaccggggtacagagccatttgttactggagtacggggccaggtgccacccttagtcactaccaacttcctggtgaaagaccaagggaatgcaagtccccgatacatccgatgtacatcctataatatcccttgcacatctgacatggctaagcaggctcaggtgcccctggcagcagtcatcaaaccgctggcaaggctgcccccagaggaggcttcaccgtatgttgtggaccatggggaatctggccctttgcgctgcaaccgctgcaaagcatacatgtgtcccttcatgcagttcattgaaggagggaggcgtttccagtgctgtttttgcagctgtatcaatgatgttcccccccagtattttcagcacctggatcataccggcaaacgtgtggatgcttatgaccgccctgagctatccctgggctcttatgaattcttggccactgtagattactgcaagaacaataagttccccagccctcctgcctttatcttcatgattgacgtctcctacaatgccatcaggactggtcttgttaggctcctctgtgaggagctcaagtcactgttagactttctacctagggagggtggggcagaagagtcagcaatccgcgttggctttgtcacctacaataaggtgctccacttctataatgtgaagagctcattggcccagccacagatgatggttgtgtctgatgtggctgacatgtttgtgccactgctggatggcttcctggtcaacgtcaatgagtctcgggcagttatcaccagcttattggatcagattccagaaatgtttgcagacacaagggaaacagagacagtatttgtaccagttatccaggctggaatggaggctctgaaggctgctgagtgtgcagggaagctctttctattccatacatccctgcccattgcagaggccccagggaaactgaagaacagagatgacaggaagctgatcaatacagacaaggagaagactctgttccagcctcagacaggtgcctatcagaccctggccaaagagtgtgtggcccaaggctgctgtgtagatctctttctcttccctaaccagtatgtggatgtggccacactctctgttgtgccccagctcactggtggctctgtctacaaatatgcttcctttcaggtggagaacgaccaggagcggttcctgagtgacctgcgtcgtgatgtccagaaggttgttggctttgatgctgtgatgcgggtccggacaagcactggtatccgtgctgtagatttctttggagctttctacatgagcaacacgacagatgtggagctggctgggctagatggggacaaaacagtgactgtggagttcaagcatgacgatcggctcaatgaagagagcggagctctcctgcagtgtgccctgctttacaccagctgtgcagggcagcgtcggctccgcatccataatctggccctgaactgctgcacccagctggctgatctatatcgaaactgtgagactgacacgctcatcaactacatggccaagtttgcatatcggggagtcctgaatagccctgtgaaggctgttcgtgacacgctcatcacccagtgtgcccagatcctggcctgttacagaaagaactgtgctagcccctcctctgcaggacagttgatccttcctgagtgcatgaagctactcccagtttacctgaactgtgtgttgaagagtgatgtcctgcagcctggagctgaagtcactactgatgaccgtgcctatgtccgacagctagttacctccatggatgtgactgagaccaatgtcttcttctaccctcggctcttacctttgacaaagtctcccgttgagagtactaccgaaccaccagcagttcgagcctctgaagagcgtctaagcaatggggatatatatttactggagaatgggctcaacctcttcctctgggtgggagcaagcgtccaacagggtgttgtccagagccttttcagcgtctcctccttcagtcagatcaccagtggtttgagtgttctgccagttctggataatccactgtccaagaaggttcgaggcctcattgatagcttacgggcacagagatcccggtacatgaagcttaccgtggtgaaacaggaagacaagatggagatgctgttcaagcacttcctggtggaagacaagagtctgagtgggggagcatcttatgtggactttctctgtcatatgcacaaggagattcggcagctactgagctaaagcaagtgggtaaatggcatagggcccaggctagcttccagaaagcaccccaggatgtcagagaaattgggacagtaacatatcttatgtaagctgacctcagtctctctggggggagggggagatataaggagacaccttctttctgggctcaagtatcctgccactctgtcatgtcctgctgatggaaggtgcccctgttccctcattctaccctctttttcctgctaatcctgtcataatgaatgtagcttctcagttcactgtatatgattcggtattgggggtttggaggcacccagaccctggcaatattatgtgtccctttggaccagtctcccaagaggagaggggcaggcaggaaagagtggggatcctaaggttactacagggggctcagtgtcatccacaacttcctatattagggataaaacatataggtgcacaagagctggggtatagcccataggtggtggagagaaaagtggtcagtgatcatcaatcattgcaggagagagcgagcgagcagtgaatgtattggtggtgctctcctccagagctggggttgttcgggcttctggcagcctttctcaaaccatttcccccactccagggtccccctggctctgctggtgctcctggcaagatggactcaacggtctccctggcccattgggcccctggtcctcgcggtcgcncnggtgangctggtccngttgtatgtaggccctcatccctctgctcatggcctccagcncccaaagcaccttggatgccggtaatnccccatctctttccctctctgtgcaaggggtcccccccggcctcctggacctcctggtccccnggtcncccagcgcnggttncgacntcagctccggcncaaggcnaccctcaagagaaggcccncgattgtggcnnttactaccgggtctgaataagccangtggttcgtggcctactncgagtgaaccaccctgagagcacaccatacagggatccctaaatcaccgcag

SEQ ID NO: 311584 - DNA, 3926 bp, Homo sapiens
gaaccggaagtggagcctgggagccttgacgttaggaacgaagtctaacctggatctggagccgggtgagatcaaattgggaatgctttcataatgaacgtcaaccagtcagttccacctgtgccaccatttgggcagccccagcccatctacccagggtatcatcagtccagctatggtgggcaatcagggtccacagcccccgccattccctatggagcctacaatggcccagtaccaggctatcagcaaacacctccccaaggtatgtcaagagccccaccttcctcgggggcacctccagcctcaacagcacaggctccttgtggccaggctgcatatggccagtttggccaaggagatgtacagaatgggccaagctccactgttcagatgcaaaggctgcctgggtctcagccatttgggtccccattggcccctgtgggcaaccagccacctgtgcttcagccctatggccctcccccgacaagtgcacaggtggctacgcagctgtctggaatgcagatcagcggtgctgtggccccagcccctccttcttcagggctgggctttggcccaccaacatcgctggcttcagcctcaggaagtttccctaactctggtctgtatggctcctatcctcagggccaggctcctccccttagccaggcccaaggtcatcctgggatccagactccccagcgatctgccccatcacaggcctccagcttcacacccccagcttcagggggtcctcggctgccttcgatgactggtccactcctgcctggacagagttttggagggccctcagtgagccagcccaaccatgtgtcttcacctcctcaagctctgccccctggcacccagatgactgggcccctgggaccactgccacctatgcactccccgcagcagccaggctatcagccccaacaaaatggttccttcggaccagcccggggccctcagtctaattatggaggcccctacccagcagcacccacctttggcagtcagcctgggcctcctcagccactgcctcctaagcgcctggaccctgatgccatcccaagccctattcaggtcattgaagatgacaggaacaaccggggtacagagccatttgttactggagtacggggccaggtgccacccttagtcactaccaacttcctggtgaaagaccaagggaatgcaagtccccgatacatccgatgtacatcctataatatcccttgcacatctgacatggctaagcaggctcaggtgcccctggcagcagtcatcaaaccgctggcaaggctgcccccagaggaggcttcaccgtatgttgtggaccatggggaatctggccctttgcgctgcaaccgctgcaaagcatacatgtgtcccttcatgcagttcattgaaggagggaggcgtttccagtgctgtttttgcagctgtatcaatgatgttcccccccagtattttcagcacctggatcataccggcaaacgtgtggatgcttatgaccgccctgagctatccctgggctcttatgaattcttggccactgtagattactgcaagaacaataagttccccagccctcctgcctttatcttcatgattgacgtctcctacaatgccatcaggactggtcttgttaggctcctctgtgaggagctcaagtcactgttagactttctacctagggagggtggggcagaagagtcagcaatccgcgttggctttgtcacctacaataaggtgctccacttctataatgtgaagagctcattggcccagccacagatgatggttgtgtctgatgtggctgacatgtttgtgccactgctggatggcttcctggtcaacgtcaatgagtctcgggcagttatcaccagcttattggatcagattccagaaatgtttgcagacacaagggaaacagagacagtatttgtaccagttatccaggctggaatggaggctctgaaggctgctgagtgtgcagggaagctctttctattccatacatccctgcccattgcagaggccccagggaaactgaagaacagagatgacaggaagctgatcaatacagacaaggagaagactctgttccagcctcagacaggtgcctatcagaccctggccaaagagtgtgtggcccaaggctgctgtgtagatctctttctcttccctaaccagtatgtggatgtggccacactctctgttgtgccccagctcactggtggctctgtctacaaatatgcttcctttcaggtggagaacgaccaggagcggttcctgagtgacctgcgtcgtgatgtccagaaggttgttggctttgatgctgtgatgcgggtccggacaagcactggtatccgtgctgtagatttctttggagctttctacatgagcaacacgacagatgtggagctggctgggctagatggggacaaaacagtgactgtggagttcaagcatgacgatcggctcaatgaagagagcggagctctcctgcagtgtgccctgctttacaccagctgtgcagggcagcgtcggctccgcatccataatctggccctgaactgctgcacccagctggctgatctatatcgaaactgtgagactgacacgctcatcaactacatggccaagtttgcatatcggggagtcctgaatagccctgtgaaggctgttcgtgacacgctcatcacccagtgtgcccagatcctggcctgttacagaaagaactgtgctagcccctcctctgcaggacagttgatccttcctgagtgcatgaagctactcccagtttacctgaactgtgtgttgaagagtgatgtcctgcagcctggagctgaagtcactactgatgaccgtgcctatgtccgacagctagttacctccatggatgtgactgagaccaatgtcttcttctaccctcggctcttacctttgacaaagtctcccgttgagagtactaccgaaccaccagcagttcgagcctctgaagagcgtctaagcaatggggatatatatttactggagaatgggctcaacctcttcctctgggtgggagcaagcgtccaacagggtgttgtccagagccttttcagcgtctcctccttcagtcagatcaccagtggtttgagtgttctgccagttctggataatccactgtccaagaaggttcgaggcctcattgatagcttacgggcacagagatcccggtacatgaagcttaccgtggtgaaacaggaagacaagatggagatgctgttcaagcacttcctggtggaagacaagagtctgagtgggggagcatcttatgtggactttctctgtcatatgcacaaggagattcggcagctactgagctaaagcaagtgggtaaatggcatagggcccaggctagcttccagaaagcaccccaggatgtcagagaaattgggacagtaacatatcttatgtaagctgacctcagtctctctggggggagggggagatataaggagacaccttctttctgggctcaagtatcctgccactctgtcatgtcctgctgatggaaggtgcccctgttccctcattctaccctctttttcctgctaatcctgtcataatgaatgtagcttctcagttcactgtatatgattcggtattgggggtttggaggcacccagaccctggcaatattatgtgtccctttggaccagtctcccaagaggagaggggcaggcaggaaagagtggggatcctaaggttactacagggggctcagtgtcatccacaacttcctatattagggataaaacatataggtgcacaagagctgggatgcccctgctctggacctctcatttctcttcattggtttatttttcaatgcatctttaatttgtaaagaaataaaataaattaagatgtaa

SEQ ID NO: 311585 - DNA, 2670 bp, Homo sapiens
gaaccggaagtggagcctgggagccttgacgttaggaacgaagtctaacctggatctggagccgggtgagatcaaattgggaatgctttcataatgaacgtcaaccagtcagttccacctgtgccaccatttgggcagccccagcccatctacccagggtatcatcagtccagctatggtgggcaatcagggtccacagcccccgccattccctatggagcctacaatggcccagtaccaggctatcagcaaacacctccccaaggtatgtcaagagccccaccttcctcgggggcacctccagcctcaacagcacaggctccttgtggccaggctgcatatggccagtttggccaaggagatgtacagaatgggccaagctccactgttcagatgcaaaggctgcctgggtctcagccatttgggtccccattggcccctgtgggcaaccagccacctgtgcttcagccctatggccctcccccgacaagtgcacaggtggctacgcagctgtctggaatgcagatcagcggtgctgtggccccagcccctccttcttcagggctgggctttggcccaccaacatcgctggcttcagcctcaggaagtttccctaactctggtctgtatggctcctatcctcagggccaggctcctccccttagccaggcccaaggtcatcctgggatccagactccccagcgatctgccccatcacaggcctccagcttcacacccccagcttcagggggtcctcggctgccttcgatgactggtccactcctgcctggacagagttttggagggccctcagtgagccagcccaaccatgtgtcttcacctcctcaagctctgccccctggcacccagatgactgggcccctgggaccactgccacctatgcactccccgcagcagccaggctatcagccccaacaaaatggttccttcggaccagcccggggccctcagtctaattatggaggcccctacccagcagcacccacctttggcagtcagcctgggcctcctcagccactgcctcctaagcgcctggaccctgatgccatcccaagccctattcaggtcattgaagatgacaggaacaaccggggtacagagccatttgttactggagtacggggccaggtgccacccttagtcactaccaacttcctggtgaaagaccaagggaatgcaagtccccgatacatccgatgtacatcctataatatcccttgcacatctgacatggctaagcaggctcaggtgcccctggcagcagtcatcaaaccgctggagcaagcgtccaacagggtgttgtccagagccttttcagcgtctcctccttcagtcagatcaccagtggtttgagtgttctgccagttctggataatccactgtccaagaaggttcgaggcctcattgatagcttacgggcacagagatcccggtacatgaagcttaccgtggtgaaacaggaagacaagatggagatgctgttcaagcacttcctggtggaagacaagagtctgagtgggggagcatcttatgtggactttctctgtcatatgcacaaggagattcggcagctactgagctaaagcaagtgggtaaatggcatagggcccaggctagcttccagaaagcaccccaggatgtcagagaaattgggacagtaacatatcttatgtaagctgacctcagtctctctggggggagggggagatataaggagacaccttctttctgggctcaagtatcctgccactctgtcatgtcctgctgatggaaggtgcccctgttccctcattctaccctctttttcctgctaatcctgtcataatgaatgtagcttctcagttcactgtatatgattcggtattgggggtttggaggcacccagaccctggcaatattatgtgtccctttggaccagtctcccaagaggagaggggcaggcaggaaagagtggggatcctaaggttactacagggggctcagtgtcatccacaacttcctatattagggataaaacatataggtgcacaagagctggggtatagcccataggtggtggagagaaaagtggtcagtccttcttgggcctggaggttagcagtcaagtttctctgctttcactgctcgctcgctctctcctgcaatgattgatgatcactccgtggatagagaggcacactgtcagaggtgaccggagaactgagttgcaaaatatattaagatctggtagaggtaccagcttcctttccagctggagaggccccaacactggatggttctgtagggagcctagggagcctggtcatcaacttgcaatacctcacagagccagttcacatcccactctgagctcccacgagaaacactgcttctccaggcccggggttgttggggagagaggcagaggcagctggagcgccgttctctcctgctgggacaccgcttgggctttggtattgactgagtggctgacagttatcttccaaccccaactggcttgggggcaggacaagggctaggcttgatggtggccaggcttgcctgctccccacctgggatgcccctgctctggacctctcatttctcttcattggtttatttttcaatgcatctttaatttgtaaagaaataaaataaattaagatgtaa

SEQ ID NO: 311586 - DNA, 3584 bp, Homo sapiens
gaaccggaagtggagcctgggagccttgacgttaggaacgaagtctaacctggatctggagccgggtgagatcaaattgggaatgctttcataatgaacgtcaaccagtcagttccacctgtgccaccatttgggcagccccagcccatctacccagggtatcatcagtccagctatggtgggcaatcagggtccacagcccccgccattccctatggagcctacaatggcccagtaccaggctatcagcaaacacctccccaaggtatgtcaagagccccaccttcctcgggggcacctccagcctcaacagcacaggctccttgtggccaggctgcatatggccagtttggccaaggagatgtacagaatgggccaagctccactgttcagatgcaaaggctgcctgggtctcagccatttgggtccccattggcccctgtgggcaaccagccacctgtgcttcagccctatggccctcccccgacaagtgcacaggtggctacgcagctgtctggaatgcagatcagcggtgctgtggccccagcccctccttcttcagggctgggctttggcccaccaacatcgctggcttcagcctcaggaagtttccctaactctggtctgtatggctcctatcctcagggccaggctcctccccttagccaggcccaaggtcatcctgggatccagactccccagcgatctgccccatcacaggcctccagcttcacacccccagcttcagggggtcctcggctgccttcgatgactggtccactcctgcctggacagagttttggagggccctcagtgagccagcccaaccatgtgtcttcacctcctcaagctctgccccctggcacccagatgactgggcccctgggaccactgccacctatgcactccccgcagcagccaggctatcagccccaacaaaatggttccttcggaccagcccggggccctcagtctaattatggaggcccctacccagcagcacccacctttggcagtcagcctgggcctcctcagccactgcctcctaagcgcctggaccctgatgccatcccaagccctattcaggtcattgaagatgacaggaacaaccggggtacagagccatttgttactggagtacggggccaggtgccacccttagtcactaccaacttcctggtgaaagaccaagggaatgcaagtccccgatacatccgatgtacatcctataatatcccttgcacatctgacatggctaagcaggctcaggtgcccctggcagcagtcatcaaaccgctggcaaggctgcccccagaggaggcttcaccgtatgttgtggaccatggggaatctggccctttgcgctgcaaccgctgcaaagcatacatgtgtcccttcatgcagttcattgaaggagggaggcgtttccagtgctgtttttgcagctgtatcaatgatgttcccccccagtattttcagcacctggatcataccggcaaacgtgtggatgcttatgaccgccctgagctatccctgggctcttatgaattcttggccactgtagattactgcaagaacaataagttccccagccctcctgcctttatcttcatgattgacgtctcctacaatgccatcaggactggtcttgttaggctcctctgtgaggagctcaagtcactgttagactttctacctagggagggtggggcagaagagtcagcaatccgcgttggctttgtcacctacaataaggtgctccacttctataatgtgaagagctcattggcccagccacagatgatggttgtgtctgatgtggctgacatgtttgtgccactgctggatggcttcctggtcaacgtcaatgagtctcgggcagttatcaccagcttattggatcagattccagaaatgtttgcagacacaagggaaacagagacagtatttgtaccagttatccaggctggaatggaggctctgaaggctgctgagtgtgcagggaagctctttctattccatacatccctgcccattgcagaggccccagggaaactgaagaacagagatgacaggaagctgatcaatacagacaaggagaagactctgttccagcctcagacaggtgcctatcagaccctggccaaagagtgtgtggcccaaggctgctgtgtagatctctttctcttccctaaccagtatgtggatgtggccacactctctgttgtgccccagctcactggtggctctgtctacaaatatgcttcctttcaggtggagaacgaccaggagcggttcctgagtgacctgcgtcgtgatgtccagaaggttgttggctttgatgctgtgatgcgggtccggacaagcactggtatccgtgctgtagatttctttggagctttctacatgagcaacacgacagatgtggagctggctgggctagatggggacaaaacagtgactgtggagttcaagcatgacgatcggctcaatgaagagagcggagctctcctgcagtgtgccctgctttacaccagctgtgcagggcagcgtcggctccgcatccataatctggccctgaactgctgcacccagctggctgatctatatcgaaactgtgagactgacacgctcatcaactacatggccaagtttgcatatcggggagtcctgaatagccctgtgaaggctgttcgtgacacgctcatcacccagtgtgcccagatcctggcctgttacagaaagaactgtgctagcccctcctctgcaggacagttgatccttcctgagtgcatgaagctactcccagtttacctgaactgtgtgttgaagagtgatgtcctgcagcctggagctgaagtcactactgatgaccgtgcctatgtccgacagctagttacctccatggatgtgactgagaccaatgtcttcttctaccctcggctcttacctttgacaaagtctcccgttgagagtactaccgaaccaccagcagttcgagcctctgaagagcgtctaagcaatggggatatatatttactggagaatgggctcaacctcttcctctgggtgggagcaagcgtccaacagggtgttgtccagagccttttcagcgtctcctccttcagtcagatcaccagtggtttgagtgttctgccagttctggataatccactgtccaagaaggttcgaggcctcattgatagcttacgggcacagagatcccggtacatgaagcttaccgtggtgaaacaggaagacaagatggagatgctgttcaagcacttcctggtggaagacaagagtctgagtgggggagcatcttatgtggactttctctgtcatatgcacaaggagattcggcagctactgagctaaagcaagtgggtaaatggcatagggcccaggctagcttccagaaagcaccccaggatgtcagagaaattgggacagtaacatatcttatgtaagctgacctcagtctctctggggggagggggagatataaggagacaccttctttctgggctcaagtatcctgcccttcagggagatgggggtcaataaaggcaactgaacattga

SEQ ID NO: 311587 - DNA, 1204 bp, Homo sapiens
ggacgcgtgggtccggacgcgtgggtcgcggacgcgtgggtcgacccacgcgtccgagacaagagtctgagtgggggagcatcttatgtggactttctctgtcatatgcacaaggagattcggcagctactgagctaaagcaagtgggtaaatggcatagggcccaggctagcttccagaaagcaccccaggatgtcagagaaattgggacagtaacatatcttatgtaagctgacctcagtctctctggggggagggggagatataaggagacaccttctttctgggctcaagtatcctgccactctgtcatgtcctgctgatggaaggtgcccctgttccctcattctaccctctttttcctgctaatcctgtcataatgaatgtagcttctcagttcactgtatatgattcggtattgggggtttggaggcacccagaccctggcaatattatgtgtccctttggaccagtctcccaagaggagaggggcaggcaggaaagagtggggatcctaaggttactacagggggctcagtgtcatccacaacttcctatattagggataaaacatataggtgcacaagagctggggtatagcccataggtggtggagagaaaagtggtcagtccttcttgggcctggaggttagcagtcaagtttctctgctttcactgctcgctcgctctctcctgcaatgattgatgatcactccgtggatagagaggcacactgtcagaggtgaccggagaactgagttgcaaaatatattaagatctggtagaggtaccagcttcctttccagctggagaggccccaacactggatggttctgtagggagcctagggagcctggtcatcaacttgcaatacctcacagagccagttcacatcccactctgagctcccacgagaaacactgcttctccaggcccggggttgttggggagagaggcagaggcagctggagcgccgttctctcctgctgggacaccgcttgggctttggtattgactgagtggctgacagttatcttccaaccccaactggcttgggggcaggacaagggctaggcttgatggtggccaggcttgcctgctccccacctgggatgcccctgctctggacctctcatttctcttcattggtttatttttcaatgcatctttaatttgtaaagaaataaaataaattaagatgtaa

SEQ ID NO: 311588 - DNA, 833 bp, Homo sapiens
ccctgactgcagctctcctcttgggagactggtccaaagggacacataatattgccagggtctgggtgcctccaaacccccaataccgaatcatatacagtgaactgagaagctacattcattatgacaggattatggggatcctaaggttactacagggggctcagtgtcatccacaacttcctatattagggataaaacatataggtgcacaagagctggggtatagcccataggtggtggagagaaaagtggtcagtccttcttgggcctggaggttagcagtcaagtttctctgctttcactgctcgctcgctctctcctgcaatgattgatgatcactccgtggatagagaggcacactgtcagaggtgaccggagaactgagttgcaaaatatattaagatctggtagaggtaccagcttcctttccagctggagaggccccaacactggatggttctgtagggagcctagggagcctggtcatcaacttgcaatacctcacagagccagttcacatcccactctgagctcccacgagaaacactgcttctccaggcccggggttgttggggagagaggcagaggcagctggagcgccgttctctcctgctgggacaccgcttgggctttggtattgactgagtggctgacagttatcttccaaccccaactggcttgggggcaggacaagggctaggcttgatggtggccaggcttgcctgctccccacctgggatgcccctgctctggacctctcatttctcttcattggtttatttttcaatgcatctttaatttgtaaagaaataaaataaattaagatgtaa

SEQ ID NO: 311589 - DNA, 477 bp, Homo sapiens
ctgaagaagtgagcccgagaatgtggcagttaggaacatgggccttggaatcagtcctgcattgatattctggccccaccacttactagctacatgacctaggataaatttcttaagtacttcctcttttgttccttcatctgcaaaatggtgttaaaatacttaagtaggatttgtcaacagaattaaataattatatgtaaagcactctgtgtggtacctggcatgcagtctaagtgtttaaaagctattattgtcatcatcattatcatcctcactgttatgatgatgataattaggtggccttgtagagtggaaggggtacagggagattgtctgcacgatgagctatgtctagtcagtgacatgactctggacctgggggcctgcaggtggagaacgaccaggagcggttcctgagtgacctgcgtcgtgatgtccagaaggttgttggctttgatgctgtgatgcgggtcc

SEQ ID NO: 311590 - DNA, 409 bp, Homo sapiens
gtgagagttacagaactgaggtgtttcctgaggttaatgatagggtgtctgggttgactgaagaaatgtagcttggtgtcatgaagttgtgggtggtggaaaaggtggcaagtctaggtaacaatgtcaccttctacagggagggtggggcagaagagtcagcaatccgcgttggctttgtcacctacaataaggtgctccacttctataatgtgaagagctcattggcccagccacagatgatggttgtgtctgatgtggctgacatgtttgtgccactgctggatggcttcctggtcaacgtcaatgagtctcgggcagttatcaccaggtaagagccagattgtggaggtaaaggttgggggtggcatgggtaccaccatagaaggtcatggagttgaacagaggt

SEQ ID NO: 311591 - DNA, 325 bp, Homo sapiens
gctcgttcctcttcctccgtctctcctcactatgcgtactgtgcctgcggggtctgcgtctagacgtctgactctgcagtgcatgtacatttgtttgctggctcgtctatatgacaacgtacgagacgtagtgtagaacctcgtgcgtgggctagatggggacaaaacagtgactgtggagttcaagcatgacgatcggctcaatgaagagagcggagctctcctgcaggccctgctttacaccagctgtgcaggtggcaggcgggaggcggggctgggcaggaagtgtttcattcgcttggtatagaagagggtgaggaatggg

SEQ ID NO: 311592 - DNA, 4398 bp, Homo sapiens
ctcctctctctggagccgggtgagatcaaattgggaatgctttcataatgaacgtcaaccagtcagttccacctgtgccaccatttgggcagccccagcccatctacccagggtatcatcagtccagctatggtgggcaatcagggtccacagcccccgccattccctatggagcctacaatggcccagtaccaggctatcagcaaacacctccccaaggtatgtcaagagccccaccttcctcgggggcacctccagcctcaacagcacaggctccttgtggccaggctgcatatggccagtttggccaaggagatgtacagaatgggccaagctccactgttcagatgcaaaggctgcctgggtctcagccatttgggtccccattggcccctgtgggcaaccagccacctgtgcttcagccctatggccctcccccgacaagtgcacaggtggctacgcagctgtctggaatgcagatcagcggtgctgtggccccagcccctccttcttcagggctgggctttggcccaccaacatcgctggcttcagcctcaggaagtttccctaactctggtctgtatggctcctatcctcagggccaggctcctccccttagccaggcccaaggtcatcctgggatccagactccccagcgatctgccccatcacaggcctccagcttcacacccccagcttcagggggtcctcggctgccttcgatgactggtccactcctgcctggacagagttttggagggccctcagtgagccagcccaaccatgtgtcttcacctcctcaagctctgccccctggcacccagatgactgggcccctgggaccactgccacctatgcactccccgcagcagccaggctatcagccccaacaaaatggttccttcggaccagcccggggccctcagtctaattatggaggcccctacccagcagcacccacctttggcagtcagcctgggcctcctcagccactgcctcctaagcgcctggaccctgatgccatcccaagccctattcaggtcattgaagatgacaggaacaaccggggtacagagccatttgttactggagtacggggccaggtgccacccttagtcactaccaacttcctggtgaaagaccaagggaatgcaagtccccgatacatccgatgtacatcctataatatcccttgcacatctgacatggctaagcaggctcaggtgcccctggcagcagtcatcaaaccgctggcaaggctgcccccagaggaggcttcaccgtatgttgtggaccatggggaatctggccctttgcgctgcaaccgctgcaaagcatacatgtgtcccttcatgcagttcattgaaggagggaggcgtttccagtgctgtttttgcagctgtatcaatgatgttcccccccagtattttcagcacctggatcataccggcaaacgtgtggatgcttatgaccgccctgagctatccctgggctcttatgaattcttggccactgtagattactgcaagaacaataagttccccagccctcctgcctttatcttcatgattgacgtctcctacaatgccatcaggactggtcttgttaggctcctctgtgaggagctcaagtcactgttagactttctacctagggagggtggggcagaagagtcagcaatccgcgttggctttgtcacctacaataaggtgctccacttctataatgtgaagagctcattggcccagccacagatgatggttgtgtctgatgtggctgacatgtttgtgccactgctggatggcttcctggtcaacgtcaatgagtctcgggcagttatcaccagcttattggatcagattccagaaatgtttgcagacacaagggaaacagagacagtatttgtaccagttatccaggctggaatggaggctctgaaggctgctgagtgtgcagggaagctctttctattccatacatccctgcccattgcagaggccccagggaaactgaagaacagagatgacaggaagctgatcaatacagacaaggagaagactctgttccagcctcagacaggtgcctatcagaccctggccaaagagtgtgtggcccaaggctgctgtgtagatctctttctcttccctaaccagtatgtggatgtggccacactctctgttgtgccccagctcactggtggctctgtctacaaatatgcttcctttcaggtggagaacgaccaggagcggttcctgagtgacctgcgtcgtgatgtccagaaggttgttggctttgatgctgtgatgcgggtccggacaagcactggtatccgtgctgtagatttctttggagctttctacatgagcaacacgacagatgtggagctggctgggctagatggggacaaaacagtgactgtggagttcaagcatgacgatcggctcaatgaagagagcggagctctcctgcagtgtgccctgctttacaccagctgtgcagggcagcgtcggctccgcatccataatctggccctgaactgctgcacccagctggctgatctatatcgaaactgtgagactgacacgctcatcaactacatggccaagtttgcatatcggggagtcctgaatagccctgtgaaggctgttcgtgacacgctcatcacccagtgtgcccagatcctggcctgttacagaaagaactgtgctagcccctcctctgcaggacagttgatccttcctgagtgcatgaagctactcccagtttacctgaactgtgtgttgaagagtgatgtcctgcagcctggagctgaagtcactactgatgaccgtgcctatgtccgacagctagttacctccatggatgtgactgagaccaatgtcttcttctaccctcggctcttacctttgacaaagtctcccgttgagagtactaccgaaccaccagcagttcgagcctctgaagagcgtctaagcaatggggatatatatttactggagaatgggctcaacctcttcctctgggtgggagcaagcgtccaacagggtgttgtccagagccttttcagcgtctcctccttcagtcagatcaccagtggtttgagtgttctgccagttctggataatccactgtccaagaaggttcgaggcctcattgatagcttacgggcacagagatcccggtacatgaagcttaccgtggtgaaacaggaagacaagatggagatgctgttcaagcacttcctggtggaagacaagagtctgagtgggggagcatcttatgtggactttctctgtcatatgcacaaggagattcggcagctactgagctaaagcaagtgggtaaatggcatagggcccaggctagcttccagaaagcaccccaggatgtcagagaaattgggacagtaacatatcttatgtaagctgacctcagtctctctggggggagggggagatataaggagacaccttctttctgggctcaagtatcctgccactctgtcatgtcctgctgatggaaggtgcccctgttccctcattctaccctctttttcctgctaatcctgtcataatgaatgtagcttctcagttcactgtatatgattcggtattgggggtttggaggcacccagaccctggcaatattatgtgtccctttggaccagtctcccaagaggagaggggcaggcaggaaagagtggggatcctaaggttactacagggggctcagtgtcatccacaacttcctatattagggataaaacatataggtgcacaagagctggggtatagcccataggtggtggagagaaaagtggtcagtccttcttgggcctggaggttagcagtcaagtttctctgctttcactgctcgctcgctctctcctgcaatgattgatgatcactccgtggatagagaggcacactgtcagaggtgaccggagaactgagttgcaaaatatattaagatctggtagaggtaccagcttcctttccagctggagaggccccaacactggatggttctgtagggagcctagggagcctggtcatcaacttgcaatacctcacagagccagttcacatcccactctgagctcccacgagaaacactgcttctccaggcccggggttgttggggagagaggcagaggcagctggagcgccgttctctcctgctgggacaccgcttgggctttggtattgactgagtggctgacagttatcttccaaccccaactggcttgggggcaggacaagggctaggcttgatggtggccaggcttgcctgctccccacctgggatgcccctgctctggacctctcatttctcttcattggtttatttttcaatgcatctttaatttgtaaagaaataaaataaattaagatgtaa

SEQ ID NO: 311593 - DNA, 4225 bp, Homo sapiens
ctcctctctctggagccgggtgagatcaaattgggaatgctttcataatgaacgtcaaccagtcagttccacctgtgccaccatttgggcagccccagcccatctacccagggtatcatcagtccagctatggtgggcaatcagggtccacagcccccgccattccctatggagcctacaatggcccagtaccaggctatcagcaaacacctccccaaggtatgtcaagagccccaccttcctcgggggcacctccagcctcaacagcacaggctccttgtggccaggctgcatatggccagtttggccaaggagatgtacagaatgggccaagctccactgttcagatgcaaaggcccaccaacatcgctggcttcagcctcaggaagtttccctaactctggtctgtatggctcctatcctcagggccaggctcctccccttagccaggcccaaggtcatcctgggatccagactccccagcgatctgccccatcacaggcctccagcttcacacccccagcttcagggggtcctcggctgccttcgatgactggtccactcctgcctggacagagttttggagggccctcagtgagccagcccaaccatgtgtcttcacctcctcaagctctgccccctggcacccagatgactgggcccctgggaccactgccacctatgcactccccgcagcagccaggctatcagccccaacaaaatggttccttcggaccagcccggggccctcagtctaattatggaggcccctacccagcagcacccacctttggcagtcagcctgggcctcctcagccactgcctcctaagcgcctggaccctgatgccatcccaagccctattcaggtcattgaagatgacaggaacaaccggggtacagagccatttgttactggagtacggggccaggtgccacccttagtcactaccaacttcctggtgaaagaccaagggaatgcaagtccccgatacatccgatgtacatcctataatatcccttgcacatctgacatggctaagcaggctcaggtgcccctggcagcagtcatcaaaccgctggcaaggctgcccccagaggaggcttcaccgtatgttgtggaccatggggaatctggccctttgcgctgcaaccgctgcaaagcatacatgtgtcccttcatgcagttcattgaaggagggaggcgtttccagtgctgtttttgcagctgtatcaatgatgttcccccccagtattttcagcacctggatcataccggcaaacgtgtggatgcttatgaccgccctgagctatccctgggctcttatgaattcttggccactgtagattactgcaagaacaataagttccccagccctcctgcctttatcttcatgattgacgtctcctacaatgccatcaggactggtcttgttaggctcctctgtgaggagctcaagtcactgttagactttctacctagggagggtggggcagaagagtcagcaatccgcgttggctttgtcacctacaataaggtgctccacttctataatgtgaagagctcattggcccagccacagatgatggttgtgtctgatgtggctgacatgtttgtgccactgctggatggcttcctggtcaacgtcaatgagtctcgggcagttatcaccagcttattggatcagattccagaaatgtttgcagacacaagggaaacagagacagtatttgtaccagttatccaggctggaatggaggctctgaaggctgctgagtgtgcagggaagctctttctattccatacatccctgcccattgcagaggccccagggaaactgaagaacagagatgacaggaagctgatcaatacagacaaggagaagactctgttccagcctcagacaggtgcctatcagaccctggccaaagagtgtgtggcccaaggctgctgtgtagatctctttctcttccctaaccagtatgtggatgtggccacactctctgttgtgccccagctcactggtggctctgtctacaaatatgcttcctttcaggtggagaacgaccaggagcggttcctgagtgacctgcgtcgtgatgtccagaaggttgttggctttgatgctgtgatgcgggtccggacaagcactggtatccgtgctgtagatttctttggagctttctacatgagcaacacgacagatgtggagctggctgggctagatggggacaaaacagtgactgtggagttcaagcatgacgatcggctcaatgaagagagcggagctctcctgcagtgtgccctgctttacaccagctgtgcagggcagcgtcggctccgcatccataatctggccctgaactgctgcacccagctggctgatctatatcgaaactgtgagactgacacgctcatcaactacatggccaagtttgcatatcggggagtcctgaatagccctgtgaaggctgttcgtgacacgctcatcacccagtgtgcccagatcctggcctgttacagaaagaactgtgctagcccctcctctgcaggacagttgatccttcctgagtgcatgaagctactcccagtttacctgaactgtgtgttgaagagtgatgtcctgcagcctggagctgaagtcactactgatgaccgtgcctatgtccgacagctagttacctccatggatgtgactgagaccaatgtcttcttctaccctcggctcttacctttgacaaagtctcccgttgagagtactaccgaaccaccagcagttcgagcctctgaagagcgtctaagcaatggggatatatatttactggagaatgggctcaacctcttcctctgggtgggagcaagcgtccaacagggtgttgtccagagccttttcagcgtctcctccttcagtcagatcaccagtggtttgagtgttctgccagttctggataatccactgtccaagaaggttcgaggcctcattgatagcttacgggcacagagatcccggtacatgaagcttaccgtggtgaaacaggaagacaagatggagatgctgttcaagcacttcctggtggaagacaagagtctgagtgggggagcatcttatgtggactttctctgtcatatgcacaaggagattcggcagctactgagctaaagcaagtgggtaaatggcatagggcccaggctagcttccagaaagcaccccaggatgtcagagaaattgggacagtaacatatcttatgtaagctgacctcagtctctctggggggagggggagatataaggagacaccttctttctgggctcaagtatcctgccactctgtcatgtcctgctgatggaaggtgcccctgttccctcattctaccctctttttcctgctaatcctgtcataatgaatgtagcttctcagttcactgtatatgattcggtattgggggtttggaggcacccagaccctggcaatattatgtgtccctttggaccagtctcccaagaggagaggggcaggcaggaaagagtggggatcctaaggttactacagggggctcagtgtcatccacaacttcctatattagggataaaacatataggtgcacaagagctggggtatagcccataggtggtggagagaaaagtggtcagtccttcttgggcctggaggttagcagtcaagtttctctgctttcactgctcgctcgctctctcctgcaatgattgatgatcactccgtggatagagaggcacactgtcagaggtgaccggagaactgagttgcaaaatatattaagatctggtagaggtaccagcttcctttccagctggagaggccccaacactggatggttctgtagggagcctagggagcctggtcatcaacttgcaatacctcacagagccagttcacatcccactctgagctcccacgagaaacactgcttctccaggcccggggttgttggggagagaggcagaggcagctggagcgccgttctctcctgctgggacaccgcttgggctttggtattgactgagtggctgacagttatcttccaaccccaactggcttgggggcaggacaagggctaggcttgatggtggccaggcttgcctgctccccacctgggatgcccctgctctggacctctcatttctcttcattggtttatttttcaatgcatctttaatttgtaaagaaataaaataaattaagatgtaa

SEQ ID NO: 311594 - DNA, 4681 bp, Homo sapiens
gaaccggaagtggagcctgggagccttgacgttaggaacgaagtctaacctggatctggagccgggtgagatcaaattgggaatgctttcataatgaacgtcaaccagtcagttccacctgtgccaccatttgggcagccccagcccatctacccagggtatcatcagtccagctatggtgggcaatcagggtccacagcccccgccattccctatggagcctacaatggcccagtaccaggctatcagcaaacacctccccaaggtatgtcaagagccccaccttcctcgggggcacctccagcctcaacagcacaggctccttgtggccaggctgcatatggccagtttggccaaggagatgtacagaatgggccaagctccactgttcagatgcaaaggctgcctgggtctcagccatttgggtccccattggcccctgtgggcaaccagccacctgtgcttcagccctatggccctcccccgacaagtgcacaggtggctacgcagctgtctggaatgcagatcagcggtgctgtggccccagcccctccttcttcagggctgggctttggcccaccaacatcgctggcttcagcctcaggaagtttccctaactctggtctgtatggctcctatcctcagggccaggctcctccccttagccaggcccaaggtcatcctgggatccagactccccagcgatctgccccatcacaggcctccagcttcacacccccagcttcagggggtcctcggctgccttcgatgactggtccactcctgcctggacagagttttggagggccctcagtgagccagcccaaccatgtgtcttcacctcctcaagctctgccccctggcacccagatgactgggcccctgggaccactgccacctatgcactccccgcagcagccaggctatcagccccaacaaaatggttccttcggaccagcccggggccctcagtctaattatggaggcccctacccagcagcacccacctttggcagtcagcctgggcctcctcagccactgcctcctaagcgcctggaccctgatgccatcccaagccctattcaggtcattgaagatgacaggaacaaccggggtacagagccatttgttactggagtacggggccaggtgccacccttagtcactaccaacttcctggtgaaagaccaagggaatgcaagtccccgatacatccgatgtacatcctataatatcccttgcacatctgacatggctaagcaggctcaggtgcccctggcagcagtcatcaaaccgctggcaaggctgcccccagaggaggcttcaccgtatgttgtggaccatggggaatctggccctttgcgctgcaaccgctgcaaagcatacatgtgtcccttcatgcagttcattgaaggagggaggcgtttccagtgctgtttttgcagctgtatcaatgatgttcccccccagtattttcagcacctggatcataccggcaaacgtgtggatgcttatgaccgccctgagctatccctgggctcttatgaattcttggccactgtagattactgcaagaacaataagttccccagccctcctgcctttatcttcatgattgacgtctcctacaatgccatcaggactggtcttgttaggctcctctgtgaggagctcaagtcactgttagactttctacctagggagggtggggcagaagagtcagcaatccgcgttggctttgtcacctacaataaggtgctccacttctataatgtgaagagctcattggcccagccacagatgatggttgtgtctgatgtggctgacatgtttgtgccactgctggatggcttcctggtcaacgtcaatgagtctcgggcagttatcaccagcttattggatcagattccagaaatgtttgcagacacaagggaaacagagacagtatttgtaccagttatccaggctggaatggaggctctgaaggctgctgagtgtgcagggaagctctttctattccatacatccctgcccattgcagaggccccagggaaactgaagaacagagatgacaggaagctgatcaatacagacaaggagaagactctgttccagcctcagacaggtgcctatcagaccctggccaaagagtgtgtggcccaaggctgctgtgtagatctctttctcttccctaaccagtatgtggatgtggccacactctctgttgtgccccagctcactggtggctctgtctacaaatatgcttcctttcaggtggagaacgaccaggagcggttcctgagtgacctgcgtcgtgatgtccagaaggttgttggctttgatgctgtgatgcgggtccggacaagcactggtatccgtgctgtagatttctttggagctttctacatgagcaacacgacagatgtggagctggctgggctagatggggacaaaacagtgactgtggagttcaagcatgacgatcggctcaatgaagagagcggagctctcctgcagtgtgccctgctttacaccagctgtgcagggcagcgtcggctccgcatccataatctggccctgaactgctgcacccagctggctgatctatatcgaaactgtgagactgacacgctcatcaactacatggccaagtttgcatatcggggagtcctgaatagccctgtgaaggctgttcgtgacacgctcatcacccagtgtgcccagatcctggcctgttacagaaagaactgtgctagcccctcctctgcaggacagttgatccttcctgagtgcatgaagctactcccagtttacctgaactgtgtgttgaagagtgatgtcctgcagcctggagctgaagtcactactgatgaccgtgcctatgtccgacagctagttacctccatggatgtgactgagaccaatgtcttcttctaccctcggctcttacctttgacaaagtctcccgttgagagtactaccgaaccaccagcagttcgagcctctgaagagcgtctaagcaatggggatatatatttactggagaatgggctcaacctcttcctctgggtgggagcaagcgtccaacagggtgttgtccagagccttttcagcgtctcctccttcagtcagatcaccagtggtttggtgagggcagggagtcaaggagaatatgggtgtggaagtatactttgtgaaacaattgggagccaatatagttagtgtgctagtaccctcaaatatcagggaacacttggggacaagggcagttgctgtcattcttcccaggtttgcctgtttcagatgatgcatacatgtatgctgccccaccttgactgaactcagagtgccttaccataaggataaatgaattttgtgttctagagtgttctgccagttctggataatccactgtccaagaaggttcgaggcctcattgatagcttacgggcacagagatcccggtacatgaagcttaccgtggtgaaacaggaagacaagatggagatgctgttcaagcacttcctggtggaagacaagagtctgagtgggggagcatcttatgtggactttctctgtcatatgcacaaggagattcggcagctactgagctaaagcaagtgggtaaatggcatagggcccaggctagcttccagaaagcaccccaggatgtcagagaaattgggacagtaacatatcttatgtaagctgacctcagtctctctggggggagggggagatataaggagacaccttctttctgggctcaagtatcctgccactctgtcatgtcctgctgatggaaggtgcccctgttccctcattctaccctctttttcctgctaatcctgtcataatgaatgtagcttctcagttcactgtatatgattcggtattgggggtttggaggcacccagaccctggcaatattatgtgtccctttggaccagtctcccaagaggagaggggcaggcaggaaagagtggggatcctaaggttactacagggggctcagtgtcatccacaacttcctatattagggataaaacatataggtgcacaagagctggggtatagcccataggtggtggagagaaaagtggtcagtccttcttgggcctggaggttagcagtcaagtttctctgctttcactgctcgctcgctctctcctgcaatgattgatgatcactccgtggatagagaggcacactgtcagaggtgaccggagaactgagttgcaaaatatattaagatctggtagaggtaccagcttcctttccagctggagaggccccaacactggatggttctgtagggagcctagggagcctggtcatcaacttgcaatacctcacagagccagttcacatcccactctgagctcccacgagaaacactgcttctccaggcccggggttgttggggagagaggcagaggcagctggagcgccgttctctcctgctgggacaccgcttgggctttggtattgactgagtggctgacagttatcttccaaccccaactggcttgggggcaggacaagggctaggcttgatggtggccaggcttgcctgctccccacctgggatgcccctgctctggacctctcatttctcttcattggtttatttttcaatgcatctttaatttgtaaagaaataaaataaattaagatgtaa

SEQ ID NO: 311595 - DNA, 4497 bp, Homo sapiens
gaaccggaagtggagcctgggagccttgacgttaggaacgaagtctaacctggatctggagccgggtgagatcaaattgggaatgctttcataatgaacgtcaaccagtcagttccacctgtgccaccatttgggcagccccagcccatctacccagggtatcatcagtccagctatggtgggcaatcagggtccacagcccccgccattccctatggagcctacaatggcccagtaccaggctatcagcaaacacctccccaaggtatgtcaagagccccaccttcctcgggggcacctccagcctcaacagcacaggctccttgtggccaggctgcatatggccagtttggccaaggagatgtacagaatgggccaagctccactgttcagatgcaaaggctgcctgggtctcagccatttgggtccccattggcccctgtgggcaaccagccacctgtgcttcagccctatggccctcccccgacaagtgcacaggtggctacgcagctgtctggaatgcagatcagcggtgctgtggccccagcccctccttcttcagggctgggctttggcccaccaacatcgctggcttcagcctcaggaagtttccctaactctggtctgtatggctcctatcctcagggccaggctcctccccttagccaggcccaaggtcatcctgggatccagactccccagcgatctgccccatcacaggcctccagcttcacacccccagcttcagggggtcctcggctgccttcgatgactggtccactcctgcctggacagagttttggagggccctcagtgagccagcccaaccatgtgtcttcacctcctcaagctctgccccctggcacccagatgactgggcccctgggaccactgccacctatgcactccccgcagcagccaggctatcagccccaacaaaatggttccttcggaccagcccggggccctcagtctaattatggaggcccctacccagcagcacccacctttggcagtcagcctgggcctcctcagccactgcctcctaagcgcctggaccctgatgccatcccaagccctattcaggtcattgaagatgacaggaacaaccggggtacagagccatttgttactggagtacggggccaggtgccacccttagtcactaccaacttcctggtgaaagaccaagggaatgcaagtccccgatacatccgatgtacatcctataatatcccttgcacatctgacatggctaagcaggctcaggtgcccctggcagcagtcatcaaaccgctggcaaggctgcccccagaggaggcttcaccgtatgttgtggaccatggggaatctggccctttgcgctgcaaccgctgcaaagcatacatgtgtcccttcatgcagttcattgaaggagggaggcgtttccagtgctgtttttgcagctgtatcaatgatgttcccccccagtattttcagcacctggatcataccggcaaacgtgtggatgcttatgaccgccctgagctatccctgggctcttatgaattcttggccactgtagattactgcaagaacaataagttccccagccctcctgcctttatcttcatgattgacgtctcctacaatgccatcaggactggtcttgttaggctcctctgtgaggagctcaagtcactgttagactttctacctagggagggtggggcagaagagtcagcaatccgcgttggctttgtcacctacaataaggtgctccacttctataatgtgaagagctcattggcccagccacagatgatggttgtgtctgatgtggctgacatgtttgtgccactgctggatggcttcctggtcaacgtcaatgagtctcgggcagttatcaccagcttattggatcagattccagaaatgtttgcagacacaagggaaacagagacagtatttgtaccagttatccaggctggaatggaggctctgaaggctgctgagtgtgcagggaagctctttctattccatacatccctgcccattgcagaggccccagggaaactgaagaacagagatgacaggaagctgatcaatacagacaaggagaagactctgttccagcctcagacaggtgcctatcagaccctggccaaagagtgtgtggcccaaggctgctgtgtagatctctttctcttccctaaccagtggagaacgaccaggagcggttcctgagtgacctgcgtcgtgatgtccagaaggttgttggctttgatgctgtgatgcgggtccggacaagcactggtatccgtgctgtagatttctttggagctttctacatgagcaacacgacagatgtggagctggctgggctagatggggacaaaacagtgactgtggagttcaagcatgacgatcggctcaatgaagagagcggagctctcctgcagtgtgccctgctttacaccagctgtgcagggcagcgtcggctccgcatccataatctggccctgaactgctgcacccagctggctgatctatatcgaaactgtgagactgacacgctcatcaactacatggccaagtttggtgagggtagaagcagggcagggtgggattggggctgagaggtccaggatggtgagtgggtagttgtgatggtgggaatgcacacatgatgggcagctgaccagtgactatctttgctttcccatccagcatatcggggagtcctgaatagccctgtgaaggctgttcgtgacacgctcatcacccagtgtgcccagatcctggcctgttacagaaagaactgtgctagcccctcctctgcaggacagttgatccttcctgagtgcatgaagctactcccagtttacctgaactgtgtgttgaagagtgatgtcctgcagcctggagctgaagtcactactgatgaccgtgcctatgtccgacagctagttacctccatggatgtgactgagaccaatgtcttcttctaccctcggctcttacctttgacaaagtctcccgttgagagtactaccgaaccaccagcagttcgagcctctgaagagcgtctaagcaatggggatatatatttactggagaatgggctcaacctcttcctctgggtgggagcaagcgtccaacagggtgttgtccagagccttttcagcgtctcctccttcagtcagatcaccagtggtttgagtgttctgccagttctggataatccactgtccaagaaggttcgaggcctcattgatagcttacgggcacagagatcccggtacatgaagcttaccgtggtgaaacaggaagacaagatggagatgctgttcaagcacttcctggtggaagacaagagtctgagtgggggagcatcttatgtggactttctctgtcatatgcacaaggagattcggcagctactgagctaaagcaagtgggtaaatggcatagggcccaggctagcttccagaaagcaccccaggatgtcagagaaattgggacagtaacatatcttatgtaagctgacctcagtctctctggggggagggggagatataaggagacaccttctttctgggctcaagtatcctgccactctgtcatgtcctgctgatggaaggtgcccctgttccctcattctaccctctttttcctgctaatcctgtcataatgaatgtagcttctcagttcactgtatatgattcggtattgggggtttggaggcacccagaccctggcaatattatgtgtccctttggaccagtctcccaagaggagaggggcaggcaggaaagagtggggatcctaaggttactacagggggctcagtgtcatccacaacttcctatattagggataaaacatataggtgcacaagagctggggtatagcccataggtggtggagagaaaagtggtcagtccttcttgggcctggaggttagcagtcaagtttctctgctttcactgctcgctcgctctctcctgcaatgattgatgatcactccgtggatagagaggcacactgtcagaggtgaccggagaactgagttgcaaaatatattaagatctggtagaggtaccagcttcctttccagctggagaggccccaacactggatggttctgtagggagcctagggagcctggtcatcaacttgcaatacctcacagagccagttcacatcccactctgagctcccacgagaaacactgcttctccaggcccggggttgttggggagagaggcagaggcagctggagcgccgttctctcctgctgggacaccgcttgggctttggtattgactgagtggctgacagttatcttccaaccccaactggcttgggggcaggacaagggctaggcttgatggtggccaggcttgcctgctccccacctgggatgcccctgctctggacctctcatttctcttcattggtttatttttcaatgcatctttaatttgtaaagaaataaaataaattaagatgtaa

SEQ ID NO: 311596 - DNA, 4361 bp, Homo sapiens
gaaccggaagtggagcctgggagccttgacgttaggaacgaagtctaacctggatctggagccgggtgagatcaaattgggaatgctttcataatgaacgtcaaccagtcagttccacctgtgccaccatttgggcagccccagcccatctacccagggtatcatcagtccagctatggtgggcaatcagggtccacagcccccgccattccctatggagcctacaatggcccagtaccaggctatcagcaaacacctccccaaggtatgtcaagagccccaccttcctcgggggcacctccagcctcaacagcacaggctccttgtggccaggctgcatatggccagtttggccaaggagatgtacagaatgggccaagctccactgttcagatgcaaaggctgcctgggtctcagccatttgggtccccattggcccctgtgggcaaccagccacctgtgcttcagccctatggccctcccccgacaagtgcacaggtggctacgcagctgtctggaatgcagatcagcggtgctgtggccccagcccctccttcttcagggctgggctttggcccaccaacatcgctggcttcagcctcaggaagtttccctaactctggtctgtatggctcctatcctcagggccaggctcctccccttagccaggcccaaggtcatcctgggatccagactccccagcgatctgccccatcacaggcctccagcttcacacccccagcttcagggggtcctcggctgccttcgatgactggtccactcctgcctggacagagttttggagggccctcagtgagccagcccaaccatgtgtcttcacctcctcaagctctgccccctggcacccagatgactgggcccctgggaccactgccacctatgcactccccgcagcagccaggctatcagccccaacaaaatggttccttcggaccagcccggggccctcagtctaattatggaggcccctacccagcagcacccacctttggcagtcagcctgggcctcctcagccactgcctcctaagcgcctggaccctgatgccatcccaagccctattcaggtcattgaagatgacaggaacaaccggggtacagagccatttgttactggagtacggggccaggtgccacccttagtcactaccaacttcctggtgaaagaccaagggaatgcaagtccccgatacatccgatgtacatcctataatatcccttgcacatctgacatggctaagcaggctcaggtgcccctggcagcagtcatcaaaccgctggcaaggctgcccccagaggaggcttcaccgtatgttgtggaccatggggaatctggccctttgcgctgcaaccgctgcaaagcatacatgtgtcccttcatgcagttcattgaaggagggaggcgtttccagtgctgtttttgcagctgtatcaatgatgttcccccccagtattttcagcacctggatcataccggcaaacgtgtggatgcttatgaccgccctgagctatccctgggctcttatgaattcttggccactgtagattactgcaagaacaataagttccccagccctcctgcctttatcttcatgattgacgtctcctacaatgccatcaggactggtcttgttaggctcctctgtgaggagctcaagtcactgttagactttctacctagggagggtggggcagaagagtcagcaatccgcgttggctttgtcacctacaataaggtgctccacttctataatgtgaagagctcattggcccagccacagatgatggttgtgtctgatgtggctgacatgtttgtgccactgctggatggcttcctggtcaacgtcaatgagtctcgggcagttatcaccagcttattggatcagattccagaaatgtttgcagacacaagggaaacagagacagtatttgtaccagttatccaggctggaatggaggctctgaaggctgctgagtgtgcagggaagctctttctattccatacatccctgcccattgcagaggccccagggaaactgaagaacagagatgacaggaagctgatcaatacagacaaggagaagactctgttccagcctcagacaggtgcctatcagaccctggccaaagagtgtgtggcccaaggctgctgtgtagatctctttctcttccctaaccagtatgtggatgtggccacactctctgttgtgccccagctcactggtggctctgtctacaaatatgcttcctttcaggtggagaacgaccaggagcggttcctgagtgacctgcgtcgtgatgtccagaaggttgttggctttgatgctgtgatgcgggtccggacaagcactggtatccgtgctgtagatttctttggagctttctacatgagcaacacgacagatgtggagctggctgggctagatggggacaaaacagtgactgtggagttcaagcatgacgatcggctcaatgaagagagcggagctctcctgcagtgtgccctgctttacaccagctgtgcagggcagcgtcggctccgcatccataatctggccctgaactgctgcacccagctggctgatctatatcgaaactgtgagactgacacgctcatcaactacatggccaagtttgcatatcggggagtcctgaatagccctgtgaaggctgttcgtgacacgctcatcacccagtgtgcccagatcctggcctgttacagaaagaactgtgctagcccctcctctgcaggacagttgatccttcctgagtgcatgaagctactcccagtttacctgaactgtgtgttgaagagtgatgtcctgcagcctggagctgaagtcactactgatgaccgtgcctatgtccgacagctagttacctccatggatgtgactgagaccaatgtcttcttctaccctcggctcttacctttgacaaagtctcccgttgagagtactaccgaaccaccagcagttcgagcctctgaagagcgtctaagcaatggggatatatatttactggagaatgggctcaacctcttcctctgggtgggagcaagcgtccaacagggtgttgtccagagccttttcagcgtctcctccttcagtcagatcaccagtggtttgagtgttctgccagttctggataatccactgtccaagaaggttcgaggcctcattgatagcttacgggcacagagatcccggtacatgaagcttaccgtggtgaaacaggaagacaagatggagatgctgttcaagcacttcctggtggaagacaagagtctgagtgggggagcatcttatgtggactttctctgtcatatgcacaaggagattcggcagctactgagctaaagcaagtgggtaaatggcatagggcccaggctagcttccagaaagcaccccaggatgtcagagaaattgggacagtaacatatcttatgtaagctgacctcagtctctctggggggagggggagatataaggagacaccttctttctgggctcaagtatcctgccactctgtcatgtcctgctgatggaaggtgcccctgttccctcattctaccctctttttcctgctaatcctgtcataatgaatgtagcttctcagttcactgtatatgattcggtattgggggtttggaggcacccagaccctggcaatattatgtgtccctttggaccagtctcccaagaggagaggggcaggcaggaaagagctggggtatagcccataggtggtggagagaaaagtggtcagtccttcttgggcctggaggttagcagtcaagtttctctgctttcactgctcgctcgctctctcctgcaatgattgatgatcactccgtggatagagaggcacactgtcagaggtgaccggagaactgagttgcaaaatatattaagatctggtagaggtaccagcttcctttccagctggagaggccccaacactggatggttctgtagggagcctagggagcctggtcatcaacttgcaatacctcacagagccagttcacatcccactctgagctcccacgagaaacactgcttctccaggcccggggttgttggggagagaggcagaggcagctggagcgccgttctctcctgctgggacaccgcttgggctttggtattgactgagtggctgacagttatcttccaaccccaactggcttgggggcaggacaagggctaggcttgatggtggccaggcttgcctgctccccacctgggatgcccctgctctggacctctcatttctcttcattggtttatttttcaatgcatctttaatttgtaaagaaataaaataaattaagatgtaa

SEQ ID NO: 311597 - DNA, 4945 bp, Homo sapiens
gaaccggaagtggagcctgggagccttgacgttaggaacgaagtctaacctggatctggagccgggtgagatcaaattgggaatgctttcataatgaacgtcaaccagtcagttccacctgtgccaccatttgggcagccccagcccatctacccagggtatcatcagtccagctatggtgggcaatcagggtccacagcccccgccattccctatggagcctacaatggcccagtaccaggctatcagcaaacacctccccaaggtatgtcaagagccccaccttcctcgggggcacctccagcctcaacagcacaggctccttgtggccaggctgcatatggccagtttggccaaggagatgtacagaatgggccaagctccactgttcagatgcaaaggctgcctgggtctcagccatttgggtccccattggcccctgtgggcaaccagccacctgtgcttcagccctatggccctcccccgacaagtgcacaggtggctacgcagctgtctggaatgcagatcagcggtgctgtggccccagcccctccttcttcagggctgggctttggcccaccaacatcgctggcttcagcctcaggaagtttccctaactctggtctgtatggctcctatcctcagggccaggctcctccccttagccaggcccaaggtcatcctgggatccagactccccagcgatctgccccatcacaggcctccagcttcacacccccagcttcagggggtcctcggctgccttcgatgactggtccactcctgcctggacagagttttggagggccctcagtgagccagcccaaccatgtgtcttcacctcctcaagctctgccccctggcacccagatgactgggcccctgggaccactgccacctatgcactccccgcagcagccaggctatcagccccaacaaaatggttccttcggaccagcccggggccctcagtctaattatggaggcccctacccagcagcacccacctttggcagtcagcctgggcctcctcagccactgcctcctaagcgcctggaccctgatgccatcccaagccctattcaggtcattgaagatgacaggaacaaccggggtacagagccatttgttactggagtacggggccaggtgccacccttagtcactaccaacttcctggtgaaagaccaagggaatgcaagtccccgatacatccgatgtacatcctataatatcccttgcacatctgacatggctaagcaggctcaggtgcccctggcagcagtcatcaaaccgctggcaaggctgcccccagaggaggcttcaccgtatgttgtggaccatggggaatctggccctttgcgctgcaaccgctgcaaagcatacatgtgtcccttcatgcagttcattgaaggagggaggcgtttccagtgctgtttttgcagctgtatcaatgatgttcccccccagtattttcagcacctggatcataccggcaaacgtgtggatgcttatgaccgccctgagctatccctgggctcttatgaattcttggccactgtagattactgcaagaacaataagttccccagccctcctgcctttatcttcatgattgacgtctcctacaatgccatcaggactggtcttgttaggctcctctgtgaggagctcaagtcactgttagactttctacctagggagggtggggcagaagagtcagcaatccgcgttggctttgtcacctacaataaggtgctccacttctataatgtgaagagctcattggcccagccacagatgatggttgtgtctgatgtggctgacatgtttgtgccactgctggatggcttcctggtcaacgtcaatgagtctcgggcagttatcaccagcttattggatcagattccagaaatgtttgcagacacaagggaaacagagacagtatttgtaccagttatccaggctggaatggaggctctgaaggctgctgagtgtgcagggaagctctttctattccatacatccctgcccattgcagaggccccagggaaactgaagaacagagatgacaggaagctgatcaatacagacaaggagaagactctgttccagcctcagacaggtgcctatcagaccctggccaaagagtgtgtggcccaaggctgctgtgtagatctctttctcttccctaaccagtatgtggatgtggccacactctctgttgtgccccagctcactggtggctctgtctacaaatatgcttcctttcaggtggagaacgaccaggagcggttcctgagtgacctgcgtcgtgatgtccagaaggttgttggctttgatgctgtgatgcgggtccggacaagcactggtatccgtgctgtagatttctttggagctttctacatgagcaacacgacagatgtggagctggctgggctagatggggacaaaacagtgactgtggagttcaagcatgacgatcggctcaatgaagagagcggagctctcctgcagtgtgccctgctttacaccagctgtgcagggcagcgtcggctccgcatccataatctggccctgaactgctgcacccagctggctgatctatatcgaaactgtgagactgacacgctcatcaactacatggccaagtttgcatatcggggagtcctgaatagccctgtgaaggctgttcgtgacacgctcatcacccagtgtgcccagatcctggcctgttacagaaagaactgtgctagcccctcctctgcaggacagttgatccttcctgagtgcatgaagctactcccagtttacctgaactgtgtgttgaagagtgatgtcctgcagcctggagctgaagtcactactgatgaccgtgcctatgtccgacagctagttacctccatggatgtgactgagaccaatgtcttcttctaccctcggctcttacctttggtgcgattgagggttggagtatgagatcttgcacggagcaaagggcctcttaggaggaggaaaggataggctagtatcagtcagacactagtggaatttgtttttatgtattttagctgatgtaattttcacactgagagagttactgagaccccagaaggggtggtgtctgaggacttagctttcaaaattttgtgtgtggtgcgggggggcagacttgtcttatggtccttggtaaccttttgctcccttccttttgtctagacaaagtctcccgttgagagtactaccgaaccaccagcagttcgagcctctgaagagcgtctaagcaatggggatatatatttactggagaatgggctcaacctcttcctctgggtgggagcaagcgtccaacagggtgttgtccagagccttttcagcgtctcctccttcagtcagatcaccagtggtttggtgagggcagggagtcaaggagaatatgggtgtggaagtatactttgtgaaacaattgggagccaatatagttagtgtgctagtaccctcaaatatcagggaacacttggggacaagggcagttgctgtcattcttcccaggtttgcctgtttcagatgatgcatacatgtatgctgccccaccttgactgaactcagagtgccttaccataaggataaatgaattttgtgttctagagtgttctgccagttctggataatccactgtccaagaaggttcgaggcctcattgatagcttacgggcacagagatcccggtacatgaagcttaccgtggtgaaacaggaagacaagatggagatgctgttcaagcacttcctggtggaagacaagagtctgagtgggggagcatcttatgtggactttctctgtcatatgcacaaggagattcggcagctactgagctaaagcaagtgggtaaatggcatagggcccaggctagcttccagaaagcaccccaggatgtcagagaaattgggacagtaacatatcttatgtaagctgacctcagtctctctggggggagggggagatataaggagacaccttctttctgggctcaagtatcctgccactctgtcatgtcctgctgatggaaggtgcccctgttccctcattctaccctctttttcctgctaatcctgtcataatgaatgtagcttctcagttcactgtatatgattcggtattgggggtttggaggcacccagaccctggcaatattatgtgtccctttggaccagtctcccaagaggagaggggcaggcaggaaagagtggggatcctaaggttactacagggggctcagtgtcatccacaacttcctatattagggataaaacatataggtgcacaagagctggggtatagcccataggtggtggagagaaaagtggtcagtccttcttgggcctggaggttagcagtcaagtttctctgctttcactgctcgctcgctctctcctgcaatgattgatgatcactccgtggatagagaggcacactgtcagaggtgaccggagaactgagttgcaaaatatattaagatctggtagaggtaccagcttcctttccagctggagaggccccaacactggatggttctgtagggagcctagggagcctggtcatcaacttgcaatacctcacagagccagttcacatcccactctgagctcccacgagaaacactgcttctccaggcccggggttgttggggagagaggcagaggcagctggagcgccgttctctcctgctgggacaccgcttgggctttggtattgactgagtggctgacagttatcttccaaccccaactggcttgggggcaggacaagggctaggcttgatggtggccaggcttgcctgctccccacctgggatgcccctgctctggacctctcatttctcttcattggtttatttttcaatgcatctttaatttgtaaagaaataaaataaattaagatgtaa

SEQ ID NO: 311598 - DNA, 1833 bp, Homo sapiens
  misc_feature (39)..(39): n is a, c, g, or t
gaacatcgagctcgcaccctgccatttactccatggccnagtttgcatatcggggagtcctgaatagccctgtgaaggctgttcgtgacacgctcatcacccagtgtgcccagatcctggcctgttacagaaagaactgtgctagcccctcctctgcaggacagttgatccttcctgagtgcatgaagctactcccagtttacctgaactgtgtgttgaagagtgatgtcctgcagcctggagctgaagtcactactgatgaccgtgcctatgtccgacagctagttacctccatggatgtgactgagaccaatgtcttcttctaccctcggctcttacctttgacaaagtctcccgttgagagtactaccgaaccaccagcagttcgagcctctgaagagcgtctaagcaatggggatatatatttactggagaatgggctcaacctcttcctctgggtgggagcaagcgtccaacagggtgttgtccagagccttttcagcgtctcctccttcagtcagatcaccagtggtttgagtgttctgccagttctggataatccactgtccaagaaggttcgaggcctcattgatagcttacgggcacagagatcccggtacatgaagcttaccgtggtgaaacaggaagacaagatggagatgctgttcaagcacttcctggtggaagacaagagtctgagtgggggagcatcttatgtggactttctctgtcatatgcacaaggagattcggcagctactgagctaaagcaagtgggtaaatggcatagggcccaggctagcttccagaaagcaccccaggatgtcagagaaattgggacagtaacatatcttatgtaagctgacctcagtctctctggggggagggggagatataaggagacaccttctttctgggctcaagtatcctgccactctgtcatgtcctgctgatggaaggtgcccctgttccctcattctaccctctttttcctgctaatcctgtcataatgaatgtagcttctcagttcactgtatatgattcggtattgggggtttggaggcacccagaccctggcaatattatgtgtccctttggaccagtctcccaagaggagaggggcaggcaggaaagagtggggatcctaaggttactacagggggctcagtgtcatccacaacttcctatattagggataaaacatataggtgcacaagagctggggtatagcccataggtggtggagagaaaagtggtcagtccttcttgggcctggaggttagcagtcaagtttctctgctttcactgctcgctcgctctctcctgcaatgattgatgatcactccgtggatagagaggcacactgtcagaggtgaccggagaactgagttgcaaaatatattaagatctggtagaggtaccagcttcctttccagctggagaggccccaacactggatggttctgtagggagcctagggagcctggtcatcaacttgcaatacctcacagagccagttcacatcccactctgagctcccacgagaaacactgcttctccaggcccggggttgttggggagagaggcagaggcagctggagcgccgttctctcctgctgggacaccgcttgggctttggtattgactgagtggctgacagttatcttccaaccccaactggcttgggggcaggacaagggctaggcttgatggtggccaggcttgcctgctccccacctgggatgcccctgctctggacctctcatttctcttcattggtttatttttcaatgcatctttaatttgtaaagaaataaaataaattaagatgtaa

SEQ ID NO: 311599 - DNA, 1775 bp, Homo sapiens
tattgacaaggagttcgtgacatgctcttcaacctgtgtgccctggtgcctgggctgcttacaagactagtaactgctagctaaccgctcctctgtcccggagagtcctaccctagctgagcggctggcgtgcctcccagtttacctgaactgtgtgttgaagagtgatgtcctgcagcctggagctgaagtcactactgatgaccgtgcctatgtccgacagctagttacctccatggatgtgactgagaccaatgtcttcttctaccctcggctcttacctttgacaaagtctcccgttgagagtactaccgaaccaccagcagttcgagcctctgaagagcgtctaagcaatggggatatatatttactggagaatgggctcaacctcttcctctgggtgggagcaagcgtccaacagggtgttgtccagagccttttcagcgtctcctccttcagtcagatcaccagtggtttgagtgttctgccagttctggataatccactgtccaagaaggttcgaggcctcattgatagcttacgggcacagagatcccggtacatgaagcttaccgtggtgaaacaggaagacaagatggagatgctgttcaagcacttcctggtggaagacaagagtctgagtgggggagcatcttatgtggactttctctgtcatatgcacaaggagattcggcagctactgagctaaagcaagtgggtaaatggcatagggcccaggctagcttccagaaagcaccccaggatgtcagagaaattgggacagtaacatatcttatgtaagctgacctcagtctctctggggggagggggagatataaggagacaccttctttctgggctcaagtatcctgccactctgtcatgtcctgctgatggaaggtgcccctgttccctcattctaccctctttttcctgctaatcctgtcataatgaatgtagcttctcagttcactgtatatgattcggtattgggggtttggaggcacccagaccctggcaatattatgtgtccctttggaccagtctcccaagaggagaggggcaggcaggaaagagtggggatcctaaggttactacagggggctcagtgtcatccacaacttcctatattagggataaaacatataggtgcacaagagctggggtatagcccataggtggtggagagaaaagtggtcagtccttcttgggcctggaggttagcagtcaagtttctctgctttcactgctcgctcgctctctcctgcaatgattgatgatcactccgtggatagagaggcacactgtcagaggtgaccggagaactgagttgcaaaatatattaagatctggtagaggtaccagcttcctttccagctggagaggccccaacactggatggttctgtagggagcctagggagcctggtcatcaacttgcaatacctcacagagccagttcacatcccactctgagctcccacgagaaacactgcttctccaggcccggggttgttggggagagaggcagaggcagctggagcgccgttctctcctgctgggacaccgcttgggctttggtattgactgagtggctgacagttatcttccaaccccaactggcttgggggcaggacaagggctaggcttgatggtggccaggcttgcctgctccccacctgggatgcccctgctctggacctctcatttctcttcattggtttatttttcaatgcatctttaatttgtaaagaaataaaataaattaagatgtaa

SEQ ID NO: 311600 - DNA, 1351 bp, Homo sapiens
ctccataatgtgtgcccatatgtctcctccttcagtcagatcaccagtggtttgagtgttctgccagttctggataatccactgtccaagaaggttcgaggcctcattgatagcttacgggcacagagatcccggtacatgaagcttaccgtggtgaaacaggaagacaagatggagatgctgttcaagcacttcctggtggaagacaagagtctgagtgggggagcatcttatgtggactttctctgtcatatgcacaaggagattcggcagctactgagctaaagcaagtgggtaaatggcatagggcccaggctagcttccagaaagcaccccaggatgtcagagaaattgggacagtaacatatcttatgtaagctgacctcagtctctctggggggagggggagatataaggagacaccttctttctgggctcaagtatcctgccactctgtcatgtcctgctgatggaaggtgcccctgttccctcattctaccctctttttcctgctaatcctgtcataatgaatgtagcttctcagttcactgtatatgattcggtattgggggtttggaggcacccagaccctggcaatattatgtgtccctttggaccagtctcccaagaggagaggggcaggcaggaaagagtggggatcctaaggttactacagggggctcagtgtcatccacaacttcctatattagggataaaacatataggtgcacaagagctggggtatagcccataggtggtggagagaaaagtggtcagtccttcttgggcctggaggttagcagtcaagtttctctgctttcactgctcgctcgctctctcctgcaatgattgatgatcactccgtggatagagaggcacactgtcagaggtgaccggagaactgagttgcaaaatatattaagatctggtagaggtaccagcttcctttccagctggagaggccccaacactggatggttctgtagggagcctagggagcctggtcatcaacttgcaatacctcacagagccagttcacatcccactctgagctcccacgagaaacactgcttctccaggcccggggttgttggggagagaggcagaggcagctggagcgccgttctctcctgctgggacaccgcttgggctttggtattgactgagtggctgacagttatcttccaaccccaactggcttgggggcaggacaagggctaggcttgatggtggccaggcttgcctgctccccacctgggatgcccctgctctggacctctcatttctcttcattggtttatttttcaatgcatctttaatttgtaaagaaataaaataaattaagatgtaa

SEQ ID NO: 311601 - DNA, 770 bp, Homo sapiens
gaaccggaagtggagcctgggagccttgacgttaggaacgaagtctaacctggatctggagccgggtgagatcaaattgggaatgctttcataatgaacgtcaaccagtcagttccacctgtgccaccatttgggcagccccagcccatctacccagggtatcatcagtccagctatggtgggcaatcagggtccacagcccccgccattccctatggagcctacaatggcccagtaccaggctatcagcaaacacctccccaaggtatgtcaagagccccaccttcctcgggggcacctccagcctcaacagcacaggctccttgtggccaggctgcatatggccagtttggccaaggagatgtacagaatgggccaagctccactgttcagatgcaaaggctgcctgggtctcagccatttgggtccccattggcccctgtgggcaaccagccacctgtgcttcagccctatggccctcccccgacaagtgcacaggtggctacgcagctgtctggaatgcagaggcagctggagcgccgttctctcctgctgggacaccgcttgggctttggtattgactgagtggctgacagttatcttccaaccccaactggcttgggggcaggacaagggctaggcttgatggtggccaggcttgcctgctccccacctgggatgcccctgctctggacctctcatttctcttcattggtttatttttcaatgcatctttaatttgtaaagaaataaaataaattaagatgtaa

SEQ ID NO: 311602 - DNA, 769 bp, Homo sapiens
gaaccggaagtggagcctgggagccttgacgttaggaacgaagtctaacctggatctggagccgggtgagatcaaattgggaatgctttcataatgaacgtcaaccagtcagttccacctgtgccaccatttgggcagccccagcccatctacccagggtatcatcagtccagctatggtgggcaatcagggtccacagcccccgccattccctatggagcctacaatggcccagtaccaggctatcagcaaacacctccccaaggtatgtcaagagccccaccttcctcgggggcacctccagcctcaacagcacaggctccttgtggccaggctgcatatggccagtttggccaaggagatgtacagaatgggccaagctccactgttcagatgcaaaggttacaggtactgctgacgtccagccctgtggattattgacccatcttagtacctgggttcctttgcatattcttcattttctgtgaacttgagtttcttgctttactagacatacatcttcaataatggttgcagtcctgttgagactaccctaagggagaaatgggaagaggaaacttcaggattatttgcatctcttttgacttgcccctttcctctagaacaggcacttagtaggactgattggttaagtttgggcatggccagttatgaactgaaagatactaaaagggaaaccacataaatggtgaaaacttcagtggtacagtgacccaataaacccatcttagcatgaaagtccattaaa

SEQ ID NO: 311603 - DNA, 402 bp, Homo sapiens
cttgtagaaatggttataaacccatatattcaccagttaccccagtaactcctggtacaccaggaaataccatgcactttgaggtgagaaattttaatggagaaaaaaaaattcaacacttggggggatggaatttcttttaagagctctttcccctcctttaacaactagtgtgctgagaatacaaaaaaaaggttgtaagaaactaaaaatcagaaaaattcatttatatgaatttagatgtttttatttttactaaaatgagcataactttcatcttgttgatatacacagtagactaaatgtgtgtatctaattgatcttaaagcagtcttatttggggaatggaaataaacaggaaacaagatctaaaactaaagtctgtatatttttcattttgtt

SEQ ID NO: 311604 - DNA, 1702 bp, Homo sapiens
  misc_feature (1699)..(1699): n is a, c, g, or t
cttgtagaaatggttataaacccatatattcaccagttaccccagtaactcctggtacaccaggaaataccatgcactttgagaatatttcttccccagaaagttctccagaaataaagagacgcacttatagtcaagaggtaagaagttaacttaaaaagggtgaattggtagtttttttcctattacattgttttccttaaattactggtaaattttgaaataaacagtcccaagatgtgattatttgtgtaatttttttttttaatttgtaaacagggatatgacagatcttcaaccatgttaacattggggccttttagaaattctaatttaactgaactgggtctgcaagaaataaagactattggttatacgagccctaggagtaggactgaagtcaacaggcagtgtcctggagaaaaggaacctgtgtcagaccttcagctaggactcgatgcagttgagccaactgccctacataaaaccctggaaacgcctgcacatgacagggctgagcccaacagccaactggactcgactcactctggacggggcacaatgtattcttcctgggtaaagagccctgacagaacaggagttaacttctcagtgaactccaacttgagggacctgacaccctcgcatcagttggaggttggaggaggcttccgaataagtgagtcaaagtgcctgatgcaggatgatactagaggcatgtttatggaaacaactgtgttttgtacttccgaagatgggcttgtatctggtttcggacggactgttaatgacaatttgatcgacgggaattgcacaccccagaatccaccacaaaagaaaaaggtttctctattagaataccgtaagagacaacgtgaagctaggaaaagtggctctaagacagagaactttccactcattagtgtatcaccccatgcaagtggaagcttgagcaacaatggtgatggctgtgccagcagtaatgacaatggggagcaggtggaccacactgctagcctacctttaccaacaccagctacagtttataatgccacttctgaagaaactagcaataactgccctgttaaggatgctactgctagtgagaagaatgaaccagaagttcaatggtaagcccattgtgaagtatgctactctggaaaaaacaagcttttgttcaagtattcttcctatttgttgttctcccaaggctaagctgatagtgcttcgtggtcacaattttaaaagattctctctgctaataggattttaagccagctgtgtatggcctgtgttcttaaatgtcgattgtatttattccttggtaatttattcatactttacacacacatatcctctccaaagaatttttatcagattcaacaattctgcagacttcctttataacccctaccagttaccttgaaagaacaaccagggttagtgcttcttcagaaggaataggagcagctgcatataggatggatcttggcaaatggcaggcagccacactcactttgctccttggtcccctttccacctgaaagcatgcaatcctgatagcagtttgttaggggcatgttttggtacctttggtaacctgaagtgacattctcaatgtcaatatattatcttcaactccttgccttcttttcaccaataaattgctggagacaaaggaattgagtccttcaaatanagg

SEQ ID NO: 311605 - DNA, 2409 bp, Homo sapiens
cttgtagaaatggttataaacccatatattcaccagttaccccagtaactcctggtacaccaggaaataccatgcactttgagaatatttcttccccagaaagttctccagaaataaagagacgcacttatagtcaagaggtaagaagttaacttaaaaagggtgaattggtagtttttttcctattacattgttttccttaaattactggtaaattttgaaataaacagtcccaagatgtgattatttgtgtaatttttttttttaatttgtaaacagggatatgacagatcttcaaccatgttaacattggggccttttagaaattctaatttaactgaactgggtctgcaagaaataaagactattggttatacgagccctaggagtaggactgaagtcaacaggcagtgtcctggagaaaaggaacctgtgtcagaccttcagctaggactcgatgcagttgagccaactgccctacataaaaccctggaaacgcctgcacatgacagggctgagcccaacagccaactggactcgactcactctggacggggcacaatgtattcttcctgggtaaagagccctgacagaacaggagttaacttctcagtgaactccaacttgagggacctgacaccctcgcatcagttggaggttggaggaggcttccgaataagtgagtcaaagtgcctgatgcaggatgatactagaggcatgtttatggaaacaactgtgttttgtacttccgaagatgggcttgtatctggtttcggacggactgttaatgacaatttgatcgacgggaattgcacaccccagaatccaccacaaaagaaaaaggtttctctattagaataccgtaagagacaacgtgaagctaggaaaagtggctctaagacagagaactttccactcattagtgtatcaccccatgcaagtggaagcttgagcaacaatggtgatggctgtgccagcagtaatgacaatggggagcaggtggaccacactgctagcctacctttaccaacaccagctacagtttataatgccacttctgaagaaactagcaataactgccctgttaaggatgctactgctagtgagaagaatgaaccagaagttcaatggactgcctcaacttcagtggaacaagtcagagaaaggagttatcagagagctttacttctcagtgatcaccgaaaagataaagatagtgggggagaatcaccatgtgtctcatgttcaccgagtcatgttcagtcttcaccttcatctcattcaaatcacataccccagttgcaagctaagggcccagtcccttctttcagtgaacttatggaagaccctgatcctgaaaatccagaacccacaactacgaatgaatgtccatccccagatacttctcaaaatacttgtaaaagtcctccaaaaatgagcaagcctggttcacctggatctgtaattcctgctcaagcacacgggaaaatattcacaaaaccagatccccaatgggactccacagttagtgcatccgaagctgaaaatggtgttcacctaaaaacagagctccaacaaaaacagctatcaaataacaaccaagcactttcaaagaatcatcctcctcagacacacgttcgtaattcatctgagcaactttcacaaaagctgccttctgtgccaacaaagttgcactgtcctccatcacctcacctagaaaatcctccaaagtcatccacgcctcacacacctgtacagcatggttatctttcaccaaagcctccttcacagcagttaggatctccctacaggcctcatcattcacagtcacctcaagttggaacacctcagcgagagcctcaaagaaacttttatccagcagcacagaaccttccagccaatactcagcaggcaacttctggaacattatttacacagacaccctcaggacaatcttcagcaacatacagtcagtttaaccaacaaagtctgaacagcacggcaccaccccctccacctcctccacctccttcttcgtcttactatcaaaaccagcagccctctgcaaactttcagaattataatcagctcaaaggtagtctttctcaacaaactgtgtttacatcaggaccaaatcaagcacttcctggcaccacaagccagcaaacagttccaggacaccacgtgactccagggcattttttgccctctcagaaccctaccattcaccatcaaactgctgctgccgtagtcccccctcctcctccaccaccacctgctccaggaccgcaccttgtacaacagccgaattcccatcagcaacactctgtagcacatgtagtagggcctgttcatgcggtcacccctgggtcgcatattcattctcaaactgctggacaccacttaccc

SEQ ID NO: 311606 - DNA, 1967 bp, Homo sapiens
cttgtagaaatggttataaacccatatattcaccagttaccccagtaactcctggtacaccaggaaataccatgcactttgagaatatttcttccccagaaagttctccagaaataaagagacgcacttatagtcaagaggtaagaagttaacttaaaaagggtgaattggtagtttttttcctattacattgttttccttaaattactggtaaattttgaaataaacagtcccaagatgtgattatttgtgtaatttttttttttaatttgtaaacagggatatgacagatcttcaaccatgttaacattggggccttttagaaattctaatttaactgaactgggtctgcaagaaataaagactattggttatacgagccctaggagtaggactgaagtcaacaggcagtgtcctggagaaaaggaacctgtgtcagaccttcagctaggactcgatgcagttgagccaactgccctacataaaaccctggaaacgcctgcacatgacagggctgagcccaacagccaactggactcgactcactctggacggggcacaatgtattcttcctgggtaaagagccctgacagaacaggagttaacttctcagtgaactccaacttgagggacctgacaccctcgcatcagttggaggttggaggaggcttccgaataagtgagtcaaagtgcctgatgcaggatgatactagaggcatgtttatggaaacaactgtgttttgtacttccgaagatgggcttgtatctggtttcggacggactgttaatgacaatttgatcgacgggaattgcacaccccagaatccaccacaaaagaaaaaggtttctctattagaataccgtaagagacaacgtgaagctaggaaaagtggctctaagacagagaactttccactcattagtgtatcaccccatgcaagtggaagcttgagcaacaatggtgatggctgtgccagcagtaatgacaatggggagcaggtggaccacactgctagcctacctttaccaacaccagctacagtttataatgccacttctgaagaaactagcaataactgccctgttaaggatgctactgctagtgagaagaatgaaccagaagttcaatggactgcctcaacttcagtggaacaagtcagagaaaggagttatcagagagctttacttctcagtgatcaccgaaaagataaagatagtgggggagaatcaccatgtgtctcatgttcaccgagtcatgttcagtcttcaccttcatctcattcaaatcacataccccagttgcaagctaagggcccagtcccttctttcagtgaacttatggaagaccctgatcctgaaaatccagaacccacaactacgaatgaatgtccatccccagatacttctcaaaatacttgtaaaagtcctccaaaaatgagcaagcctggttcacctggatctgtaattcctgctcaagcacacgggaaaatattcacaaaaccagatccccaatgggactccacagttagtgcatccgaagctgaaaatggtgttcacctaaaaacagagctccaacaaaaacagctatcaaataacaaccaagcactttcaaagaatcatcctcctcagacacacgttcgtaattcatctgagcaactttcacaaaagctgccttctgtgccaacaaagttgcactgtcctccatcacctcacctagaaaatcctccaaagtcatccacgcctcacacacctgtacagcatggttatctttcaccaaagcctccttcacagcagttaggatctccctacaggcctcatcattcacagtcacctcaagttggaacatatgaagaagggaggtgacagctgaagtcctcatctttaggggggctgccttcaagcaaggttagaagaaggagtggagggttacgatgatgtacaaccattcaggatatgatctggctatg

SEQ ID NO: 311607 - DNA, 1917 bp, Homo sapiens
cttgtagaaatggttataaacccatatattcaccagttaccccagtaactcctggtacaccaggaaataccatgcactttgagaatatttcttccccagaaagttctccagaaataaagagacgcacttatagtcaagaggtaagaagttaacttaaaaagggtgaattggtagtttttttcctattacattgttttccttaaattactggtaaattttgaaataaacagtcccaagatgtgattatttgtgtaatttttttttttaatttgtaaacagggatatgacagatcttcaaccatgttaacattggggccttttagaaattctaatttaactgaactgggtctgcaagaaataaagactattggttatacgagccctaggagtaggactgaagtcaacaggcagtgtcctggagaaaaggaacctgtgtcagaccttcagctaggactcgatgcagttgagccaactgccctacataaaaccctggaaacgcctgcacatgacagggctgagcccaacagccaactggactcgactcactctggacggggcacaatgtattcttcctgggtaaagagccctgacagaacaggagttaacttctcagtgaactccaacttgagggacctgacaccctcgcatcagttggaggttggaggaggcttccgaataagtgagtcaaagtgcctgatgcaggatgatactagaggcatgtttatggaaacaactgtgttttgtacttccgaagatgggcttgtatctggtttcggacggactgttaatgacaatttgatcgacgggaattgcacaccccagaatccaccacaaaagaaaaaggtttctctattagaataccgtaagagacaacgtgaagctaggaaaagtggctctaagacagagaactttccactcattagtgtatcaccccatgcaagtggaagcttgagcaacaatggtgatggctgtgccagcagtaatgacaatggggagcaggtggaccacactgctagcctacctttaccaacaccagctacagtttataatgccacttctgaagaaactagcaataactgccctgttaaggatgctactgctagtgagaagaatgaaccagaagttcaatggactgcctcaacttcagtggaacaagtcagagaaaggagttatcagagagctttacttctcagtgatcaccgaaaagataaagatagtgggggagaatcaccatgtgtctcatgttcaccgagtcatgttcagtcttcaccttcatctcattcaaatcacataccccagttgcaagctaagggcccagtcccttctttcagtgaacttatggaaggtcagtaagcagatgaccgataatgttattcttaacaaattttaaaatcagacaagagagcctttataaaaagttggtttggatagtagaatgtatgttgctttgtggtgttaaaacaggtgtttattgtgtaattttatacttactataggtttcttctgctttatagaccctgatcctgaaaatccagaacccacaactacgaatgaatgtccatccccagatacttctcaaaatacttgtaaaagtcctccaaaaatgagcaaggtaataacattgacctttcgatgggttccaaaggactttaggttgagtgcagaaaagctgatggttataatatgcagtgtttttctgctgtatcaagtatcaacttgtgacttctggacacttttcctgtcagaaatactcaattgtgtttactactgtttgttcttcttactgaacatgtgatggataactctgaccaaacattcaagttttctaagcacacttcaacagcttacattttcttcaaatgttccacctctattctagtggtgtccaggaaattcatagccttgtcatgaaattct

SEQ ID NO: 311608 - DNA, 1863 bp, Homo sapiens
aactggttgtccaaaaaagaaacttagttccaccttaaatttgggcccctacaatccagcctgagccacagagcgacactttgcctccaaaaaaaaaaaaaaaaaaaatggatatcatcattattttaacatctacaaaaccaacaaaatgtgccctgccaagattaactattttcaaaggttaacaccaaagtattttcccagtagatcaaaagccttggtctgacagtacatgttgactatgaagcaacaatgtaactagcagtagtttctttcaatagaggataatgtgatttttctttgaaaggactgcctcaacttcagtggaacaagtcagagaaaggagttatcagagagctttacttctcagtgatcaccgaaaagataaagatagtggtaagtgagcttgttccttcaccagaaagtggaatcagttaatcactctgcatcctcgttctttgcagctctaatgttctctttgggtctgctctgcttcatctctagggggagaatcaccatgtgtctcatgttcaccgagtcatgttcagtcttcaccttcatctcattcaaatcacataccccagttgcaagctaagggcccagtcccttctttcagtgaacttatggaaggtcagtaagcagatgaccgataatgttattcttaacaaattttaaaatcagacaagagagcctttataaaaagttggtttggatagtagaatgtatgttgctttgtggtgttaaaacaggtgtttattgtgtaattttatacttactataggtttcttctgctttatagaccctgatcctgaaaatccagaacccacaactacgaatgaatgtccatccccagatacttctcaaaatacttgtaaaagtcctccaaaaatgagcaagcctggttcacctggatctgtaattcctgctcaagcacacgggaaaatattcacaaaaccagatccccaatgggactccacagttagtgcatccgaagctgaaaatggtgttcacctaaaaacagagctccaacaaaaacagctatcaaataacaaccaagcactttcaaagaatcatcctcctcagacacacgttcgtaattcatctgagcaactttcacaaaagctgccttctgtgccaacaaagttgcactgtcctccatcacctcacctagaaaatcctccaaagtcatccacgcctcacacacctgtacagcatggttatctttcaccaaagcctccttcacagcagttaggatctccctacaggcctcatcattcacagtcacctcaagttggaacacctcagcgagagcctcaaagaaacttttatccagcagcacagaaccttccagccaatactcagcaggcaacttctggaacattatttacacagacaccctcaggacaatcttcagcaacatacagtcagtttaaccaacaaagtctgaacagcacggcaccaccccctccacctcctccacctccttcttcgtcttactatcaaaaccagcagccctctgcaaactttcagaattataatcagctcaaaggtagtctttctcaacaaactgtgtttacatcaggaccaaatcaagcacttcctggcaccacaagccagcaaacagttccaggacaccacgtgactccagggcattttttgccctctcagaaccctaccattcaccatcaaactgctgctgccgtagtcccccctcctcctccaccaccacctgctccaggaccgcaccttgtacaacagccgaattcccatcagcaacactctgtagcacatgtagtagggcctgttcatgcggtcacccctgggtcgcatattcattctcaaactgctggacaccacttaccc

SEQ ID NO: 311609 - DNA, 3040 bp, Homo sapiens
cttgtagaaatggttataaacccatatattcaccagttaccccagtaactcctggtacaccaggaaataccatgcactttgagaatatttcttccccagaaagttctccagaaataaagagacgcacttatagtcaagagggatatgacagatcttcaaccatgttaacattggggccttttagaaattctaatttaactgaactgggtctgcaagaaataaagactattggttatacgagccctaggagtaggactgaagtcaacaggcagtgtcctggagaaaaggaacctgtgtcagaccttcagctaggactcgatgcagttgagccaactgccctacataaaaccctggaaacgcctgcacatgacagggctgagcccaacagccaactggactcgactcactctggacggggcacaatgtattcttcctgggtaaagagccctgacagaacaggagttaacttctcagtgaactccaacttgagggacctgacaccctcgcatcagttggaggttggaggaggcttccgaataagtgagtcaaagtgcctgatgcaggatgatactagaggcatgtttatggaaacaactgtgttttgtacttccgaagatgggcttgtatctggtttcggacggactgttaatgacaatttgatcgacgggaattgcacaccccagaatccaccacaaaagaaaaaggtttctctattagaataccgtaagagacaacgtgaagctaggaaaagtggctctaagacagagaactttccactcattagtgtatcaccccatgcaagtggaagcttgagcaacaatggtgatggctgtgccagcagtaatgacaatggggagcaggtggaccacactgctagcctacctttaccaacaccagctacagtttataatgccacttctgaagaaactagcaataactgccctgttaaggatgctactgctagtgagaagaatgaaccagaagttcaatggactgcctcaacttcagtggaacaagtcagagaaaggagttatcagagagctttacttctcagtgatcaccgaaaagataaagatagtgggggagaatcaccatgtgtctcatgttcaccgagtcatgttcagtcttcaccttcatctcattcaaatcacataccccagttgcaagctaagggcccagtcccttctttcagtgaacttatggaagaccctgatcctgaaaatccagaacccacaactacgaatgaatgtccatccccagatacttctcaaaatacttgtaaaagtcctccaaaaatgagcaagcctggttcacctggatctgtaattcctgctcaagcacacgggaaaatattcacaaaaccagatccccaatgggactccacagttagtgcatccgaagctgaaaatggtgttcacctaaaaacagagctccaacaaaaacagctatcaaataacaaccaagcactttcaaagaatcatcctcctcagacacacgttcgtaattcatctgagcaactttcacaaaagctgccttctgtgccaacaaagttgcactgtcctccatcacctcacctagaaaatcctccaaagtcatccacgcctcacacacctgtacagcatggttatctttcaccaaagcctccttcacagcagttaggatctccctacaggcctcatcattcacagtcacctcaagttggaacacctcagcgagagcctcaaagaaacttttatccagcagcacagaaccttccagccaatactcagcaggcaacttctggaacattatttacacagacaccctcaggacaatcttcagcaacatacaaaatgaagtaggcatatttaccactcctaattttgatgaaacttccagtgctactacaatcagcacatctgaggatggaagttatggtactgatgtaaccaggtgcatatgtggttttacacatgatgatggatacatgatctgttgtgacaaatgcagcgtttggcaacatattgactgcatggggattgataggcagcatattcctgatacatatctatgtgaacgttgtcagcctaggaatttggataaagagagggcagtgctactacaacgccggaaaagggaaaatatgtcagatggtgataccagtgcaactgagagtggtgatgaggttcctgtggaattatatactgcatttcagcatactccaacatcaattactttaactgcttcaagagtttccaaagttaatgataaaagaaggaaaaaaagcggggagaaagaacaacacatttcaaaatgtaaaaaggcatttcgtgaaggatctaggaagtcatcaagagttaagggttcagctccagagattgatccttcatctgatggttcaaattttggatgggagacaaagatcaaagcatggatggatcgatatgaagaagcaaataacaaccagtatagtgagggtgttcagagggaggcacaaagaatagctctgagattaggcaatggaaatgacaaaaaagagatgaataaatccgatttgaataccaacaatttgctcttcaaacctcctgtagagagccatatacaaaagaataagaaaattcttaaatctgcaaaagatttgcctcctgatgcacttatcattgaatacagagggaagtttatgctgagagaacagtttgaagcaaatgggtatttctttaaaagaccatacccttttgtgttattctactctaaatttcatgggctagaaatgtgtgttgatgcaaggacttttgggaatgaggctcgattcatcaggcggtcttgtacacccaatgcagaggtgaggcatgaaattcaagatggaaccatacatctttatatttattctatacacagtattccaaagggaactgaaattactattgcctttgattttgactatggaaattgtaagtacaaggtggactgtgcatgcctcaaagaaaacccagagtgccctgttctaaaacgtagttctgaatccatggaaaatatcaatagtggttatgagaccagacgg

SEQ ID NO: 311610 - DNA, 2378 bp, Homo sapiens
cttgtagaaatggttataaacccatatattcaccagttaccccagtaactcctggtacaccaggaaataccatgcactttgagaatatttcttccccagaaagttctccagaaataaagagacgcacttatagtcaagaggtaagaagttaacttaaaaagggtgaattggtagtttttttcctattacattgttttccttaaattactggtaaattttgaaataaacagtcccaagatgtgattatttgtgtaatttttttttttaatttgtaaacagggatatgacagatcttcaaccatgttaacattggggccttttagaaattctaatttaactgaactgggtctgcaagaaataaagactattggttatacgagccctaggagtaggactgaagtcaacaggcagtgtcctggagaaaaggaacctgtgtcagaccttcagctaggactcgatgcagttgagccaactgccctacataaaaccctggaaacgcctgcacatgacagggctgagcccaacagccaactggactcgactcactctggacggggcacaatgtattcttcctgggtaaagagccctgacagaacaggagttaacttctcagtgaactccaacttgagggacctgacaccctcgcatcagttggaggttggaggaggcttccgaataagtgagtcaaagtgcctgatgcaggatgatactagaggcatgtttatggaaacaactgtgttttgtacttccgaagatgggcttgtatctggtttcggacggactgttaatgacaatttgatcgacgggaattgcacaccccagaatccaccacaaaagaaaaaggtttctctattagaataccgtaagagacaacgtgaagctaggaaaagtggctctaagacagagaactttccactcattagtgtatcaccccatgcaagtggaagcttgagcaacaatggtgatggctgtgccagcagtaatgacaatggggagcaggtggaccacactgctagcctacctttaccaacaccagctacagtttataatgccacttctgaagaaactagcaataactgccctgttaaggatgctactgctagtgagaagaatgaaccagaagttcaatggactgcctcaacttcagtggaacaagtcagagaaaggagttatcagagagctttacttctcagtgatcaccgaaaagataaagatagtgggggagaatcaccatgtgtctcatgttcaccgagtcatgttcagtcttcaccttcatctcattcaaatcacataccccagttgcaagctaagggcccagtcccttctttcagtgaacttatggaagaccctgatcctgaaaatccagaacccacaactacgaatgaatgtccatccccagatacttctcaaaatacttgtaaaagtcctccaaaaatgagcaagcctggttcacctggatctgtaattcctgctcaagcacacgggaaaatattcacaaaaccagatccccaatgggactccacagttagtgcatccgaagctgaaaatggtgttcacctaaaaacagagctccaacaaaaacagctatcaaataacaaccaagcactttcaaagaatcatcctcctcagacacacgttcgtaattcatctgagcaactttcacaaaagctgccttctgtgccaacaaagttgcactgtcctccatcacctcacctagaaaatcctccaaagtcatccacgcctcacacacctgtacagcatggttatctttcaccaaagcctccttcacagcagttaggatctccctacaggcctcatcattcacagtcacctcaagttggaacacctcagcgagagcctcaaagaaacttttatccagcagcacagaaccttccagccaatactcagcaggcaacttctggaacattatttacacagacaccctcaggacaatcttcagcaacatacagtcagtttaaccaacaaagtctgaacagcacggcaccaccccctccacctcctccacctccttcttcgtcttactatcaaaaccagcagccctctgcaaactttcagaattataatcagctcaaaggtagtctttctcaacaaactgtgtttacatcaggaccaaatcaagcacttcctggcaccacaagccagcaaacagttccaggacaccacgtgactccagggcattttttgccctctcagaaccctaccattcaccatcaaactgctgctgccgtagtcccccctcctcctccaccaccatcttcgtcttactatcaaaaccagcagccctctgcaaactttcagaattataatcagctcaaaggtagtctttctcagcaaactgtgttttcatcatccccaac

SEQ ID NO: 311611 - DNA, 1848 bp, Homo sapiens
gcctggctaatttttttttgtatttttagtagagacggggtttcaccatgctggccaggctggtctcagactcctgaccttgtaatctgcccaccttggcctcccaaagtgctgggattacaggcgtgagccactgtgccctgccaagattaactattttcaaaggttaacaccaaagtattttcccagtagatcaaaagccttggtctgacagtacatgttgactatgaagcaacaatgtaactagcagtagtttctttcaatagaggataatgtgatttttctttgaaaggactgcctcaacttcagtggaacaagtcagagaaaggagttatcagagagctttacttctcagtgatcaccgaaaagataaagatagtggtaagtgagcttgttccttcaccagaaagtggaatcagttaatcactctgcatcctcgttctttgcagctctaatgttctctttgggtctgctctgcttcatctctagggggagaatcaccatgtgtctcatgttcaccgagtcatgttcagtcttcaccttcatctcattcaaatcacataccccagttgcaagctaagggcccagtcccttctttcagtgaacttatggaaggtcagtaagcagatgaccgataatgttattcttaacaaattttaaaatcagacaagagagcctttataaaaagttggtttggatagtagaatgtatgttgctttgtggtgttaaaacaggtgtttattgtgtaattttatacttactataggtttcttctgctttatagaccctgatcctgaaaatccagaacccacaactacgaatgaatgtccatccccagatacttctcaaaatacttgtaaaagtcctccaaaaatgagcaagcctggttcacctggatctgtaattcctgctcaagcacacgggaaaatattcacaaaaccagatccccaatgggactccacagttagtgcatccgaagctgaaaatggtgttcacctaaaaacagagctccaacaaaaacagctatcaaataacaaccaagcactttcaaagaatcatcctcctcagacacacgttcgtaattcatctgagcaactttcacaaaagctgccttctgtgccaacaaagttgcactgtcctccatcacctcacctagaaaatcctccaaagtcatccacgcctcacacacctgtacagcatggttatctttcaccaaagcctccttcacagcagttaggatctccctacaggcctcatcattcacagtcacctcaagttggaacacctcagcgagagcctcaaagaaacttttatccagcagcacagaaccttccagccaatactcagcaggcaacttctggaacattatttacacagacaccctcaggacaatcttcagcaacatacagtcagtttaaccaacaaagtctgaacagcacggcaccaccccctccacctcctccacctccttcttcgtcttactatcaaaaccagcagccctctgcaaactttcagaattataatcagctcaaaggtagtctttctcaacaaactgtgtttacatcaggaccaaatcaagcacttcctggcaccacaagccagcaaacagttccaggacaccacgtgactccagggcattttttgccctctcagaaccctaccattcaccatcaaactgctgctgccgtagtcccccctcctcctccaccaccacctgctccaggaccgcaccttgtacaacagccgaattcccatcagcaacactctgtagcacatgtagtagggcctgttcatgcggtcacccctgggtcgcatattcattctcaaactgctggacaccacttaccc

SEQ ID NO: 311612 - DNA, 1366 bp, Homo sapiens
  misc_feature (135)..(135): n is a, c, g, or t
aaaaagaaaaaaaaaattgcttttgttcctctgtgtacccaactgtcttcctccactcctgtttgtccatccttgggccgaatctgtccatccatgcactctttttgctcctctatatggctatctgtgggtgcncctgactatctctgcccctcttctgcccctctctctgtctgtcctaggcagtccatctgtccatccctacaccctgccccttctgtcctctgcgtacctctctgtctgcttggaaccctccacccccttaatctccacatcctccatggtgctgaaacttatggaagaccctgatcctgaaaatccagaacccacaactacgaatgaatgtccatccccagatacttctcaaaatacttgtaaaagtcctccaaaaatgagcaagcctggttcacctggatctgtaattcctgctcaagcacacgggaaaatattcacaaaaccagatccccaatgggactccacagttagtgcatccgaagctgaaaatggtgttcacctaaaaacagagctccaacaaaaacagctatcaaataacaaccaagcactttcaaagaatcatcctcctcagacacacgttcgtaattcatctgagcaactttcacaaaagctgccttctgtgccaacaaagttgcactgtcctccatcacctcacctagaaaatcctccaaagtcatccacgcctcacacacctgtacagcatggttatctttcaccaaagcctccttcacagcagttaggatctccctacaggcctcatcattcacagtcacctcaagttggaacacctcagcgagagcctcaaagaaacttttatccagcagcacagaaccttccagccaatactcagcaggcaacttctggaacattatttacacagacaccctcaggacaatcttcagcaacatacagtcagtttaaccaacaaagtctgaacagcacggcaccaccccctccacctcctccacctccttcttcgtcttactatcaaaaccagcagccctctgcaaactttcagaattataatcagctcaaaggtagtctttctcaacaaactgtgtttacatcaggaccaaatcaagcacttcctggcaccacaagccagcaaacagttccaggacaccacgtgactccagggcattttttgccctctcagaaccctaccattcaccatcaaactgctgctgccgtagtcccccctcctcctccaccaccacctgctccaggaccgcaccttgtacaacagccgaattcccatcagcaacactctgtagcacatgtagtagggcctgttcatgcggtcacccctgggtcgcatattcattctcaaactgctggacaccacttaccc

SEQ ID NO: 311613 - DNA, 406 bp, Homo sapiens
tttacctccatcaccaaaatgtccacgagtttgaaagtgacctcacgataaccattttttaagactacttggagttttgcaaacaagatgttaggaagattcatttaagactggaattcatgctttcttccttctctggtggttttaagaatgtgtttgtaatctcctatagaaacttgtcattgtaaaataattcctgcttcaaagaaaatattttacaaataggatatcattcttattatattgtgaggtaagcatctgattatttcttttgtaggaaatataatttccccatttgaaataatttctgcaatggatctaaaataaatggaaatatttttccctcatttctaaacactcttatcgatactctgagtagcttaagtaaaaaagaaaaaaattaaag

SEQ ID NO: 311614 - DNA, 1809 bp, Homo sapiens
cagggcactaaagaggggacagacggccattgacgcggccctcacctctgtggtggaccaggatggaggggtccacatactacaggtgcctgtgtggaaccagcaggaggtggaaattcacatcccgatcaccctgtatcccagcatcttgacatttccgtggcaaccaaagacgggcgcctatcagtacacaataagggcccacggtggcagtgggaacttcagctggtcttcgtcaagccacctggttgccacagttactgtcaagggcgtgatgaccacaggcagtgacatcgggttcagtgtgatccaggcacatgatgtgcagaacccactccatttcggtgagatgaaggtgtatgtgatcgagccccacagcatggagtttgccccgtgccaggtggaggcacgtgtgggccaggccctggagctgcccctgaggatcagtggcctcatgcccggcggggccagtgaggtggtcaccttgagcgactgctcccactttgactcggctgtcgaggtggagaaccagggtgtgttccagccactcccagggaggctgccgccaggctctgagcactgcagcggcgtccgggtaaaggccgaggcccagggctctaccacgcttcttgtgagctacagacacggccacgtccacctgagtgccaagatcaccattgctgcctacctgcccctcaaggctgtggatccctcctctgttgccttggtaaccctgggctcctcaaaggagatgctgtttgaaggaggtcccagaccttggatcctcgagccgtccaaattcttccagaacgtcaccgctgaggacactgacagcatcggcctggctctctttgccccccattcctcccggaattatcagcaacactggatccttgtgacctgtcaggccttgggtgagcaggtcatcgccctgtcggtggggaacaagcccagcctcaccaacccctttcctgcggtggagcctgccgtggtgaagttcgtctgcgccccaccgtccaggctcaccctcgcgcctgtctacaccagcccccagctggacatgtcctgtccgctgctgcagcagaacaagcaggtggtcccagtgtccagccaccgcaaccccctgctggacctggctgcttacgaccaggagggccgccggttcgacaacttcagctctctgagcatccagtgggagtccaccaggccagtgttggccagcatcgagcctgagctgcccatgcagctggtgtcccaggacgatgagagtggccaaaagaagctgcacggtttgcaggccattttggttcacgaggcatcaggaaccacagccatcactgccactgccactggctaccaggagtcccacctcagctctgccagaacaaagcagccgcatgaccctctggtgcctctgtcggcctccatagagctcatcctggtggaggacgtgagggtgagcccagaagaggtgaccatctacaaccaccctggcatccaggcagagctccgcatcagggaaggctcaggttacttcttcctcaacaccagcaccgcagatgttgtcaaggtggcctaccaggaggccaggggtgtcgccatggtaagcttgggccatcggtccccactgttggttttcattccttatctgggctgttgtgtggttaattgattgatcattttgaaagctagcacttgactcacactcggaatcccagaactttgggaggtcaaggcaggaagatcacttgagcccaggagttcaagaccagcctggacaatatagtgagacccccatctctacaaaaa

SEQ ID NO: 311615 - DNA, 457 bp, Homo sapiens
aatcatgtcctcctggatctaatggccttgcccttgtccttcagcatgaccctctggtgcctctgtcggcctccatagagctcatcctggtggaggacgtgagggtgagcccagaagaggtgaccatctacaaccaccctggcatccaggcagagctccgcatcagggaaggctcaggttacttcttcctcaacaccagcaccgcagatgttgtcaaggtggcctaccaggaggccaggggtgtcgccatggtaagcttgggccatcggtccccactgttggttttcattccttatctgggctgttgtgtggttaattgattgatcattttgaaagctagcacttgactcacactcggaatcccagaactttgggaggtcaaggcaggaagatcacttgagcccaggagttcaagaccagcctggacaatatagtgagacccccatctctacaaaaa

SEQ ID NO: 311616 - DNA, 5878 bp, Homo sapiens
cagggcactaaagaggggacagacggccattgacgcggccctcacctctgtggtggaccaggatggaggggtccacatactacaggtgcctgtgtggaaccagcaggaggtggaaattcacatcccgatcaccctgtatcccagcatcttgacatttccgtggcaaccaaagacgggcgcctatcagtacacaataagggcccacggtggcagtgggaacttcagctggtcttcgtcaagccacctggttgccacagttactgtcaagggcgtgatgaccacaggcagtgacatcgggttcagtgtgatccaggcacatgatgtgcagaacccactccatttcggtgagatgaaggtgtatgtgatcgagccccacagcatggagtttgccccgtgccaggtggaggcacgtgtgggccaggccctggagctgcccctgaggatcagtggcctcatgcccggcggggccagtgaggtggtcaccttgagcgactgctcccactttgactcggctgtcgaggtggagaaccagggtgtgttccagccactcccagggaggctgccgccaggctctgagcactgcagcggcgtccgggtaaaggccgaggcccagggctctaccacgcttcttgtgagctacagacacggccacgtccacctgagtgccaagatcaccattgctgcctacctgcccctcaaggctgtggatccctcctctgttgccttggtaaccctgggctcctcaaaggagatgctgtttgaaggaggtcccagaccttggatcctcgagccgtccaaattcttccagaacgtcaccgctgaggacactgacagcatcggcctggctctctttgccccccattcctcccggaattatcagcaacactggatccttgtgacctgtcaggccttgggtgagcaggtcatcgccctgtcggtggggaacaagcccagcctcaccaacccctttcctgcggtggagcctgccgtggtgaagttcgtctgcgccccaccgtccaggctcaccctcgcgcctgtctacaccagcccccagctggacatgtcctgtccgctgctgcagcagaacaagcaggtggtcccagtgtccagccaccgcaaccccctgctggacctggctgcttacgaccaggagggccgccggttcgacaacttcagctctctgagcatccagtgggagtccaccaggccagtgttggccagcatcgagcctgagctgcccatgcagctggtgtcccaggacgatgagagtggccaaaagaagctgcacggtttgcaggccattttggttcacgaggcatcaggaaccacagccatcactgccactgccactggctaccaggagtcccacctcagctctgccagaacaaagcagccgcatgaccctctggtgcctctgtcggcctccatagagctcatcctggtggaggacgtgagggtgagcccagaagaggtgaccatctacaaccaccctggcatccaggcagagctccgcatcagggaaggctcaggttacttcttcctcaacaccagcaccgcagatgttgtcaaggtggcctaccaggaggccaggggtgtcgccatggtgcaccctttgctcccgggctcatccaccatcatgatccatgacttgtgcctcgtcttcccggccccagccaaggctgtcgtttacgtgtcggacattcaggagctgtacatccgtgtggttgacaaggtggagattgggaagacagtgaaggcatacgtccgcgtgctggacttgcacaagaagcccttccttgccaaatacttcccctttatggacctgaagctccgagcagcctccccgatcattacattggtggcccttgatgaagcccttgacaactacaccatcacattcctcatccgcggtgtggccatcggccagaccagtctaactgcaagtgtgaccaataaagctggacagagaatcaactcagccccacaacagattgaagtctttcccccgttcaggctgatgcccaggaaggtgacactgcttatcggggccacgatgcaggtcacctccgagggcggcccccagcctcagtccaacatccttttctccatcagcaatgagagcgttgcgctggtgagcgctgctgggctggtacagggcctcgccatcgggaacggcactgtgtctgggctcgtgcaggcagtggatgcagagaccggcaaggtggtcatcatctctcaggacctcgtgcaggtggaggtgctgctgctaagggccgtgaggatccgcgcccccatcatgcggatgaggacgggcacccagatgcccatctatgtcaccggcatcaccaaccaccagaaccctttctcctttggcaatgccgtgccaggcctgaccttccactggtctgtcaccaagcgggacgtcctggacctccgagggcggcaccacgaggcgtcgatccgactcccgtcacagtacaactttgccatgaacgtgctcggccgggtaaaaggccggaccgggctgagggtggtggtcaaggctgtggaccccacatcggggcagctgtatggcctggccagagaactctcggatgagatccaagtccaggtgtttgagaagctgcagctgctcaaccctgaaatagaagcagaacaaatattaatgtcgcccaactcatatataaagctgcagacaaacagggatggtgcagcctctctgagctaccgcgtcctggatggacccgaaaaggttccagttgtgcatgttgatgagaaaggctttctagcatcagggtctatgatcgggacatccaccatcgaagtgattgcacaagagccctttggggccaaccaaaccatcattgttgctgtaaaggtatcccctgtttcctacctgagggtttccatgagccctgtcctgcacacccagaacaaggaggccctggtggccgtgcctttgggaatgaccgtgaccttcactgtccacttccacgacaactctggagatgtcttccatgctcacagttcggtcctcaactttgccactaacagagacgactttgtgcagatcgggaagggccccaccaacaacacctgcgttgtccgcacagtcagcgtgggcctgacactgctccgtgtgtgggacgcagagcacccgggcctctcggacttcatgcccctgcctgtcctacaggccatctccccagagctgtctggggccatggtggtgggggacgtgctctgtctggccactgttctgaccagcctggaaggcctctcaggaacctggagctcctcagccaacagcatcctccacatcgaccccaagacgggtgtggctgtggcccgggccgtgggatccgtgacggtttactatgaggtcgctgggcacctgaggacctacaaggaggtggtggtcagcgtccctcagaggatcatggcccgtcacctccaccccatccagaccagcttccaggaggctacagcctccaaagtgattgttgccgtgggagacagaagctctaacctgagaggcgagtgcacccccacccagagggaagtcatccaggccttgcacccagagaccctcatcagctgccagtcccagttcaagccggccgtctttgatttcccatctcaagatgtgttcaccgtggagccacagtttgacactgctctcggccagtacttctgctcaatcacaatgcacaggctgacggacaagcagcggaagcacctgagcatgaagaagacagctctggtggtcagtgcctccctctccagcagccacttctccacagagcaggtgggggccgaggtgcccttcagcccaggtctcttcgccgaccaggctgaaatccttttgagcaaccactacaccagttccgagatcagggtctttggtgccccggaggttctggagaacttggaggtgaaatccgggtccccggccgtgctggcattcgcaaaggagaagtcttttgggtggcccagcttcatcacatacacggtcggcgtctcggaccccgcggctggcagccaagggcctctgtccactaccctgaccttctccagccccgtgaccaaccaagccattgccatcccagtgacagtggcttttgtgatggatcgccgtgggcccggtccttatggagccagcctcttccagcacttcctggattcctaccaggtcatgttcttcacgctcttcgccctgttggctgggacagcggtcatgatcatagcctaccacactgtctgcacgccccgggatcttgctgtgcctgcagccctcacgcctcgagccagccctggacacagcccccactatttcgctgcctcatcacccacatctcccaatgcattgcctcctgctcgcaaagccagccctccctcagggctgtggagcccagcctatgcctcccactaggccgcgtgaaggttcccggaggatgggtctcagccgagcctcgtgcacccccaagatggaacatccctgctgcattcacactggaacaagcccctccagatgagtgccccggccccaggccagcttcactgccgtctcttcacacagagctgtagtttcggctctgcccattagctcattttatgtaggagttttaaatgtgtgtttttttcctttcaagtcttacaaagctaagactttttggctcattcctttttgcatggttgtctagggtttctggacaatgtgctgttgcatttttattttcctagccttgctaaaatctttcccttctcaagactttgagcagttagaagtgctctttagaagttgtctgtgggtgatgttactgtagtggtctcagggaaaggattgtccagttactttagggggtttttggtggggtttttccccctgtgaaaacttactttgcccctagtctggctgctgctaggacttctgaggagcaatgggacatgagtgtccctgtatctgcgccactgccgcaagggaagcctcaggaaccagcacctggaggccaggatagccaagccctgggtgagcgagaggctggagaacacaggagctcacccagggctgctgcccaaccatgggccactgtgaacagacttcagtcctctgtttttgtttcataagccgttgagacatctgatggacttggcttaggccctgctgggacatcccacgtgtgatccctttcactccatcaggacaccaggactgtccttaggaaaatgtccttgagatggcagcaggagtcatattttctgtgtgtgtgtttcggaaagccgctgtgtcctgcctcagcacaaagacccagtgtcatttgctcctcctgttcctgtgccactccagaacctcagcagatctgagccaccgcctgccagtgtgagaggcggccactttcatggcagctcatcaggcgcagggccccagacagcttcccagcaggccctagagcccggcctgggccaatgatggagggcggccgccagcccagggcctgcccatccagaagggactccccagggcctgggggaggagacccttggaaaagtcctctcttcccagctcctgattctggatctgagattctcagatcacaggcccctgtgctccaggccgaggctgggctaccctcagggagatccagagactcatgcccatggccatccatgcgtggacgctgtgtggagagtccaggatgacgggatcccgcacaagctcccttcagtccttcagggctgggccatgtggttgatttttctaaagctggagaaaggaagaattgtgccttgcatattacttgagcttaaactgacaacctggatgtaaataggagcctttctactggtttatttaataaagttctatgtgattttttaa

SEQ ID NO: 311617 - DNA, 3464 bp, Homo sapiens
aagttagtcgggaccgtggactcgagggcggacacgaggcgtcgatccgactcccgtcacagtacaactttgccatgaacgtgctcggccgggtaaaaggccggaccgggctgagggtggtggtcaaggctgtggaccccacatcggggcagctgtatggcctggccagagaactctcggatgagatccaagtccaggtgtttgagaagctgcagctgctcaaccctgaaatagaagcagaacaaatattaatgtcgcccaactcatatataaagctgcagacaaacagggatggtgcagcctctctgagctaccgcgtcctggatggacccgaaaaggttccagttgtgcatgttgatgagaaaggctttctagcatcagggtctatgatcgggacatccaccatcgaagtgattgcacaagagccctttggggccaaccaaaccatcattgttgctgtaaaggtatcccctgtttcctacctgagggtttccatgagccctgtcctgcacacccagaacaaggaggccctggtggccgtgcctttgggaatgaccgtgaccttcactgtccacttccacgacaactctggagatgtcttccatgctcacagttcggtcctcaactttgccactaacagagacgactttgtgcagatcgggaagggccccaccaacaacacctgcgttgtccgcacagtcagcgtgggcctgacactgctccgtgtgtgggacgcagagcacccgggcctctcggacttcatgcccctgcctgtcctacaggccatctccccagagctgtctggggccatggtggtgggggacgtgctctgtctggccactgttctgaccagcctggaaggcctctcaggaacctggagctcctcagccaacagcatcctccacatcgaccccaagacgggtgtggctgtggcccgggccgtgggatccgtgacggtttactatgaggtcgctgggcacctgaggacctacaaggaggtggtggtcagcgtccctcagaggatcatggcccgtcacctccaccccatccagaccagcttccaggaggctacagcctccaaagtgattgttgccgtgggagacagaagctctaacctgagaggcgagtgcacccccacccagagggaagtcatccaggccttgcacccagagaccctcatcagctgccagtcccagttcaagccggccgtctttgatttcccatctcaagatgtgttcaccgtggagccacagtttgacactgctctcggccagtacttctgctcaatcacaatgcacaggctgacggacaagcagcggaagcacctgagcatgaagaagacagctctggtggtcagtgcctccctctccagcagccacttctccacagagcaggtgggggccgaggtgcccttcagcccaggtctcttcgccgaccaggctgaaatccttttgagcaaccactacaccagttccgagatcagggtctttggtgccccggaggttctggagaacttggaggtgaaatccgggtccccggccgtgctggcattcgcaaaggagaagtcttttgggtggcccagcttcatcacatacacggtcggcgtctcggaccccgcggctggcagccaagggcctctgtccactaccctgaccttctccagccccgtgaccaaccaagccattgccatcccagtgacagtggcttttgtgatggatcgccgtgggcccggtccttatggagccagcctcttccagcacttcctggattcctaccaggtcatgttcttcacgctcttcgccctgttggctgggacagcggtcatgatcatagcctaccacactgtctgcacgccccgggatcttgctgtgcctgcagccctcacgcctcgagccagccctggacacagcccccactatttcgctgcctcatcacccacatctcccaatgcattgcctcctgctcgcaaagccagccctccctcagggctgtggagcccagcctatgcctcccactaggccgcgtgaaggttcccggaggatgggtctcagccgagcctcgtgcacccccaagatggaacatccctgctgcattcacactggaacaagcccctccagatgagtgccccggccccaggccagcttcactgccgtctcttcacacagagctgtagtttcggctctgcccattagctcattttatgtaggagttttaaatgtgtgtttttttcctttcaagtcttacaaagctaagactttttggctcattcctttttgcatggttgtctagggtttctggacaatgtgctgttgcatttttattttcctagccttgctaaaatctttcccttctcaagactttgagcagttagaagtgctctttagaagttgtctgtgggtgatgttactgtagtggtctcagggaaaggattgtccagttactttagggggtttttggtggggtttttccccctgtgaaaacttactttgcccctagtctggctgctgctaggacttctgaggagcaatgggacatgagtgtccctgtatctgcgccactgccgcaagggaagcctcaggaaccagcacctggaggccaggatagccaagccctgggtgagcgagaggctggagaacacaggagctcacccagggctgctgcccaaccatgggccactgtgaacagacttcagtcctctgtttttgtttcataagccgttgagacatctgatggacttggcttaggccctgctgggacatcccacgtgtgatccctttcactccatcaggacaccaggactgtccttaggaaaatgtccttgagatggcagcaggagtcatattttctgtgtgtgtgtttcggaaagccgctgtgtcctgcctcagcacaaagacccagtgtcatttgctcctcctgttcctgtgccactccagaacctcagcagatctgagccaccgcctgccagtgtgagaggcggccactttcatggcagctcatcaggcgcagggccccagacagcttcccagcaggccctagagcccggcctgggccaatgatggagggcggccgccagcccagggcctgcccatccagaagggactccccagggcctgggggaggagacccttggaaaagtcctctcttcccagctcctgattctggatctgagattctcagatcacaggcccctgtgctccaggccgaggctgggctaccctcagggagatccagagactcatgcccatggccatccatgcgtggacgctgtgtggagagtccaggatgacgggatcccgcacaagctcccttcagtccttcagggctgggccatgtggttgatttttctaaagctggagaaaggaagaattgtgccttgcatattacttgagcttaaactgacaacctggatgtaaataggagcctttctactggtttatttaataaagttctatgtgattttttaa

SEQ ID NO: 311618 - DNA, 5825 bp, Homo sapiens
cagggcactaaagaggggacagacggccattgacgcggccctcacctctgtggtggaccaggatggaggggtccacatactacaggtgcctgtgtggaaccagcaggaggtggaaattcacatcccgatcaccctgtatcccagcatcttgacatttccgtggcaaccaaagacgggcgcctatcagtacacaataagggcccacggtggcagtgggaacttcagctggtcttcgtcaagccacctggttgccacagttactgtcaagggcgtgatgaccacaggcagtgacatcgggttcagtgtgatccaggcacatgatgtgcagaacccactccatttcggtgagatgaaggtgtatgtgatcgagccccacagcatggagtttgccccgtgccaggtggaggcacgtgtgggccaggccctggagctgcccctgaggatcagtggcctcatgcccggcggggccagtgaggtggtcaccttgagcgactgctcccactttgactcggctgtcgaggtggagaaccagggtgtgttccagccactcccagggaggctgccgccaggctctgagcactgcagcggcgtccgggtaaaggccgaggcccagggctctaccacgcttcttgtgagctacagacacggccacgtccacctgagtgccaagatcaccattgctgcctacctgcccctcaaggctgtggatccctcctctgttgccttggtaaccctgggctcctcaaaggagatgctgtttgaaggaggtcccagaccttggatcctcgagccgtccaaattcttccagaacgtcaccgctgaggacactgacagcatcggcctggctctctttgccccccattcctcccggaattatcagcaacactggatccttgtgacctgtcaggccttgggtgagcaggtcatcgccctgtcggtggggaacaagcccagcctcaccaacccctttcctgcggtggagcctgccgtggtgaagttcgtctgcgccccaccgtccaggctcaccctcgcgcctgtctacaccagcccccagctggacatgtcctgtccgctgctgcagcagaacaagcaggtggtcccagtgtccagccaccgcaaccccctgctggacctggctgcttacgaccaggagggccgccggttcgacaacttcagctctctgagcatccagtgggagtccaccaggccagtgttggccagcatcgagcctgagctgcccatgcagctggtgtcccaggacgatgagagtggccaaaagaagctgcacggtttgcaggccattttggttcacgaggcatcaggaaccacagccatcactgccactgccactggctaccaggagtcccacctcagctctgccagaacaaagcagccgcatgaccctctggtgcctctgtcggcctccatagagctcatcctggtggaggacgtgagggtgagcccagaagaggtgaccatctacaaccaccctggcatccaggcagagctccgcatcagggaaggctcaggttacttcttcctcaacaccagcaccgcagatgttgtcaaggtggcctaccaggaggccaggggtgtcgccatggtgcaccctttgctcccgggctcatccaccatcatgatccatgacttgtgcctcgtcttcccggccccagccaaggctgtcgtttacgtgtcggacattcaggagctgtacatccgtgtggttgacaaggtggagattgggaagacagtgaaggcatacgtccgcgtgctggacttgcacaagaagcccttccttgccaaatacttcccctttatggacctgaagctccgagcagcctccccgatcattacattggtggcccttgatgaagcccttgacaactacaccatcacattcctcatccgcggtgtggccatcggccagaccagtctaactgcaagtgtgaccaataaagctggacagagaatcaactcagccccacaacagattgaagtctttcccccgttcaggctgatgcccaggaaggtgacactgcttatcggggccacgatgcaggtcacctccgagggcggcccccagcctcagtccaacatccttttctccatcagcaatgagagcgttgcgctggtgagcgctgctgggctggtacagggcctcgccatcgggaacggcactgtgtctgggctcgtgcaggcagtggatgcagagaccggcaaggtggtcatcatctctcaggacctcgtgcaggtggaggtgctgctgctaagggccgtgaggatccgcgcccccatcatgcggatgaggacgggcacccagatgcccatctatgtcaccggcatcaccaaccaccagaaccctttctcctttggcaatgccgtgccaggcctgaccttccactggtctgtcaccaagcgggacgtcctggacctccgagggcggcaccacgaggcgtcgatccgactcccgtcacagtacaactttgccatgaacgtgctcggccgggtaaaaggccggaccgggctgagggtggtggtcaaggctgtggaccccacatcggggcagctgtatggcctggccagagaactctcggatgagatccaagtccaggtgtttgagaagctgcagctgctcaaccctgaaatagaagcagaacaaatattaatgtcgcccaactcatatataaagctgcagacaaacagggatggtgcagcctctctgagctaccgcgtcctggatggacccgaaaaggttccagttgtgcatgttgatgagaaaggctttctagcatcagggtctatgatcgggacatccaccatcgaagtgattgcacaagagccctttggggccaaccaaaccatcattgttgctgtaaaggtatcccctgtttcctacctgagggtttccatgagccctgtcctgcacacccagaacaaggaggccctggtggccgtgcctttgggaatgaccgtgaccttcactgtccacttccacgacaactctggagatgtcttccatgctcacagttcggtcctcaactttgccactaacagagacgactttgtgcagatcgggaagggccccaccaacaacacctgcgttgtccgcacagtcagcgtgggcctgacactgctccgtgtgtgggacgcagagcacccgggcctctcggacttcatgcccctgcctgtcctacaggccatctccccagagctgtctggggccatggtggtgggggacgtgctctgtctggccactgttctgaccagcctggaaggcctctcaggaacctggagctcctcagccaacagcatcctccacatcgaccccaagacgggtgtggctgtggcccgggccgtgggatccgtgacggtttactatgaggtcgctgggcacctgaggacctacaaggaggtggtggtcagcgtccctcagaggatcatggcccgtcacctccaccccatccagaccagcttccaggaggctacagcctccaaagtgattgttgccgtgggagacagaagctctaacctgagaggcgagtgcacccccacccagagggaagtcatccaggccttgcacccagagaccctcatcagctgccagtcccagttcaagccggccgtctttgatttcccatctcaagatgtgttcaccgtggagccacagtttgacactgctctcggccagtacttctgctcaatcacaatgcacaggctgacggacaagcagcggaagcacctgagcatgaagaagacagctctggtggtcagtgcctccctctccagcagccacttctccacagagcaggtgggggccgaggtgcccttcagcccaggtctcttcgccgaccaggctgaaatccttttgagcaaccactacaccagttccgagatcagggtctttggtgccccggaggttctggagaacttggaggtgaaatccgggtccccggccgtgctggcattcgcaaaggagaagtcttttgggtggcccagcttcatcacatacacggtcggcgtctcggaccccgcggctggcagccaagggcctctgtccactaccctgaccttctccagccccgtgaccaaccaagccattgccatcccagtgacagtggcttttgtgatggatcgccgtgggcccggtccttatggagccagcctcttccagcacttcctggattcctaccaggtcatgttcttcacgctcttcgccctgttggctgggacagcggtcatgatcatagcctaccacactgtctgcacgccccgggatcttgctgtgcctgcagccctcacgcctcgagccagccctggacacagcccccactatttcgctgcctcatcacccacatctcccaatgcattgcctcctgctcgcaaagccagccctccctcagggctgtggagcccagcctatgcctcccactaggccgcgtgaaggttcccggaggatgggtctcagccgagcctcgtgcacccccaagatggaacatccctgctgcattcacactggaacaagcccctccagatgagtgccccggccccaggccagcttcactgccgtctcttcacacagagctgtagtttcggctctgcccattagctcattttatgtaggagttttaaatgtgtgtttttttcctttcaagtcttacaaagctaagactttttggctcattcctttttgcatggttgtctagggtttctggacaatgtgctgttgcatttttattttcctagccttgctaaaatctttcccttctcaagactttgagcagttagaagtgctctttagaagttgtctgtgggtgatgttactgtagtggtctcagggaaaggattgtccagttactttagggggtttttggtggggtttttccccctgtgaaaacttactttgcccctagtctggctgctgctaggacttctgaggagcaatgggacatgagtgtccctgtatctgcgccactgccgcaagggaagcctcaggaaccagcacctggaggccagggctgctgcccaaccatgggccactgtgaacagacttcagtcctctgtttttgtttcataagccgttgagacatctgatggacttggcttaggccctgctgggacatcccacgtgtgatccctttcactccatcaggacaccaggactgtccttaggaaaatgtccttgagatggcagcaggagtcatattttctgtgtgtgtgtttcggaaagccgctgtgtcctgcctcagcacaaagacccagtgtcatttgctcctcctgttcctgtgccactccagaacctcagcagatctgagccaccgcctgccagtgtgagaggcggccactttcatggcagctcatcaggcgcagggccccagacagcttcccagcaggccctagagcccggcctgggccaatgatggagggcggccgccagcccagggcctgcccatccagaagggactccccagggcctgggggaggagacccttggaaaagtcctctcttcccagctcctgattctggatctgagattctcagatcacaggcccctgtgctccaggccgaggctgggctaccctcagggagatccagagactcatgcccatggccatccatgcgtggacgctgtgtggagagtccaggatgacgggatcccgcacaagctcccttcagtccttcagggctgggccatgtggttgatttttctaaagctggagaaaggaagaattgtgccttgcatattacttgagcttaaactgacaacctggatgtaaataggagcctttctactggtttatttaataaagttctatgtgattttttaa

SEQ ID NO: 311619 - DNA, 1915 bp, Homo sapiens
acatcccacgtgtgatccctttcactccatcaggacccaggactgtccttaggaaaatgtccttgagatgcagcaggagtcatattctctgtccactaccctgaccttctccagccccgtgaccaaccaagccattgccatcccagtgacagtggcttttgtgatggatcgccgtgggcccggtccttatggagccagcctcttccagcacttcctggattcctaccaggtcatgttcttcacgctcttcgccctgttggctgggacagcggtcatgatcatagcctaccacactgtctgcacgccccgggatcttgctgtgcctgcagccctcacgcctcgagccagccctggacacagcccccactatttcgctgcctcatcacccacatctcccaatgcattgcctcctgctcgcaaagccagccctccctcagggctgtggagcccagcctatgcctcccactaggccgcgtgaaggttcccggaggatgggtctcagccgagcctcgtgcacccccaagatggaacatccctgctgcattcacactggaacaagcccctccagatgagtgccccggccccaggccagcttcactgccgtctcttcacacagagctgtagtttcggctctgcccattagctcattttatgtaggagttttaaatgtgtgtttttttcctttcaagtcttacaaagctaagactttttggctcattcctttttgcatggttgtctagggtttctggacaatgtgctgttgcatttttattttcctagccttgctaaaatctttcccttctcaagactttgagcagttagaagtgctctttagaagttgtctgtgggtgatgttactgtagtggtctcagggaaaggattgtccagttactttagggggtttttggtggggtttttccccctgtgaaaacttactttgcccctagtctggctgctgctaggacttctgaggagcaatgggacatgagtgtccctgtatctgcgccactgccgcaagggaagcctcaggaaccagcacctggaggccaggatagccaagccctgggtgagcgagaggctggagaacacaggagctcacccagggctgctgcccaaccatgggccactgtgaacagacttcagtcctctgtttttgtttcataagccgttgagacatctgatggacttggcttaggccctgctgggacatcccacgtgtgatccctttcactccatcaggacaccaggactgtccttaggaaaatgtccttgagatggcagcaggagtcatattttctgtgtgtgtgtttcggaaagccgctgtgtcctgcctcagcacaaagacccagtgtcatttgctcctcctgttcctgtgccactccagaacctcagcagatctgagccaccgcctgccagtgtgagaggcggccactttcatggcagctcatcaggcgcagggccccagacagcttcccagcaggccctagagcccggcctgggccaatgatggagggcggccgccagcccagggcctgcccatccagaagggactccccagggcctgggggaggagacccttggaaaagtcctctcttcccagctcctgattctggatctgagattctcagatcacaggcccctgtgctccaggccgaggctgggctaccctcagggagatccagagactcatgcccatggccatccatgcgtggacgctgtgtggagagtccaggatgacgggatcccgcacaagctcccttcagtccttcagggctgggccatgtggttgatttttctaaagctggagaaaggaagaattgtgccttgcatattacttgagcttaaactgacaacctggatgtaaataggagcctttctactggtttatttaataaagttctatgtgattttttaa

SEQ ID NO: 311620 - DNA, 1633 bp, Homo sapiens
agcctaccacactgtctgcacgccccgggatcttgctgtgcctgcagccctcacgcctcgagccagccctggacacagcccccactatttcgctgcctcatcacccacatctcccaatgcattgcctcctgctcgcaaagccagccctccctcagggctgtggagcccagcctatgcctcccactaggccgcgtgaaggttcccggaggatgggtctcagccgagcctcgtgcacccccaagatggaacatccctgctgcattcacactggaacaagcccctccagatgagtgccccggccccaggccagcttcactgccgtctcttcacacagagctgtagtttcggctctgcccattagctcattttatgtaggagttttaaatgtgtgtttttttcctttcaagtcttacaaagctaagactttttggctcattcctttttgcatggttgtctagggtttctggacaatgtgctgttgcatttttattttcctagccttgctaaaatctttcccttctcaagactttgagcagttagaagtgctctttagaagttgtctgtgggtgatgttactgtagtggtctcagggaaaggattgtccagttactttagggggtttttggtggggtttttccccctgtgaaaacttactttgcccctagtctggctgctgctaggacttctgaggagcaatgggacatgagtgtccctgtatctgcgccactgccgcaagggaagcctcaggaaccagcacctggaggccaggatagccaagccctgggtgagcgagaggctggagaacacaggagctcacccagggctgctgcccaaccatgggccactgtgaacagacttcagtcctctgtttttgtttcataagccgttgagacatctgatggacttggcttaggccctgctgggacatcccacgtgtgatccctttcactccatcaggacaccaggactgtccttaggaaaatgtccttgagatggcagcaggagtcatattttctgtgtgtgtgtttcggaaagccgctgtgtcctgcctcagcacaaagacccagtgtcatttgctcctcctgttcctgtgccactccagaacctcagcagatctgagccaccgcctgccagtgtgagaggcggccactttcatggcagctcatcaggcgcagggccccagacagcttcccagcaggccctagagcccggcctgggccaatgatggagggcggccgccagcccagggcctgcccatccagaagggactccccagggcctgggggaggagacccttggaaaagtcctctcttcccagctcctgattctggatctgagattctcagatcacaggcccctgtgctccaggccgaggctgggctaccctcagggagatccagagactcatgcccatggccatccatgcgtggacgctgtgtggagagtccaggatgacgggatcccgcacaagctcccttcagtccttcagggctgggccatgtggttgatttttctaaagctggagaaaggaagaattgtgccttgcatattacttgagcttaaactgacaacctggatgtaaataggagcctttctactggtttatttaataaagttctatgtgattttttaa

SEQ ID NO: 311621 - DNA, 5898 bp, Homo sapiens
cagggcactaaagaggggacagacggccattgacgcggccctcacctctgtggtggaccaggatggaggggtccacatactacaggtgcctgtgtggaaccagcaggaggtggaaattcacatcccgatcaccctgtatcccagcatcttgacatttccgtggcaaccaaagacgggcgcctatcagtacacaataagggcccacggtggcagtgggaacttcagctggtcttcgtcaagccacctggttgccacagttactgtcaagggcgtgatgaccacaggcagtgacatcgggttcagtgtgatccaggcacatgatgtgcagaacccactccatttcggtgagatgaaggtgtatgtgatcgagccccacagcatggagtttgccccgtgccaggtggaggcacgtgtgggccaggccctggagctgcccctgaggatcagtggcctcatgcccggcggggccagtgaggtggtcaccttgagcgactgctcccactttgactcggctgtcgaggtggagaaccagggtgtgttccagccactcccagggaggctgccgccaggctctgagcactgcagcggcgtccgggtaaaggccgaggcccagggctctaccacgcttcttgtgagctacagacacggccacgtccacctgagtgccaagatcaccattgctgcctacctgcccctcaaggctgtggatccctcctctgttgccttggtaaccctgggctcctcaaaggagatgctgtttgaaggaggtcccagaccttggatcctcgagccgtccaaattcttccagaacgtcaccgctgaggacactgacagcatcggcctggctctctttgccccccattcctcccggaattatcagcaacactggatccttgtgacctgtcaggccttgggtgagcaggtcatcgccctgtcggtggggaacaagcccagcctcaccaacccctttcctgcggtggagcctgccgtggtgaagttcgtctgcgccccaccgtccaggctcaccctcgcgcctgtctacaccagcccccagctggacatgtcctgtccgctgctgcagcagaacaagcaggtggtcccagtgtccagccaccgcaaccccctgctggacctggctgcttacgaccaggagggccgccggttcgacaacttcagctctctgagcatccagtgggagtccaccaggccagtgttggccagcatcgagcctgagctgcccatgcagctggtgtcccaggacgatgagagtggccaaaagaagctgcacggtttgcaggccattttggttcacgaggcatcaggaaccacagccatcactgccactgccactggctaccaggagtcccacctcagctctgccagaacaaagcagccgcatgaccctctggtgcctctgtcggcctccatagagctcatcctggtggaggacgtgagggtgagcccagaagaggtgaccatctacaaccaccctggcatccaggcagagctccgcatcagggaaggctcaggttacttcttcctcaacaccagcaccgcagatgttgtcaaggtggcctaccaggaggccaggggtgtcgccatggtgcaccctttgctcccgggctcatccaccatcatgatccatgacttgtgcctcgtcttcccggccccagccaaggctgtcgtttacgtgtcggacattcaggagctgtacatccgtgtggttgacaaggtggagattgggaagacagtgaaggcatacgtccgcgtgctggacttgcacaagaagcccttccttgccaaatacttcccctttatggacctgaagctccgagcagcctccccgatcattacattggtggcccttgatgaagcccttgacaactacaccatcacattcctcatccgcggtgtggccatcggccagaccagtctaactgcaagtgtgaccaataaagctggacagagaatcaactcagccccacaacagattgaagtctttcccccgttcaggctgatgcccaggaaggtgacactgcttatcggggccacgatgcaggtcacctccgagggcggcccccagcctcagtccaacatccttttctccatcagcaatgagagcgttgcgctggtgagcgctgctgggctggtacagggcctcgccatcgggaacggcactgtgtctgggctcgtgcaggcagtggatgcagagaccggcaaggtggtcatcatctctcaggacctcgtgcaggtggaggtgctgctgctaagggccgtgaggatccgcgcccccatcatgcggatgaggacgggcacccagatgcccatctatgtcaccggcatcaccaaccaccagaaccctttctcctttggcaatgccgtgccaggcctgaccttccactggtctgtcaccaagcgggacgtcctggacctccgagggcggcaccacgaggcgtcgatccgactcccgtcacagtacaactttgccatgaacgtgctcggccgggtaaaaggccggaccgggctgagggtggtggtcaaggctgtggaccccacatcggggcagctgtatggcctggccagagaactctcggatgagatccaagtccaggtgtttgagaagctgcagctgctcaaccctgaaatagaagcagaacaaatattaatgtcgcccaactcatatataaagctgcagacaaacagggatggtgcagcctctctgagctaccgcgtcctggatggacccgaaaaggttccagttgtgcatgttgatgagaaaggctttctagcatcagggtctatgatcgggacatccaccatcgaagtgattgcacaagagccctttggggccaaccaaaccatcattgttgctgtaaaggtatcccctgtttcctacctgagggtttccatgagccctgtcctgcacacccagaacaaggaggccctggtggccgtgcctttgggaatgaccgtgaccttcactgtccacttccacgacaactctggagatgtcttccatgctcacagttcggtcctcaactttgccactaacagagacgactttgtgcagatcgggaagggccccaccaacaacacctgcgttgtccgcacagtcagcgtgggcctgacactgctccgtgtgtgggacgcagagcacccgggcctctcggacttcatgcccctgcctgtcctacaggccatctccccagagctgtctggggccatggtggtgggggacgtgctctgtctggccactgttctgaccagcctggaaggcctctcaggaacctggagctcctcagccaacagcatcctccacatcgaccccaagacgggtgtggctgtggcccgggccgtgggatccgtgacggtttactatgaggtcgctgggcacctgaggacctacaaggaggtggtggtcagcgtccctcagaggatcatggcccgtcacctccaccccatccagaccagcttccaggaggctacagcctccaaagtgattgttgccgtgggagacagaagctctaacctgagaggcgagtgcacccccacccagagggaagtcatccaggccttgcacccagagaccctcatcagctgccagtcccagttcaagccggccgtctttgatttcccatctcaagatgtgttcaccgtggagccacagtttgacactgctctcggccagtacttctgctcaatcacaatgcacaggctgacggacaagcagcggaagcacctgagcatgaagaagacagctctggtggtcagtgcctccctctccagcagccacttctccacagagcaggtgggggccgaggtgcccttcagcccaggtctcttcgccgaccaggctgaaatccttttgagcaaccactacaccagttccgagatcagggtctttggtgccccggaggttctggagaacttggaggtgaaatccgggtccccggccgtgctggcattcgcaaaggagaagtcttttgggtggcccagcttcatcacatacacggtcggcgtctcggaccccgcggctggcagccaagggcctctgtccactaccctgaccttctccagccccgtgaccaaccaagccattgccatcccagtgacagtggcttttgtgatggatcgccgtgggcccggtccttatggagccagcctcttccagcacttcctggattcctaccaggtcatgttcttcacgctcttcgccctgttggctgggacagcggtcatgatcatagcctaccacactgtctgcacgccccgggatcttgctgtgcctgcagccctcacgcctcgagccagccctggacacagcccccactatttcgctgcctcatcacccacatctcccaatgcattgcctcctgctcgcaaagccagccctccctcagggctgtggagcccagcctatgcctcccactaggccgcgtgaaggttcccggaggatgggtctcagccgagcctcgtgcacccccaagatggaacatccctgctgcattcacactggaacaagcccctccagatgagtgccccggccccaggccagcttcactgccgtctcttcacacagagctgtagtttcggctctgcccattagctcattttatgtaggagttttaaatgtgtgtttttttcctttcaagtcttacaaagctaagactttttggctcattcctttttgcatggttgtctagggtttctggacaatgtgctgttgcatttttattttcctagccttgctaaaatctttcccttctcaagactttgagcagttagaagtgctctttagaagttgtctgtgggtgatgttactgtagtggtctcagggaaaggattgtccagttactttagggggtttttggtggggtttttccccctgtgaaaacttactttgcccctagtctggctgctgctaggacttctgaggagcaatgggacatgagtgtccctgtatctgcgccactgccgcaagggaagcctcaggaaccagcacctggaggccaggatagccaagccctgggtgagcgagaggctggagaacacaggagctcacccagggctgctgcccaaccatgggccactgtgaacagacttcagtcctctgtttttgtttcataagccgttgagacatctgatggacttggcttaggccctgctgggacatcccacgtgtgatccctttcactccatcaggacaccaggactgtccttaggaaaatgtccttgagatggcagcaggagtcatattttctgtgtgtgtgtttcggaaagccgctgtgtcctgcctcagcacaaagacccagtgtcatttgctcctcctgttcctgtgccactccagaacctcagcagatctgagccaccgcctgccagtgtgagaggcggccactttcatggcagctcatcaggcgcagggccccagacagcttcccagcaggccctagagcccggcctgggccaatgatggagggcggccgccagcccagggcctgcccatccagaagggactccccagggcctgggggaggagacccttggaaaagtcctctcttcccagctcctgattctggatctgagattctcagatcacaggcccctgtgctccaggccgaggctgggctaccctcagggagatccagagactcatgcccatggccatccatgcgtggacgctgtgtggagagtccaggatgacgggatcccgcacaagctcccttcagtccttcagggctgggccatgtggttgatttttctaaagctggagaaaggaagaattgtgccttgcatattacttgagcttaaactgacaacctggatgtaaataggagcctttctactggtttatttaataaagttctatgtgattttttaaaaaaaaaaacgcaaaaaaca

SEQ ID NO: 311622 - DNA, 5967 bp, Homo sapiens
  misc_feature (5879)..(5879): n is a, c, g, or t
cagggcactaaagaggggacagacggccattgacgcggccctcacctctgtggtggaccaggatggaggggtccacatactacaggtgcctgtgtggaaccagcaggaggtggaaattcacatcccgatcaccctgtatcccagcatcttgacatttccgtggcaaccaaagacgggcgcctatcagtacacaataagggcccacggtggcagtgggaacttcagctggtcttcgtcaagccacctggttgccacagttactgtcaagggcgtgatgaccacaggcagtgacatcgggttcagtgtgatccaggcacatgatgtgcagaacccactccatttcggtgagatgaaggtgtatgtgatcgagccccacagcatggagtttgccccgtgccaggtggaggcacgtgtgggccaggccctggagctgcccctgaggatcagtggcctcatgcccggcggggccagtgaggtggtcaccttgagcgactgctcccactttgactcggctgtcgaggtggagaaccagggtgtgttccagccactcccagggaggctgccgccaggctctgagcactgcagcggcgtccgggtaaaggccgaggcccagggctctaccacgcttcttgtgagctacagacacggccacgtccacctgagtgccaagatcaccattgctgcctacctgcccctcaaggctgtggatccctcctctgttgccttggtaaccctgggctcctcaaaggagatgctgtttgaaggaggtcccagaccttggatcctcgagccgtccaaattcttccagaacgtcaccgctgaggacactgacagcatcggcctggctctctttgccccccattcctcccggaattatcagcaacactggatccttgtgacctgtcaggccttgggtgagcaggtcatcgccctgtcggtggggaacaagcccagcctcaccaacccctttcctgcggtggagcctgccgtggtgaagttcgtctgcgccccaccgtccaggctcaccctcgcgcctgtctacaccagcccccagctggacatgtcctgtccgctgctgcagcagaacaagcaggtggtcccagtgtccagccaccgcaaccccctgctggacctggctgcttacgaccaggagggccgccggttcgacaacttcagctctctgagcatccagtgggagtccaccaggccagtgttggccagcatcgagcctgagctgcccatgcagctggtgtcccaggacgatgagagtggccaaaagaagctgcacggtttgcaggccattttggttcacgaggcatcaggaaccacagccatcactgccactgccactggctaccaggagtcccacctcagctctgccagaacaaagcagccgcatgaccctctggtgcctctgtcggcctccatagagctcatcctggtggaggacgtgagggtgagcccagaagaggtgaccatctacaaccaccctggcatccaggcagagctccgcatcagggaaggctcaggttacttcttcctcaacaccagcaccgcagatgttgtcaaggtggcctaccaggaggccaggggtgtcgccatggtgcaccctttgctcccgggctcatccaccatcatgatccatgacttgtgcctcgtcttcccggccccagccaaggctgtcgtttacgtgtcggacattcaggagctgtacatccgtgtggttgacaaggtggagattgggaagacagtgaaggcatacgtccgcgtgctggacttgcacaagaagcccttccttgccaaatacttcccctttatggacctgaagctccgagcagcctccccgatcattacattggtggcccttgatgaagcccttgacaactacaccatcacattcctcatccgcggtgtggccatcggccagaccagtctaactgcaagtgtgaccaataaagctggacagagaatcaactcagccccacaacagattgaagtctttcccccgttcaggctgatgcccaggaaggtgacactgcttatcggggccacgatgcaggtcacctccgagggcggcccccagcctcagtccaacatccttttctccatcagcaatgagagcgttgcgctggtgagcgctgctgggctggtacagggcctcgccatcgggaacggcactgtgtctgggctcgtgcaggcagtggatgcagagaccggcaaggtggtcatcatctctcaggacctcgtgcaggtggaggtgctgctgctaagggccgtgaggatccgcgcccccatcatgcggatgaggacgggcacccagatgcccatctatgtcaccggcatcaccaaccaccagaaccctttctcctttggcaatgccgtgccaggcctgaccttccactggtctgtcaccaagcgggacgtcctggacctccgagggcggcaccacgaggcgtcgatccgactcccgtcacagtacaactttgccatgaacgtgctcggccgggtaaaaggccggaccgggctgagggtggtggtcaaggctgtggaccccacatcggggcagctgtatggcctggccagagaactctcggatgagatccaagtccaggtgtttgagaagctgcagctgctcaaccctgaaatagaagcagaacaaatattaatgtcgcccaactcatatataaagctgcagacaaacagggatggtgcagcctctctgagctaccgcgtcctggatggacccgaaaaggttccagttgtgcatgttgatgagaaaggctttctagcatcagggtctatgatcgggacatccaccatcgaagtgattgcacaagagccctttggggccaaccaaaccatcattgttgctgtaaaggtatcccctgtttcctacctgagggtttccatgagccctgtcctgcacacccagaacaaggaggccctggtggccgtgcctttgggaatgaccgtgaccttcactgtccacttccacgacaactctggagatgtcttccatgctcacagttcggtcctcaactttgccactaacagagacgactttgtgcagatcgggaagggccccaccaacaacacctgcgttgtccgcacagtcagcgtgggcctgacactgctccgtgtgtgggacgcagagcacccgggcctctcggacttcatgcccctgcctgtcctacaggccatctccccagagctgtctggggccatggtggtgggggacgtgctctgtctggccactgttctgaccagcctggaaggcctctcaggaacctggagctcctcagccaacagcatcctccacatcgaccccaagacgggtgtggctgtggcccgggccgtgggatccgtgacggtttactatgaggtcgctgggcacctgaggacctacaaggaggtggtggtcagcgtccctcagaggatcatggcccgtcacctccaccccatccagaccagcttccaggaggctacagcctccaaagtgattgttgccgtgggagacagaagctctaacctgagaggcgagtgcacccccacccagagggaagtcatccaggccttgcacccagagaccctcatcagctgccagtcccagttcaagccggccgtctttgatttcccatctcaagatgtgttcaccgtggagccacagtttgacactgctctcggccagtacttctgctcaatcacaatgcacaggctgacggacaagcagcggaagcacctgagcatgaagaagacagctctggtggtcagtgcctccctctccagcagccacttctccacagagcaggtgggggccgaggtgcccttcagcccaggtctcttcgccgaccaggctgaaatccttttgagcaaccactacaccagttccgagatcagggtctttggtgccccggaggttctggagaacttggaggtgaaatccgggtccccggccgtgctggcattcgcaaaggagaagtcttttgggtggcccagcttcatcacatacacggtcggcgtctcggaccccgcggctggcagccaagggcctctgtccactaccctgaccttctccagccccgtgaccaaccaagccattgccatcccagtgacagtggcttttgtgatggatcgccgtgggcccggtccttatggagccagcctcttccagcacttcctggattcctaccaggtcatgttcttcacgctcttcgccctgttggctgggacagcggtcatgatcatagcctaccacactgtctgcacgccccgggatcttgctgtgcctgcagccctcacgcctcgagccagccctggacacagcccccactatttcgctgcctcatcacccacatctcccaatgcattgcctcctgctcgcaaagccagccctccctcagggctgtggagcccagcctatgcctcccactaggccgcgtgaaggttcccggaggatgggtctcagccgagcctcgtgcacccccaagatggaacatccctgctgcattcacactggaacaagcccctccagatgagtgccccggccccaggccagcttcactgccgtctcttcacacagagctgtagtttcggctctgcccattagctcattttatgtaggagttttaaatgtgtgtttttttcctttcaagtcttacaaagctaagactttttggctcattcctttttgcatggttgtctagggtttctggacaatgtgctgttgcatttttattttcctagccttgctaaaatctttcccttctcaagactttgagcagttagaagtgctctttagaagttgtctgtgggtgatgttactgtagtggtctcagggaaaggattgtccagttactttagggggtttttggtggggtttttccccctgtgaaaacttactttgcccctagtctggctgctgctaggacttctgaggagcaatgggacatgagtgtccctgtatctgcgccactgccgcaagggaagcctcaggaaccagcacctggaggccaggatagccaagccctgggtgagcgagaggctggagaacacaggagctcacccagggctgctgcccaaccatgggccactgtgaacagacttcagtcctctgtttttgtttcataagccgttgagacatctgatggacttggcttaggccctgctgggacatcccacgtgtgatccctttcactccatcaggacaccaggactgtccttaggaaaatgtccttgagatggcagcaggagtcatattttctgtgtgtgtgtttcggaaagccgctgtgtcctgcctcagcacaaagacccagtgtcatttgctcctcctgttcctgtgccactccagaacctcagcagatctgagccaccgcctgccagtgtgagaggcggccactttcatggcagctcatcaggcgcagggccccagacagcttcccagcaggccctagagcccggcctgggccaatgatggagggcggccgccagcccagggcctgcccatccagaagggactccccagggcctgggggaggagacccttggaaaagtcctctcttcccagctcctgattctggatctgagattctcagatcacaggcccctgtgctccaggccgaggctgggctaccctcagggagatccagagactcatgcccatggccatccatgcgtggacgctgtgtggagagtccaggatgacgggatcccgcacaagctcccttcagtccttcagggctgggccatgtggttgatttttctaaagctggagaaaggaagaattgtgccttgcatattacttgagcttaaactgacaacctggatgtaaataggagcctttctactggtttatttaataaagttctatgtgattttttaanaaaaaaaaacccggcttattcgtggggaaaggttaggctgcactgtccgccctttgaaggggaccggccaggagtataacgcggaaga

SEQ ID NO: 311623 - DNA, 4173 bp, Homo sapiens
cagggcactaaagaggggacagacggccattgacgcggccctcacctctgtggtggaccaggatggaggggtccacatactacaggtgcctgtgtggaaccagcaggaggtggaaattcacatcccgatcaccctgtatcccagcatcttgacatttccgtggcaaccaaagacgggcgcctatcagtacacaataagggcccacggtggcagtgggaacttcagctggtcttcgtcaagccacctggttgccacagttactgtcaagggcgtgatgaccacaggcagtgacatcgggttcagtgtgatccaggcacatgatgtgcagaacccactccatttcggtgagatgaaggtgtatgtgatcgagccccacagcatggagtttgccccgtgccaggtggaggcacgtgtgggccaggccctggagctgcccctgaggatcagtggcctcatgcccggcggggccagtgaggtggtcaccttgagcgactgctcccactttgactcggctgtcgaggtggagaaccagggtgtgttccagccactcccagggaggctgccgccaggctctgagcactgcagcggcgtccgggtaaaggccgaggcccagggctctaccacgcttcttgtgagctacagacacggccacgtccacctgagtgccaagatcaccattgctgcctacctgcccctcaaggctgtggatccctcctctgttgccttggtaaccctgggctcctcaaaggagatgctgtttgaaggaggtcccagaccttggatcctcgagccgtccaaattcttccagaacgtcaccgctgaggacactgacagcatcggcctggctctctttgccccccattcctcccggaattatcagcaacactggatccttgtgacctgtcaggccttgggtgagcaggtcatcgccctgtcggtggggaacaagcccagcctcaccaacccctttcctgcggtggagcctgccgtggtgaagttcgtctgcgccccaccgtccaggctcaccctcgcgcctgtctacaccagcccccagctggacatgtcctgtccgctgctgcagcagaacaagcaggtggtcccagtgtccagccaccgcaaccccctgctggacctggctgcttacgaccaggagggccgccggttcgacaacttcagctctctgagcatccagtgggagtccaccaggccagtgttggccagcatcgagcctgagctgcccatgcagctggtgtcccaggacgatgagagtggccaaaagaagctgcacggtttgcaggccattttggttcacgaggcatcaggaaccacagccatcactgccactgccactggctaccaggagtcccacctcagctctgccagaacaaagcagccgcatgaccctctggtgcctctgtcggcctccatagagctcatcctggtggaggacgtgagggtgagcccagaagaggtgaccatctacaaccaccctggcatccaggcagagctccgcatcagggaaggctcaggttacttcttcctcaacaccagcaccgcagatgttgtcaaggtggcctaccaggaggccaggggtgtcgccatggtgcaccctttgctcccgggctcatccaccatcatgatccatgacttgtgcctcgtcttcccggccccagccaaggctgtcgtttacgtgtcggacattcaggagctgtacatccgtgtggttgacaaggtggagattgggaagacagtgaaggcatacgtccgcgtgctggacttgcacaagaagcccttccttgccaaatacttcccctttatggacctgaagctccgagcagcctccccgatcattacattggtggcccttgatgaagcccttgacaactacaccatcacattcctcatccgcggtgtggccatcggccagaccagtctaactgcaagtgtgaccaataaagctggacagagaatcaactcagccccacaacagattgaagtctttcccccgttcaggctgatgcccaggaaggtgacactgcttatcggggccacgatgcaggtcacctccgagggcggcccccagcctcagtccaacatccttttctccatcagcaatgagagcgttgcgctggtgagcgctgctgggctggtacagggcctcgccatcgggaacggcactgtgtctgggctcgtgcaggcagtggatgcagagaccggcaaggtggtcatcatctctcaggacctcgtgcaggtggaggtgctgctgctaagggccgtgaggatccgcgcccccatcatgcggatgaggacgggcacccagatgcccatctatgtcaccggcatcaccaaccaccagaaccctttctcctttggcaatgccgtgccaggcctgaccttccactggtctgtcaccaagcgggacgtcctggacctccgagggcggcaccacgaggcgtcgatccgactcccgtcacagtacaactttgccatgaacgtgctcggccgggtaaaaggccggaccgggctgagggtggtggtcaaggctgtggaccccacatcggggcagctgtatggcctggccagagaactctcggatgagatccaagtccaggtgtttgagaagctgcagctgctcaaccctgaaatagaagcagaacaaatattaatgtcgcccaactcatatataaagctgcagacaaacagggatggtgcagcctctctgagctaccgcgtcctggatggacccgaaaaggttccagttgtgcatgttgatgagaaaggctttctagcatcagggtctatgatcgggacatccaccatcgaagtgattgcacaagagccctttggggccaaccaaaccatcattgttgctgtaaaggtatcccctgtttcctacctgagggtttccatgagccctgtcctgcacacccagaacaaggaggccctggtggccgtgcctttgggaatgaccgtgaccttcactgtccacttccacgacaactctggagatgtcttccatgctcacagttcggtcctcaactttgccactaacagagacgactttgtgcagatcgggaagggccccaccaacaacacctgcgttgtccgcacagtcagcgtgggcctgacactgctccgtgtgtgggacgcagagcacccgggcctctcggacttcatgcccctgcctgtcctacaggccatctccccagagctgtctggggccatggtggtgggggacgtgctctgtctggccactgttctgaccagcctggaaggcctctcaggaacctggagctcctcagccaacagcatcctccacatcgaccccaagacgggtgtggctgtggcccgggccgtgggatccgtgacggtttactatgaggtcgctgggcacctgaggacctacaaggaggtggtggtcagcgtccctcagaggatcatggcccgtcacctccaccccatccagaccagcttccaggaggctacagcctccaaagtgattgttgccgtgggagacagaagctctaacctgagaggcgagtgcacccccacccagagggaagtcatccaggccttgcacccagagaccctcatcagctgccagtcccagttcaagccggccgtctttgatttcccatctcaagatgtgttcaccgtggagccacagtttgacactgctctcggccagtacttctgctcaatcacaatgcacaggctgacggacaagcagcggaagcacctgagcatgaagaagacagctctggtggtcagtgcctccctctccagcagccacttctccacagagcaggtgggggccgaggtgcccttcagcccaggtctcttcgccgaccaggctgaaatccttttgagcaaccactacaccagttccgagatcagggtctttggtgccccggaggttctggagaacttggaggtgaaatccgggtccccggccgtgctggcattcgcaaaggagaagtcttttgggtggcccagcttcatcacatacacggtcggcgtctcggaccccgcggctggcagccaagggcctctgtccactaccctgaccttctccacacttcctggattcctaccaggtcatgttcttcacgctcttcgccctgttggctgggacagcggtcatgatcataggtgaggaggctgcctgtatct

SEQ ID NO: 311624 - DNA, 1792 bp, Homo sapiens
cagggcactaaagaggggacagacggccattgacgcggccctcacctctgtggtggaccaggatggaggggtccacatactacaggtgcctgtgtggaaccagcaggaggtggaaattcacatcccgatcaccctgtatcccagcatcttgacatttccgtggcaaccaaagacgggcgcctatcagtacacaataagggcccacggtggcagtgggaacttcagctggtcttcgtcaagccacctggttgccacagttactgtcaagggcgtgatgaccacaggcagtgacatcgggttcagtgtgatccaggcacatgatgtgcagaacccactccatttcggtgagatgaaggtgtatgtgatcgagccccacagcatggagtttgccccgtgccaggtggaggcacgtgtgggccaggccctggagctgcccctgaggatcagtggcctcatgcccggcggggccagtgaggtggtcaccttgagcgactgctcccactttgactcggctgtcgaggtggagaaccagggtgtgttccagccactcccagggaggctgccgccaggctctgagcactgcagcggcgtccgggtaaaggccgaggcccagggctctaccacgcttcttgtgagctacagacacggccacgtccacctgagtgccaagatcaccattgctgcctacctgcccctcaaggctgtggatccctcctctgttgccttggtaaccctgggctcctcaaaggagatgctgtttgaaggaggtcccagaccttggatcctcgagccgtccaaattcttccagaacgtcaccgctgaggacactgacagcatcggcctggctctctttgccccccattcctcccggaattatcagcaacactggatccttgtgacctgtcaggccttgggtgagcaggtcatcgccctgtcggtggggaacaagcccagcctcaccaacccctttcctgcggtggagcctgccgtggtgaagttcgtctgcgccccaccgtccaggctcaccctcgcgcctgtctacaccagcccccagctggacatgtcctgtccgctgctgcagcagaacaagcaggtggtcccagtgtccagccaccgcaaccccctgctggacctggctgcttacgaccaggagggccgccggttcgacaacttcagctctctgagcatccagtgggagtccaccaggccagtgttggccagcatcgagcctgagctgcccatgcagctggtgtcccaggacgatgagagtggccaaaagaagctgcacggtttgcaggccattttggttcacgaggcatcaggaaccacagccatcactgccactgccactggctaccaggagtcccacctcagctctgccagaacaaagcagccgcatgaccctctggtgcctctgtcggcctccatagagctcatcctggtggaggacgtgagggtgagcccagaagaggtgaccatctacaaccaccctggcatccaggcagagctccgcatcagggaaggctcaggttacttcttcctcaacaccagcaccgcagatgttgtcaaggtggcctaccaggaggccaggggtgtcgccatggtaagcttgggccatcggtccccactgttggttttcattccttatctgggctgttgtgtggttaattgattgatcattttgaaagctagcacttgactcacactcggaatcccagaactttgggaggtcaagtacaagttgtgcaaagtgagaaagatctttgtgggcccaaagggaatccctcatctg

SEQ ID NO: 311625 - DNA, 438 bp, Homo sapiens
gggaaataatagtgtgatgaacatctgtctgtacattgacatgtttctctccattgtgttgttaggttaggttccagatggggaattcctgggttccagggctgtgggtattttcaaggcttttaccagattgtttgacgaaagaggcaaatccatgtacaccctccagcagtctgtcagagtgagggcttaattctatctacaccccattcctctggatctttgcaatgatccctgtgagtgctgcagatgacgagaatgagtttcaaacaggagatggggcttgcctgaccaccagcccccacaagcggggtgaggatgtggggctgggatgcccggctcctgcccgtgctgccttagaagaatgccaagtcttctgcctcttctgtccccaggctgtggatccctcctctgttgccttggtaaccctgggctcct

SEQ ID NO: 311626 - DNA, 692 bp, Homo sapiens
atgggtgaacccatgagtgtgaggataaatgtgtatgagtgtgagtacgtgcatgcacacgcacgtgtctctgaccctctgacttccccagcaggctaagggtgggtggctggtcctgtgatggcttttcctccgcaggcccacggtggcagtgggaacttcagctggtcttcgtcaagccacctggttgccacagttactgtcaagggcgtgatgaccacaggcagtgacatcgggttcagtgtgatccaggcacatgatgtgcagaacccactccatttcggtgagatgaaggtgagatctcagggccaagacaccccctgggaggctcggatggtggtctccagccgccccctctgagcaagcctcgacttcactcagaaacacccccaaccttgggtcctgtacttaggagctcaagccccagcccttcccttaggagctcacggccatgtcaggaagatggacaggatgtctcacaccagccaacaatgggcccagaaaggccagtgtccacagagctgggtttctggaggggagataatctaagagccattctagaaaattccccagacctgaaagatagtaatctccatttggaaggtccaccaagcactgggttgtaaactcacagtgaaagggcaccaccaggctccgagagaccaggccagactcctctctcttcactcacc

SEQ ID NO: 311627 - DNA, 401 bp, Homo sapiens
taccaagaacagctgtgggcccgggcctccagcaggtggcctggccctctgagaccaccatccttacatctaagagggacctgtggactgccctgtagacgtacagtagggcaggaacgtgatgggatgccacagtgggcctggtggttttggtaactcatcttcccattgatggcagatggagccagcctcttccagcacttcctggattcctaccaggtcatgttcttcacgctcttcgccctgttggctgggacagcggtcatgatcataggtgaggaggctgcctgtatctctgggtctgttcccctgccccgacctgctctaaccaaccctgtgctcttgcagcctaccacactgtctgcacgccccgggatcttgctgtgcctgcagccctcacg

SEQ ID NO: 311628 - DNA, 404 bp, Homo sapiens
tgcggccgccaactgggagcatgatgatctgaatggcactgcgtgggctgtggatgctggtatgggttccaaaaatgagggtggccagctggtcatcctcgataacagatattcagacttcatgaccatggcttaccccacaccgctcccatgacagtaagcagagtctaaggctgggcctgtctgtcactgatatgctgactctccctagattatatggggatggtgtgggcctggtgtagcggggttcagtccttcagggctgggccatgtggttgatttttctaaagctggagaaaggaagaattgtgccttgcatattacttgagcttaaactgacaacctggatgtaaataggagcctttctactggtttatttaataaagttctatgtgattttttaa

SEQ ID NO: 311629 - DNA, 3493 bp, Homo sapiens
ttatgctatcgtcgaccagcgctcgccacgcgtcgaggtcctggaccttcgagggcggcaccacgaggcgtcgatccgactcccgtcacagtacaactttgccatgaacgtgctcggccgggtaaaaggccggaccgggctgagggtggtggtcaaggctgtggaccccacatcggggcagctgtatggcctggccagagaactctcggatgagatccaagtccaggtgtttgagaagctgcagctgctcaaccctgaaatagaagcagaacaaatattaatgtcgcccaactcatatataaagctgcagacaaacagggatggtgcagcctctctgagctaccgcgtcctggatggacccgaaaaggttccagttgtgcatgttgatgagaaaggctttctagcatcagggtctatgatcgggacatccaccatcgaagtgattgcacaagagccctttggggccaaccaaaccatcattgttgctgtaaaggtatcccctgtttcctacctgagggtttccatgagccctgtcctgcacacccagaacaaggaggccctggtggccgtgcctttgggaatgaccgtgaccttcactgtccacttccacgacaactctggagatgtcttccatgctcacagttcggtcctcaactttgccactaacagagacgactttgtgcagatcgggaagggccccaccaacaacacctgcgttgtccgcacagtcagcgtgggcctgacactgctccgtgtgtgggacgcagagcacccgggcctctcggacttcatgcccctgcctgtcctacaggccatctccccagagctgtctggggccatggtggtgggggacgtgctctgtctggccactgttctgaccagcctggaaggcctctcaggaacctggagctcctcagccaacagcatcctccacatcgaccccaagacgggtgtggctgtggcccgggccgtgggatccgtgacggtttactatgaggtcgctgggcacctgaggacctacaaggaggtggtggtcagcgtccctcagaggatcatggcccgtcacctccaccccatccagaccagcttccaggaggctacagcctccaaagtgattgttgccgtgggagacagaagctctaacctgagaggcgagtgcacccccacccagagggaagtcatccaggccttgcacccagagaccctcatcagctgccagtcccagttcaagccggccgtctttgatttcccatctcaagatgtgttcaccgtggagccacagtttgacactgctctcggccagtacttctgctcaatcacaatgcacaggctgacggacaagcagcggaagcacctgagcatgaagaagacagctctggtggtcagtgcctccctctccagcagccacttctccacagagcaggtgggggccgaggtgcccttcagcccaggtctcttcgccgaccaggctgaaatccttttgagcaaccactacaccagttccgagatcagggtctttggtgccccggaggttctggagaacttggaggtgaaatccgggtccccggccgtgctggcattcgcaaaggagaagtcttttgggtggcccagcttcatcacatacacggtcggcgtctcggaccccgcggctggcagccaagggcctctgtccactaccctgaccttctccagccccgtgaccaaccaagccattgccatcccagtgacagtggcttttgtgatggatcgccgtgggcccggtccttatggagccagcctcttccagcacttcctggattcctaccaggtcatgttcttcacgctcttcgccctgttggctgggacagcggtcatgatcatagcctaccacactgtctgcacgccccgggatcttgctgtgcctgcagccctcacgcctcgagccagccctggacacagcccccactatttcgctgcctcatcacccacatctcccaatgcattgcctcctgctcgcaaagccagccctccctcagggctgtggagcccagcctatgcctcccactaggccgcgtgaaggttcccggaggatgggtctcagccgagcctcgtgcacccccaagatggaacatccctgctgcattcacactggaacaagcccctccagatgagtgccccggccccaggccagcttcactgccgtctcttcacacagagctgtagtttcggctctgcccattagctcattttatgtaggagttttaaatgtgtgtttttttcctttcaagtcttacaaagctaagactttttggctcattcctttttgcatggttgtctagggtttctggacaatgtgctgttgcatttttattttcctagccttgctaaaatctttcccttctcaagactttgagcagttagaagtgctctttagaagttgtctgtgggtgatgttactgtagtggtctcagggaaaggattgtccagttactttagggggtttttggtggggtttttccccctgtgaaaacttactttgcccctagtctggctgctgctaggacttctgaggagcaatgggacatgagtgtccctgtatctgcgccactgccgcaagggaagcctcaggaaccagcacctggaggccaggatagccaagccctgggtgagcgagaggctggagaacacaggagctcacccagggctgctgcccaaccatgggccactgtgaacagacttcagtcctctgtttttgtttcataagccgttgagacatctgatggacttggcttaggccctgctgggacatcccacgtgtgatccctttcactccatcaggacaccaggactgtccttaggaaaatgtccttgagatggcagcaggagtcatattttctgtgtgtgtgtttcggaaagccgctgtgtcctgcctcagcacaaagacccagtgtcatttgctcctcctgttcctgtgccactccagaacctcagcagatctgagccaccgcctgccagtgtgagaggcggccactttcatggcagctcatcaggcgcagggccccagacagcttcccagcaggccctagagcccggcctgggccaatgatggagggcggccgccagcccagggcctgcccatccagaagggactccccagggcctgggggaggagacccttggaaaagtcctctcttcccagctcctgattctggatctgagattctcagatcacaggcccctgtgctccaggccgaggctgggctaccctcagggagatccagagactcatgcccatggccatccatgcgtggacgctgtgtggagagtccaggatgacgggatcccgcacaagctcccttcagtccttcagggctgggccatgtggttgatttttctaaagctggagaaaggaagaattgtgccttgcatattacttgagcttaaactgacaacctggatgtaaataggagcctttctactggtttatttaataaagttctatgtgattttttaa

SEQ ID NO: 311630 - DNA, 3289 bp, Homo sapiens
aagttagtcgggaccgtggactcgagggcggacacgaggcgtcgatccgactcccgtcacagtacaactttgccatgaacgtgctcggccgggtaaaaggccggaccgggctgagggtggtggtcaaggctgtggaccccacatcggggcagctgtatggcctggccagagaactctcggatgagatccaagtccaggtgtttgagaagctgcagctgctcaaccctgaaatagaagcagaacaaatattaatgtcgcccaactcatatataaagctgcagacaaacaggtatcccctgtttcctacctgagggtttccatgagccctgtcctgcacacccagaacaaggaggccctggtggccgtgcctttgggaatgaccgtgaccttcactgtccacttccacgacaactctggagatgtcttccatgctcacagttcggtcctcaactttgccactaacagagacgactttgtgcagatcgggaagggccccaccaacaacacctgcgttgtccgcacagtcagcgtgggcctgacactgctccgtgtgtgggacgcagagcacccgggcctctcggacttcatgcccctgcctgtcctacaggccatctccccagagctgtctggggccatggtggtgggggacgtgctctgtctggccactgttctgaccagcctggaaggcctctcaggaacctggagctcctcagccaacagcatcctccacatcgaccccaagacgggtgtggctgtggcccgggccgtgggatccgtgacggtttactatgaggtcgctgggcacctgaggacctacaaggaggtggtggtcagcgtccctcagaggatcatggcccgtcacctccaccccatccagaccagcttccaggaggctacagcctccaaagtgattgttgccgtgggagacagaagctctaacctgagaggcgagtgcacccccacccagagggaagtcatccaggccttgcacccagagaccctcatcagctgccagtcccagttcaagccggccgtctttgatttcccatctcaagatgtgttcaccgtggagccacagtttgacactgctctcggccagtacttctgctcaatcacaatgcacaggctgacggacaagcagcggaagcacctgagcatgaagaagacagctctggtggtcagtgcctccctctccagcagccacttctccacagagcaggtgggggccgaggtgcccttcagcccaggtctcttcgccgaccaggctgaaatccttttgagcaaccactacaccagttccgagatcagggtctttggtgccccggaggttctggagaacttggaggtgaaatccgggtccccggccgtgctggcattcgcaaaggagaagtcttttgggtggcccagcttcatcacatacacggtcggcgtctcggaccccgcggctggcagccaagggcctctgtccactaccctgaccttctccagccccgtgaccaaccaagccattgccatcccagtgacagtggcttttgtgatggatcgccgtgggcccggtccttatggagccagcctcttccagcacttcctggattcctaccaggtcatgttcttcacgctcttcgccctgttggctgggacagcggtcatgatcatagcctaccacactgtctgcacgccccgggatcttgctgtgcctgcagccctcacgcctcgagccagccctggacacagcccccactatttcgctgcctcatcacccacatctcccaatgcattgcctcctgctcgcaaagccagccctccctcagggctgtggagcccagcctatgcctcccactaggccgcgtgaaggttcccggaggatgggtctcagccgagcctcgtgcacccccaagatggaacatccctgctgcattcacactggaacaagcccctccagatgagtgccccggccccaggccagcttcactgccgtctcttcacacagagctgtagtttcggctctgcccattagctcattttatgtaggagttttaaatgtgtgtttttttcctttcaagtcttacaaagctaagactttttggctcattcctttttgcatggttgtctagggtttctggacaatgtgctgttgcatttttattttcctagccttgctaaaatctttcccttctcaagactttgagcagttagaagtgctctttagaagttgtctgtgggtgatgttactgtagtggtctcagggaaaggattgtccagttactttagggggtttttggtggggtttttccccctgtgaaaacttactttgcccctagtctggctgctgctaggacttctgaggagcaatgggacatgagtgtccctgtatctgcgccactgccgcaagggaagcctcaggaaccagcacctggaggccaggatagccaagccctgggtgagcgagaggctggagaacacaggagctcacccagggctgctgcccaaccatgggccactgtgaacagacttcagtcctctgtttttgtttcataagccgttgagacatctgatggacttggcttaggccctgctgggacatcccacgtgtgatccctttcactccatcaggacaccaggactgtccttaggaaaatgtccttgagatggcagcaggagtcatattttctgtgtgtgtgtttcggaaagccgctgtgtcctgcctcagcacaaagacccagtgtcatttgctcctcctgttcctgtgccactccagaacctcagcagatctgagccaccgcctgccagtgtgagaggcggccactttcatggcagctcatcaggcgcagggccccagacagcttcccagcaggccctagagcccggcctgggccaatgatggagggcggccgccagcccagggcctgcccatccagaagggactccccagggcctgggggaggagacccttggaaaagtcctctcttcccagctcctgattctggatctgagattctcagatcacaggcccctgtgctccaggccgaggctgggctaccctcagggagatccagagactcatgcccatggccatccatgcgtggacgctgtgtggagagtccaggatgacgggatcccgcacaagctcccttcagtccttcagggctgggccatgtggttgatttttctaaagctggagaaaggaagaattgtgccttgcatattacttgagcttaaactgacaacctggatgtaaataggagcctttctactggtttatttaataaagttctatgtgattttttaa

SEQ ID NO: 311631 - DNA, 2012 bp, Homo sapiens
ccatgcttgacgtagatcaagaggatcccacggggatatgtgccccggaggttctggagaacttggaggtgaaatccgggtccccggccgtgctggcattcgcaaaggagaagtcttttgggtggcccagcttcatcacatacacggtcggcgtctcggaccccgcggctggcagccaagggcctctgtccactaccctgaccttctccagccccgtgaccaaccaagccattgccatcccagtgacagtggcttttgtgatggatcgccgtgggcccggtccttatggagccagcctcttccagcacttcctggattcctaccaggtcatgttcttcacgctcttcgccctgttggctgggacagcggtcatgatcatagcctaccacactgtctgcacgccccgggatcttgctgtgcctgcagccctcacgcctcgagccagccctggacacagcccccactatttcgctgcctcatcacccacatctcccaatgcattgcctcctgctcgcaaagccagccctccctcagggctgtggagcccagcctatgcctcccactaggccgcgtgaaggttcccggaggatgggtctcagccgagcctcgtgcacccccaagatggaacatccctgctgcattcacactggaacaagcccctccagatgagtgccccggccccaggccagcttcactgccgtctcttcacacagagctgtagtttcggctctgcccattagctcattttatgtaggagttttaaatgtgtgtttttttcctttcaagtcttacaaagctaagactttttggctcattcctttttgcatggttgtctagggtttctggacaatgtgctgttgcatttttattttcctagccttgctaaaatctttcccttctcaagactttgagcagttagaagtgctctttagaagttgtctgtgggtgatgttactgtagtggtctcagggaaaggattgtccagttactttagggggtttttggtggggtttttccccctgtgaaaacttactttgcccctagtctggctgctgctaggacttctgaggagcaatgggacatgagtgtccctgtatctgcgccactgccgcaagggaagcctcaggaaccagcacctggaggccaggatagccaagccctgggtgagcgagaggctggagaacacaggagctcacccagggctgctgcccaaccatgggccactgtgaacagacttcagtcctctgtttttgtttcataagccgttgagacatctgatggacttggcttaggccctgctgggacatcccacgtgtgatccctttcactccatcaggacaccaggactgtccttaggaaaatgtccttgagatggcagcaggagtcatattttctgtgtgtgtgtttcggaaagccgctgtgtcctgcctcagcacaaagacccagtgtcatttgctcctcctgttcctgtgccactccagaacctcagcagatctgagccaccgcctgccagtgtgagaggcggccactttcatggcagctcatcaggcgcagggccccagacagcttcccagcaggccctagagcccggcctgggccaatgatggagggcggccgccagcccagggcctgcccatccagaagggactccccagggcctgggggaggagacccttggaaaagtcctctcttcccagctcctgattctggatctgagattctcagatcacaggcccctgtgctccaggccgaggctgggctaccctcagggagatccagagactcatgcccatggccatccatgcgtggacgctgtgtggagagtccaggatgacgggatcccgcacaagctcccttcagtccttcagggctgggccatgtggttgatttttctaaagctggagaaaggaagaattgtgccttgcatattacttgagcttaaactgacaacctggatgtaaataggagcctttctactggtttatttaataaagttctatgtgattttttaa

SEQ ID NO: 311632 - DNA, 1969 bp, Homo sapiens
cccccagctctgatgtctcttccaggtgaaatccgggtccccggccgtgctggcattcgcaaaggagaagtcttttgggtggcccagcttcatcacatacacggtcggcgtctcggaccccgcggctggcagccaagggcctctgtccactaccctgaccttctccagccccgtgaccaaccaagccattgccatcccagtgacagtggcttttgtgatggatcgccgtgggcccggtccttatggagccagcctcttccagcacttcctggattcctaccaggtcatgttcttcacgctcttcgccctgttggctgggacagcggtcatgatcatagcctaccacactgtctgcacgccccgggatcttgctgtgcctgcagccctcacgcctcgagccagccctggacacagcccccactatttcgctgcctcatcacccacatctcccaatgcattgcctcctgctcgcaaagccagccctccctcagggctgtggagcccagcctatgcctcccactaggccgcgtgaaggttcccggaggatgggtctcagccgagcctcgtgcacccccaagatggaacatccctgctgcattcacactggaacaagcccctccagatgagtgccccggccccaggccagcttcactgccgtctcttcacacagagctgtagtttcggctctgcccattagctcattttatgtaggagttttaaatgtgtgtttttttcctttcaagtcttacaaagctaagactttttggctcattcctttttgcatggttgtctagggtttctggacaatgtgctgttgcatttttattttcctagccttgctaaaatctttcccttctcaagactttgagcagttagaagtgctctttagaagttgtctgtgggtgatgttactgtagtggtctcagggaaaggattgtccagttactttagggggtttttggtggggtttttccccctgtgaaaacttactttgcccctagtctggctgctgctaggacttctgaggagcaatgggacatgagtgtccctgtatctgcgccactgccgcaagggaagcctcaggaaccagcacctggaggccaggatagccaagccctgggtgagcgagaggctggagaacacaggagctcacccagggctgctgcccaaccatgggccactgtgaacagacttcagtcctctgtttttgtttcataagccgttgagacatctgatggacttggcttaggccctgctgggacatcccacgtgtgatccctttcactccatcaggacaccaggactgtccttaggaaaatgtccttgagatggcagcaggagtcatattttctgtgtgtgtgtttcggaaagccgctgtgtcctgcctcagcacaaagacccagtgtcatttgctcctcctgttcctgtgccactccagaacctcagcagatctgagccaccgcctgccagtgtgagaggcggccactttcatggcagctcatcaggcgcagggccccagacagcttcccagcaggccctagagcccggcctgggccaatgatggagggcggccgccagcccagggcctgcccatccagaagggactccccagggcctgggggaggagacccttggaaaagtcctctcttcccagctcctgattctggatctgagattctcagatcacaggcccctgtgctccaggccgaggctgggctaccctcagggagatccagagactcatgcccatggccatccatgcgtggacgctgtgtggagagtccaggatgacgggatcccgcacaagctcccttcagtccttcagggctgggccatgtggttgatttttctaaagctggagaaaggaagaattgtgccttgcatattacttgagcttaaactgacaacctggatgtaaataggagcctttctactggtttatttaataaagttctatgtgattttttaa

SEQ ID NO: 311633 - DNA, 2075 bp, Homo sapiens
gggaggccacgggtgctcgggctcctcgcggctctgctgccttctgcagctgctctggcagcaggtgcctgccctttctagctgcctctctcagcgtgctcctccctgggttttgggagccacacctggatctctgcaaggtctccggagcactgcagaatcgctgctcccctcggggtctttgttcctgtggcgctcttgcccgaggctgcattgcattcagatgcacggggcctccctgcctcatgccccctggacagatgctgctgtggtcctgaaacttgagacacgttctccccggaaggctctgcgctcctgggtgttagggtggcatcccaggcctctctgtgtgaatgaggccagctcagaaggtgcccgtggacttccctctgctggccggggaggcctcggggcatcactgtgagagtgtcctgggtgaggcaggcgcctgctgaatgctggctgtaactgaagagtgcgccgctttccctggctctgctgctaacatcgtctctcttcccaccctagatttcgctgcctcatcacccacatctcccaatgcattgcctcctgctcgcaaagccagccctccctcagggctgtggagcccagcctatgcctcccactaggccgcgtgaaggttcccggaggatgggtctcagccgagcctcgtgcacccccaagatggaacatccctgctgcattcacactggaacaagcccctccagatgagtgccccggccccaggccagcttcactgccgtctcttcacacagagctgtagtttcggctctgcccattagctcattttatgtaggagttttaaatgtgtgtttttttcctttcaagtcttacaaagctaagactttttggctcattcctttttgcatggttgtctagggtttctggacaatgtgctgttgcatttttattttcctagccttgctaaaatctttcccttctcaagactttgagcagttagaagtgctctttagaagttgtctgtgggtgatgttactgtagtggtctcagggaaaggattgtccagttactttagggggtttttggtggggtttttccccctgtgaaaacttactttgcccctagtctggctgctgctaggacttctgaggagcaatgggacatgagtgtccctgtatctgcgccactgccgcaagggaagcctcaggaaccagcacctggaggccaggatagccaagccctgggtgagcgagaggctggagaacacaggagctcacccagggctgctgcccaaccatgggccactgtgaacagacttcagtcctctgtttttgtttcataagccgttgagacatctgatggacttggcttaggccctgctgggacatcccacgtgtgatccctttcactccatcaggacaccaggactgtccttaggaaaatgtccttgagatggcagcaggagtcatattttctgtgtgtgtgtttcggaaagccgctgtgtcctgcctcagcacaaagacccagtgtcatttgctcctcctgttcctgtgccactccagaacctcagcagatctgagccaccgcctgccagtgtgagaggcggccactttcatggcagctcatcaggcgcagggccccagacagcttcccagcaggccctagagcccggcctgggccaatgatggagggcggccgccagcccagggcctgcccatccagaagggactccccagggcctgggggaggagacccttggaaaagtcctctcttcccagctcctgattctggatctgagattctcagatcacaggcccctgtgctccaggccgaggctgggctaccctcagggagatccagagactcatgcccatggccatccatgcgtggacgctgtgtggagagtccaggatgacgggatcccgcacaagctcccttcagtccttcagggctgggccatgtggttgatttttctaaagctggagaaaggaagaattgtgccttgcatattacttgagcttaaactgacaacctggatgtaaataggagcctttctactggtttatttaataaagttctatgtgattttttaa

SEQ ID NO: 311634 - DNA, 4517 bp, Homo sapiens
cagggcactaaagaggggacagacggccattgacgcggccctcacctctgtggtggaccaggatggaggggtccacatactacaggtgcctgtgtggaaccagcaggaggtggaaattcacatcccgatcaccctgtatcccagcatcttgacatttccgtggcaaccaaagacgggcgcctatcagtacacaataagggcccacggtggcagtgggaacttcagctggtcttcgtcaagccacctggttgccacagttactgtcaagggcgtgatgaccacaggcagtgacatcgggttcagtgtgatccaggcacatgatgtgcagaacccactccatttcggtgagatgaaggtgtatgtgatcgagccccacagcatggagtttgccccgtgccaggtggaggcacgtgtgggccaggccctggagctgcccctgaggatcagtggcctcatgcccggcggggccagtgaggtggtcaccttgagcgactgctcccactttgactcggctgtcgaggtggagaaccagggtgtgttccagccactcccagggaggctgccgccaggctctgagcactgcagcggcgtccgggtaaaggccgaggcccagggctctaccacgcttcttgtgagctacagacacggccacgtccacctgagtgccaagatcaccattgctgcctacctgcccctcaaggctgtggatccctcctctgttgccttggtaaccctgggctcctcaaaggagatgctgtttgaaggaggtcccagaccttggatcctcgagccgtccaaattcttccagaacgtcaccgctgaggacactgacagcatcggcctggctctctttgccccccattcctcccggaattatcagcaacactggatccttgtgacctgtcaggccttgggtgagcaggtcatcgccctgtcggtggggaacaagcccagcctcaccaacccctttcctgcggtggagcctgccgtggtgaagttcgtctgcgccccaccgtccaggctcaccctcgcgcctgtctacaccagcccccagctggacatgtcctgtccgctgctgcagcagaacaagcaggtggtcccagtgtccagccaccgcaaccccctgctggacctggctgcttacgaccaggagggccgccggttcgacaacttcagctctctgagcatccagtgggagtccaccaggccagtgttggccagcatcgagcctgagctgcccatgcagctggtgtcccaggacgatgagagtggccaaaagaagctgcacggtttgcaggccattttggttcacgaggcatcaggaaccacagccatcactgccactgccactggctaccaggagtcccacctcagctctgccagaacaaagcagccgcatgaccctctggtgcctctgtcggcctccatagagctcatcctggtggaggacgtgagggtgagcccagaagaggtgaccatctacaaccaccctggcatccaggcagagctccgcatcagggaaggctcaggttacttcttcctcaacaccagcaccgcagatgttgtcaaggtggcctaccaggaggccaggggtgtcgccatggtgcaccctttgctcccgggctcatccaccatcatgatccatgacttgtgcctcgtcttcccggccccagccaaggctgtcgtttacgtgtcggacattcaggagctgtacatccgtgtggttgacaaggtggagattgggaagacagtgaaggcatacgtccgcgtgctggacttgcacaagaagcccttccttgccaaatacttcccctttatggacctgaagctccgagcagcctccccgatcattacattggtggcccttgatgaagcccttgacaactacaccatcacattcctcatccgcggtgtggccatcggccagaccagtctaactgcaagtgtgaccaataaagctggacagagaatcaactcagccccacaacagattgaagtctttcccccgttcaggctgatgcccaggaaggtgacactgcttatcggggccacgatgcaggtcacctccgagggcggcccccagcctcagtccaacatccttttctccatcagcaatgagagcgttgcgctggtgagcgctgctgggctggtacagggcctcgccatcgggaacggcactgtgtctgggctcgtgcaggcagtggatgcagagaccggcaaggtggtcatcatctctcaggacctcgtgcaggtggaggtgctgctgctaagggccgtgaggatccgcgcccccatcatgcggatgaggacgggcacccagatgcccatctatgtcaccggcatcaccaaccaccagaaccctttctcctttggcaatgccgtgccaggcctgaccttccactggtctgtcaccaagcgggacgtcctggacctccgagggcggcaccacgaggcgtcgatccgactcccgtcacagtacaactttgccatgaacgtgctcggccgggtaaaaggccggaccgggctgagggtggtggtcaaggctgtggaccccacatcggggcagctgtatggcctggccagagaactctcggatgagatccaagtccaggtgtttgagaagctgcagctgctcaaccctgaaatagaagcagaacaaatattaatgtcgcccaactcatatataaagctgcagacaaacagggatggtgcagcctctctgagctaccgcgtcctggatggacccgaaaaggttccagttgtgcatgttgatgagaaaggctttctagcatcagggtctatgatcgggacatccaccatcgaagtgattgcacaagagccctttggggccaaccaaaccatcattgttgctgtaaaggtatcccctgtttcctacctgagggtttccatgagccctgtcctgcacacccagaacaaggaggccctggtggccgtgcctttgggaatgaccgtgaccttcactgtccacttccacgacaactctggagatgtcttccatgctcacagttcggtcctcaactttgccactaacagagacgactttgtgcagatcgggaagggccccaccaacaacacctgcgttgtccgcacagtcagcgtgggcctgacactgctccgtgtgtgggacgcagagcacccgggcctctcggacttcatgcccctgcctgtcctacaggccatctccccagagctgtctggggccatggtggtgggggacgtgctctgtctggccactgttctgaccagcctggaaggcctctcaggaacctggagctcctcagccaacagcatcctccacatcgaccccaagacgggtgtggctgtggcccgggccgtgggatccgtgacggtttactatgaggtcgctgggcacctgaggacctacaaggaggtggtggtcagcgtccctcagaggatcatggcccgtcacctccaccccatccagaccagcttccaggaggctacagcctccaaagtgattgttgccgtgggagacagaagctctaacctgagaggcgagtgcacccccacccagagggaagtcatccaggccttgcacccagagaccctcatcagctgccagtcccagttcaagccggccgtctttgatttcccatctcaagatgtgttcaccgtggagccacagtttgacactgctctcggccagtacttctgctcaatcacaatgcacaggctgacggacaagcagcggaagcacctgagcatgaagaagacagctctggtggtcagtgcctccctctccagcagccacttctccacagagcaggtgggggccgaggtgcccttcagcccaggtctcttcgccgaccaggctgaaatccttttgagcaaccactacaccagttccgagatcagggtctttggtgccccggaggttctggagaacttggaggtgaaatccgggtccccggccgtgctggcattcgcaaaggagaagtcttttgggtggcccagcttcatcacatacacggtcggcgtctcggaccccgcggctggcagccaagggcctctgtccactaccctgaccttctccagccccgtgaccaaccaagccattgccatcccagtgacagtggcttttgtgatggatcgccgtgggcccggtccttatggagccagcctcttccagcacttcctggattcctaccaggtcatgttcttcacgctcttcgccctgttggctgggacagcggtcatgatcatagcctaccacactgtctgcacgccccgggatcttgctgtgcctgcagccctcacgcctcgagccagccctggacacagcccccactatttcgctgcctcatcacccacatctcccaatgcattgcctcctgctcgcaaagccagccctccctcagggctgtggagcccagcctatgcctcccactaggttttccgcgcccactaggttttccgcgcccactaggttttccgcgcccactaggttttccgcgcccactaggttttccgcgccc

SEQ ID NO: 311635 - DNA, 1769 bp, Homo sapiens
cagggcactaaagaggggacagacggccattgacgcggccctcacctctgtggtggaccaggatggaggggtccacatactacaggtgcctgtgtggaaccagcaggaggtggaaattcacatcccgatcaccctgtatcccagcatcttgacatttccgtggcaaccaaagacgggcgcctatcagtacacaataagggcccacggtggcagtgggaacttcagctggtcttcgtcaagccacctggttgccacagttactgtcaagggcgtgatgaccacaggcagtgacatcgggttcagtgtgatccaggcacatgatgtgcagaacccactccatttcggtgagatgaaggtgtatgtgatcgagccccacagcatggagtttgccccgtgccaggtggaggcacgtgtgggccaggccctggagctgcccctgaggatcagtggcctcatgcccggcggggccagtgaggtggtcaccttgagcgactgctcccactttgactcggctgtcgaggtggagaaccagggtgtgttccagccactcccagggaggctgccgccaggctctgagcactgcagcggcgtccgggtaaaggccgaggcccagggctctaccacgcttcttgtgagctacagacacggccacgtccacctgagtgccaagatcaccattgctgcctacctgcccctcaaggctgtggatccctcctctgttgccttggtaaccctgggctcctcaaaggagatgctgtttgaaggaggtcccagaccttggatcctcgagccgtccaaattcttccagaacgtcaccgctgaggacactgacagcatcggcctggctctctttgccccccattcctcccggaattatcagcaacactggatccttgtgacctgtcaggccttgggtgagcaggtcatcgccctgtcggtggggaacaagcccagcctcaccaacccctttcctgcggtggagcctgccgtggtgaagttcgtctgcgccccaccgtccaggctcaccctcgcgcctgtctacaccagcccccagctggacatgtcctgtccgctgctgcagcagaacaagcaggtggtcccagtgtccagccaccgcaaccccctgctggacctggctgcttacgaccaggagggccgccggttcgacaacttcagctctctgagcatccagtgggagtccaccaggccagtgttggccagcatcgagcctgagctgcccatgcagctggtttgcaggccattttggttcacgaggcatcaggaaccacagccatcactgccactgccactggctaccaggagtcccacctcagctctgccagaacaaagcagccgcatgaccctctggtgcctctgtcggcctccatagagctcatcctggtggaggacgtgagggtgagcccagaagaggtgaccatctacaaccaccctggcatccaggcagagctccgcatcagggaaggctcaggttacttcttcctcaacaccagcaccgcagatgttgtcaaggtggcctaccaggaggccaggggtgtcgccatggtaagcttgggccatcggtccccactgttggttttcattccttatctgggctgttgtgtggttaattgattgatcattttgaaagctagcacttgactcacactcggaatcccagaactttgggaggtcaaggcaggaagatcacttgagcccaggagttcaagaccagcctggacaatatagtgagacccccatctctacaaaaa

SEQ ID NO: 311636 - DNA, 403 bp, Homo sapiens
  misc_feature (375)..(375): n is a, c, g, or t
cagggcactaaagaggggacagacggccattgacgcggccctcacctctgtggtggaccaggatggaggggtccacatactacaggtgcctgtgtggaaccagcaggaggtggaaattcacatcccgatcaccctgtatcccagcatcttgacatttccgtggcaaccaaagacgggcgcctatcagtacacaataagggcccacggtggcagtgggaacttcagctggtcttcgtcaagccacctggttgccacagttactgtcaagggcgtgatgaccacaggcagtgacatcgggttcagtgtgatccaggcacatgatgtgcagaacccactccatttcggtgagatgaaggtgtatgtgatcgtggggtngtaagtgatcgtgggagtaaggtccgag

SEQ ID NO: 311637 - DNA, 467 bp, Homo sapiens
gagctgatggctccaggtggctggagtcaggagcatgaccggcactggggcaggcagcgtggctgtctcctgaggctgctgagtgagcccccatgggggtagcggcagccagcgaggaagctggcctgtcatccaggtgagctgggctttgactggagtgtccagctatggaaagggggctgacacctgtgcttcctctccaggcctctcaggaacctggagctcctcagccaacagcatcctccacatcgaccccaagacgggtgtggctgtggcccgggccgtgggatccgtgacggtttactatgaggtcgctgggcacctgaggacctacaaggaggtgggctctaagcagccggaggcacatgtggctcagtggcctgtgaggcgggcctgaccttctgggaggattatgaagacttttccttttagggaaaagccgtctgaggggttgggtctgggagtca

SEQ ID NO: 311638 - DNA, 1276 bp, Homo sapiens
ttctagacgaactctacaaatgaaagcatgtgctacaaaacctgaagaacttagtgttcacaataatgtttcgacccaaagtaatggctcccaacaggcttgggggatgagatctgctctgcctgtgagtccttccatttcctctgctcctgtgccagtggagatagagaatcttccacagagtcctggaacagaccagcatgacaggaaatggctctctgctgccagcgactgctgtcaacgtggtggaaaccagtggaacacaagggccttgcccccaccccagaccgcacatagaaactacactgactttgttcatgagcacaatgtgaagaatgcaggaatccgtcatgatgttcattttcctggccatacagccatgactgagatatgagtgttgagcctcttaggctttgggactctttgtcatgcaagttgatggtatacattatctggtgtttataaaggattaatcacattaggagtatttgggagaatttacagtgagtcactagttgttcagtgctgtttgtaattgaattcttccatgaaagggacaaggaatcaaggaagccatatagcatcaatgataatgacaaatgtttgtgttgaaaagagtgtgtataccattgtggttttggaagagttttcagaccttagtatgttcacacatcaccagactgtatctcaggagaaggtttgtgtttgtgaacaaggtgcccattattcccccaccacatgccatccaaagagatcgaggttaaaagaatcagacacactaaaaacacagtggaagcatgtctaggcataatatatcagccttttgagatatttattaaaaacttgttcttatacactattttaatatgtctaaagtgacacataccttaatttaagtgcctaagattttaattaatataatttttaattacaaacacttttactttttaataaacacgaatattttaacttaccaaaagatttagagatcacattaataatgtggctcatgtatagagaaatctgaatgtttagttttgaatggttaactgattaacattcagttatcataacagttaaccagtggttaactgaatggttacattactactgaatggttctataaaatgaaaaacatatttactttgtcttttcatttgactggcttttctctttcatctcatacacctgacagattacccaggtttgcaacagtctcataatctgatcctgtataacctttaaaataaaattctgaagccaaaaccaaaaaaaa

SEQ ID NO: 311639 - DNA, 532 bp, Homo sapiens
ggctgtcagaggtccctgcaagacgtatcagaacttaggtgcacaataatgtttcgagccaaagtaagggctcccaacaggcttgggggatgagatctgctctgcctgtgagtccttccatttcctctgctcctgtgccagtggagatagagaatcttccacagagtcctggaacagaccagcatgacaggaaatgcattcctctgaatattgatttgctgaatagcccagacttattggaaacaacgattggtgatgtaattggggcatctgacactatggaaacatcccaagcactgaatgacgttaatgtagccaccaggcttccgggattaggggaacctgaagttgaatatgagagtaagtaaatgttccattatacatcagtgatacctttttatcttcctttgaaataagatatttaaatattttctattatagcaaataaagggaactaaactgtaatgacacacgtgttcttgtgaacatggcacactggttctgaaggtaaaagacgagtacttattctgag

SEQ ID NO: 311640 - DNA, 507 bp, Homo sapiens
tctgtcatccaggctggagtacggtggtgtaatcttggctcactgcagcctctgtctcctgggctcaagtgatcttcccacctcagcctcctgagtagctgggactacagctgagtgctactgtgcccagcttagctcagtttttgtaaagatgaggtctcactatattgcccaggctggtctcaaactcctgggctcaagggatcctcccgccttggcctctcagagcgctaggattacaggtgtgagccactgcatccagccaaaataatttttttgtaattaaaaagaaaaagttaagagccagaatagtcataaccctacccaagttttgtcttaccaaaggagaatagctatttgaaaatttacatagcacttcagctttttcacatcctgattgtagtataggtttccctccatgcagaagtggaatcattaacaaccatgatttatgagtgtccctgtgtatttaaaggattaacactaatcaggcctgtgtcagaatta

SEQ ID NO: 311641 - DNA, 6630 bp, Homo sapiens
  misc_feature (4813)..(4813): n is a, c, g, or t
cgtttaagagcggagcgctccgccctgggggcggagctgggagggagctttaaggggcggacgggcgggaggtcggggtcctccggggattagagccggtgggctcgttgtgggcgccatttctcggcgtctcccgaggagccgcccctttctcagccttgctcggctcttccccgctctggtcgccggggctgcgccgtccccagctcagtgacaaaaatgctgagtttcttccgtagaacactagggcgtcggtctatgcgtaaacatgcagagaaggaacgactccgagaagcacaacgcgccgccacacatattcctgcagctggagattctaagtccatcatcacgtgtcgggtgtcccttctggatggtactgatgttagtgtggacttgccaaaaaaagccaaaggacaagagttgtttgatcagattatgtaccacctggacctgattgaaagcgactattttggtctgagatttatggattcagcacaagtagcacattggttggatggtacaaaaagcatcaaaaagcaagtaaaaattggttcaccctattgtctgcatcttcgagttaagttttattcctcagaaccaaataaccttcgtgaggagctaacccggtatttatttgttcttcagttaaaacaagatattctcagtggaaaattagactgtccctttgatacagcagtgcaattggcagcttataatctgcaagctgaacttggtgactatgatcttgctgagcatagtcctgaacttgtctcagagttcagattcgtgcctattcagactgaagagatggaactggctatttttgagaaatggaaggaatacagaggtcaaacaccagcacaggctgaaaccaattatctgaataaagccaaatggctagaaatgtatggggttgatatgcatgtggtcaaggctagagatgggaatgactatagtttgggactaacaccaacaggagtccttgtttttgaaggagataccaaaattggcttatttttttggccgaagataaccagattggattttaagaagaataaattaaccttggtggttgtagaagatgatgatcagggcaaagaacaggaacatacatttgtctttagactggatcatccaaaagcatgcaaacatttatggaaatgtgctgtggagcatcatgctttcttccgccttcgaggccccgtccaaaagagttctcatcgatcaggatttattcgactaggatcacgatttagatatagtgggaaaacagagtatcagaccacaaaaaccaataaagcaagaagatcaacatcctttgaaagaaggcccagcaaacgatattctagacgaactctacaaatgaaagcatgtgctacaaaacctgaagaacttagtgttcacaataatgtttcgacccaaagtaatggctcccaacaggcttgggggatgagatctgctctgcctgtgagtccttccatttcctctgctcctgtgccagtggagatagagaatcttccacagagtcctggaacagaccagcatgacaggaaatgcattcctctgaatattgatttgctgaatagcccagacttattggaaacaacgattggtgatgtaattggggcatctgacactatggaaacatcccaagcactgaatgacgttaatgtagccaccaggcttccgggattaggggaacctgaagttgaatatgagacattaaaagacacctcagagaagctcaaacagcttgagatggagaacagtcctttgctgtcccctcgatccaacatcgatgttaacataaacagccaggaggaagtggtgaagttgactgagaaatgccttaataatgtcattgagagcccaggattgaatgtcatgagagttcctcctgacttcaagagtaacattttgaaggctcaagtagaagcagtgcataaggttacaaaagaagatagcttattaagtcataaaaatgccaatgttcaggatgctgccacaaacagtgctgtgttaaatgagaataatgtgcccctccccaaagagtctcttgagactctgatgcttatcacacctgccgacagtggttctgttctaaaggaagctacagatgaattggatgccttgcttgcatctctaactgagaatctaattgatcacacagttgcacctcaggtgtcttccacatccatgatcacaccccggtggattgttccgagtggtgccatgtctaatggacttgcgggatgtgaaatgcttttgacagggaaggagggacatggtaataaagatggaatctcactgatctctcccccagcgccattcttggtagatgctgtgaccagctctggtcccattttggcagaagaagctgtcctgaagcagaagtgtttactgaccactgagctctgagggcctgtagctggaatacgcatctctccagcattccgtcctgggatccgtttcagctagaatatgttggattcaggagcttgtccattatttgtaggtaaaaaaagctgcacgtagatttgacttcaactccgtaaaaaagacagctgtattttccgtccaactggaattgttgaatcacactgcatagctgcccaaaagagagtgtttggtcttgaactttctatacttttataaatgttacaaattcccgaaagaagggaatttctttttctggggtttccttcaaactcttggctccacctagcggttctatttgttcataacaacttcataacaagcctgcctctggtagtcaacagccttttgaaagctatttccatctagtatcagggtgagagcatccttgatctggctgcctgttagagaaattgcacttttcctgacttacctagaaatcaagaatttaggaaattaatgtggacactataaaggcagacttagggccaacttttttttttttttacaattattacaacactaaagagaagtttagaatatagagagtttttaaatgtctcccattcttttgatttcttactgtactggctatcttaatatttcaagtttacatcaagataaaccctgagaagaactacggagaaatcaaataaaatcctgtcatatttttttcaccctgcctttccacaggaagcactcacaggcaccacacacgtatcatgtaacttatcagtggggtgggttactgttgaagagaccctggggcatttacctcaggcatctgcactcctccgagcccggtggagaatgcaggctgctgtagtctcaggtaatgaaggcacagcacagcagtactccacattgtttcctatttggacatagacttcatttcctttcagtataagctgaataaatttagagctttcaaactggaaaaaaaaatgaaacaaaacaaatacaccaagaccaaaataggcaataggaacaggggtgaagggatgttgtttcttaaatacctaccatgtatgaagctatacacagcatataccgaaagaacctgcattgcactaggaattctgtgttagtttaaaagagatctctaaaacttccccatccctttgggcctgtacaaagaaattctggatgttaaaataatatatactcatcacagaaaaataaagtatagcaatgtccatctgtaattctaatacccagaaataacgctatttagctttataattttcgaatgaacaaggtaaacctcggttgccatggggaagaaggatgatgtggaaaccatattggtaaagttgttaatccctcgttatggagaactgatcttaagctatacctcctggaatttgctttctagttttctgtcctgcaatatgtatataattaagcactaatttgtactgcttagcataaaagaacatccagtcttagatccttaaaacttcatggattggactttcctgggctccttataacataatcgtgtgtccaggcaaacgcacactagtgtctgactggaaagctcaggaattttaatcttgcactgtttcccagggagctgtagtgattggaacccacgtttgcacaaaacatttttgcagaaggaaagtcaacacttcttgctggctgcctccccttagccattatgctaaaaacagcttctgagtttcactggtggggctcttgccagttcttaattataggacatattttctcaaagctgaaggtgacacctagaaccaggggcttgacccaggacatgatggaatgagcatcaaattttcagtgtcttggcaaccgtagatgtcctacagggttaccgttgtgctgctcaccacagagcagctgaggcattatgccttggaagacctaaatctcccatccagttcaggaggtgacaacatccttattttaaacttcctaaaattaggaattaggtagttggacatagtctgtgacctttatgtcgttggatacctgtattcttgacagttagaatattggtagggactttgttaaaattcacttgaatttcaagctcagaggaaactttgtctcatgccctgacatgaagtggcaaacacggaagttcatacttgaatgctgaattggccccgacagattaaatgcgtgttggggattggtttcctgtcatagctgctgctgctgccatgcgcagagctgctgtaacagctcttcctgttctgctcccctgagaacagtgtggtggggagaggcagggctgaggtggtctacgaatgtggcaggtagggaaggggagatgtctgtctcttgagaagagagaggcatgtgtgccggcatccttgatgggttcaaagagaaaggttggagatgatantgggtgagaagcaggctggtgagactgggctgaggttggagaaggggcagccgggggcactgctgagggtttgccgtgcacgcctcggacggagcacggtggggtggcggggagcagatagtgctgcctccctgcgggcagacaggagaggaacctcaactcagtccatttcatagccctgataggggaagtgggagttgacaggatggtttaaaataagacgtgaaggtttcagttacctgctctagactttgcctgagaacttgtaaattaatcagtgagacctaatttgtgacatgtcagtagcatcatcttttgacacacaggaggtcatggtcatttcattcctactcttcaggagacactgctgaacagaggaatgattctgttccttgtgtgcttacttccttaacatttatacattgttttaagaaaaaacttttaaaaatatttcttatagtctcctaacatttgtctctagcctttgcctttgtacaatcacagatatcctatggagatttaaggatgaaagccctgagttgttcttgggttcttggatctggactacttgttatcttatgcttctcacttctggctaaaacttgcacctcttcttctcttagctaagccccaaaatgaagatttccttcagaagtcttgttagcagaattatttatcagtcacagagagaaaaatctgctatttttctaagtaagagtctcgagaagcagagtttttgtcttgtcattgagaggagtcagcagtcttgttctgtaaaggaccagagatggtaaatactgtcccactcagctctgctggcgcagtacagcagcagcagccccagcacagctgtgttcctgcggagtcccctttacaaagccgctgacccctgatgtgaaactttgtagagcagcagagtggctgcgtgaaacgggaggctggcaggtcctcagataggttctgcagtgttacctgtcacttggaggcagccaacacttctggacattgcatccttattcacacatgtggcagctgaacgaggtgctgttgtgggtgtctcagctctgagggtctttgtgagctcccactgttgtgggtgtctcagctctgagggtctttgtgagctcccactgttgtgggtgtctcagctctgagggtctttgtgagttcccaccaacttttaattattcatgcccttgaccatgtggttgcttggagacctggggtcttctgcagactgaagaagacacatttctagattatttgtcctttttatcctctcaaaaatttaaacactgtacctcttcagtggtcagaagaaagttggaaacttttcctacatattaggcgttagtatgaggacatttgtttgaattatagaaatttgccctgagctgaactgggttgtgttaacacattggtagagctatgattccttcccagttctaagagatacgatctgtaagtccctatgtcaccacattgcttgagatgatcattcagttacttgtcaggatttctcctcttcagagagatttttttttatagcacagattcctttgccccttttatctccttatctggatatgataagtggttatgagggtctcactaactattttgtgtttaccttttatatgtgtaaaactttgcagtagcatttaaagtgtaatttatttttctatcaagtgcactattcatttagtgtgttccagttttatatgacttgtattagaaacactgcactgagttgtttgtacactgaaatgagaactctagatgtaactctattcaaataaaccttcgtgagacattca

SEQ ID NO: 311642 - DNA, 7101 bp, Homo sapiens
  misc_feature (5284)..(5284): n is a, c, g, or t
cgtttaagagcggagcgctccgccctgggggcggagctgggagggagctttaaggggcggacgggcgggaggtcggggtcctccggggattagagccggtgggctcgttgtgggcgccatttctcggcgtctcccgaggagccgcccctttctcagccttgctcggctcttccccgctctggtcgccggggctgcgccgtccccagctcaggtaagcgcgaggcccggcggcggcgccgcagtacagtccgctgcgctcctagccgagtggacccttcctcgcccgcgcctgcggtagcggccttgtccccggggaggcgggcgggggccgcacccagaccctagggcggccggcccctctctcgtcgggccggcagggcattaatcccgccggagggaggggcggcggcggccaatgaggcagggccgccgagtttcggtcgataccgcgcgacgggccggggcggagggcccggggcagccgggttaatgtttgccgagcggacgcgctccccgagccgcgggtacccctcgctggtccgctgggctgccgtccagcgggagagacaaaagtcgcaagggaaggggaaaaacgaactgagtttgtgtcactgtcttggtggacttttcgagctaacctgtatttgagaaaaacttcagtctcttgggaaaggagaggcagtgacaaaaatgctgagtttcttccgtagaacactagggcgtcggtctatgcgtaaacatgcagagaaggaacgactccgagaagcacaacgcgccgccacacatattcctgcagctggagattctaagtccatcatcacgtgtcgggtgtcccttctggatggtactgatgttagtgtggacttgccaaaaaaagccaaaggacaagagttgtttgatcagattatgtaccacctggacctgattgaaagcgactattttggtctgagatttatggattcagcacaagtagcacattggttggatggtacaaaaagcatcaaaaagcaagtaaaaattggttcaccctattgtctgcatcttcgagttaagttttattcctcagaaccaaataaccttcgtgaggagctaacccggtatttatttgttcttcagttaaaacaagatattctcagtggaaaattagactgtccctttgatacagcagtgcaattggcagcttataatctgcaagctgaacttggtgactatgatcttgctgagcatagtcctgaacttgtctcagagttcagattcgtgcctattcagactgaagagatggaactggctatttttgagaaatggaaggaatacagaggtcaaacaccagcacaggctgaaaccaattatctgaataaagccaaatggctagaaatgtatggggttgatatgcatgtggtcaaggctagagatgggaatgactatagtttgggactaacaccaacaggagtccttgtttttgaaggagataccaaaattggcttatttttttggccgaagataaccagattggattttaagaagaataaattaaccttggtggttgtagaagatgatgatcagggcaaagaacaggaacatacatttgtctttagactggatcatccaaaagcatgcaaacatttatggaaatgtgctgtggagcatcatgctttcttccgccttcgaggccccgtccaaaagagttctcatcgatcaggatttattcgactaggatcacgatttagatatagtgggaaaacagagtatcagaccacaaaaaccaataaagcaagaagatcaacatcctttgaaagaaggcccagcaaacgatattctagacgaactctacaaatgaaagcatgtgctacaaaacctgaagaacttagtgttcacaataatgtttcgacccaaagtaatggctcccaacaggcttgggggatgagatctgctctgcctgtgagtccttccatttcctctgctcctgtgccagtggagatagagaatcttccacagagtcctggaacagaccagcatgacaggaaatgcattcctctgaatattgatttgctgaatagcccagacttattggaaacaacgattggtgatgtaattggggcatctgacactatggaaacatcccaagcactgaatgacgttaatgtagccaccaggcttccgggattaggggaacctgaagttgaatatgagacattaaaagacacctcagagaagctcaaacagcttgagatggagaacagtcctttgctgtcccctcgatccaacatcgatgttaacataaacagccaggaggaagtggtgaagttgactgagaaatgccttaataatgtcattgagagcccaggattgaatgtcatgagagttcctcctgacttcaagagtaacattttgaaggctcaagtagaagcagtgcataaggttacaaaagaagatagcttattaagtcataaaaatgccaatgttcaggatgctgccacaaacagtgctgtgttaaatgagaataatgtgcccctccccaaagagtctcttgagactctgatgcttatcacacctgccgacagtggttctgttctaaaggaagctacagatgaattggatgccttgcttgcatctctaactgagaatctaattgatcacacagttgcacctcaggtgtcttccacatccatgatcacaccccggtggattgttccgagtggtgccatgtctaatggacttgcgggatgtgaaatgcttttgacagggaaggagggacatggtaataaagatggaatctcactgatctctcccccagcgccattcttggtagatgctgtgaccagctctggtcccattttggcagaagaagctgtcctgaagcagaagtgtttactgaccactgagctctgagggcctgtagctggaatacgcatctctccagcattccgtcctgggatccgtttcagctagaatatgttggattcaggagcttgtccattatttgtaggtaaaaaaagctgcacgtagatttgacttcaactccgtaaaaaagacagctgtattttccgtccaactggaattgttgaatcacactgcatagctgcccaaaagagagtgtttggtcttgaactttctatacttttataaatgttacaaattcccgaaagaagggaatttctttttctggggtttccttcaaactcttggctccacctagcggttctatttgttcataacaacttcataacaagcctgcctctggtagtcaacagccttttgaaagctatttccatctagtatcagggtgagagcatccttgatctggctgcctgttagagaaattgcacttttcctgacttacctagaaatcaagaatttaggaaattaatgtggacactataaaggcagacttagggccaacttttttttttttttacaattattacaacactaaagagaagtttagaatatagagagtttttaaatgtctcccattcttttgatttcttactgtactggctatcttaatatttcaagtttacatcaagataaaccctgagaagaactacggagaaatcaaataaaatcctgtcatatttttttcaccctgcctttccacaggaagcactcacaggcaccacacacgtatcatgtaacttatcagtggggtgggttactgttgaagagaccctggggcatttacctcaggcatctgcactcctccgagcccggtggagaatgcaggctgctgtagtctcaggtaatgaaggcacagcacagcagtactccacattgtttcctatttggacatagacttcatttcctttcagtataagctgaataaatttagagctttcaaactggaaaaaaaaatgaaacaaaacaaatacaccaagaccaaaataggcaataggaacaggggtgaagggatgttgtttcttaaatacctaccatgtatgaagctatacacagcatataccgaaagaacctgcattgcactaggaattctgtgttagtttaaaagagatctctaaaacttccccatccctttgggcctgtacaaagaaattctggatgttaaaataatatatactcatcacagaaaaataaagtatagcaatgtccatctgtaattctaatacccagaaataacgctatttagctttataattttcgaatgaacaaggtaaacctcggttgccatggggaagaaggatgatgtggaaaccatattggtaaagttgttaatccctcgttatggagaactgatcttaagctatacctcctggaatttgctttctagttttctgtcctgcaatatgtatataattaagcactaatttgtactgcttagcataaaagaacatccagtcttagatccttaaaacttcatggattggactttcctgggctccttataacataatcgtgtgtccaggcaaacgcacactagtgtctgactggaaagctcaggaattttaatcttgcactgtttcccagggagctgtagtgattggaacccacgtttgcacaaaacatttttgcagaaggaaagtcaacacttcttgctggctgcctccccttagccattatgctaaaaacagcttctgagtttcactggtggggctcttgccagttcttaattataggacatattttctcaaagctgaaggtgacacctagaaccaggggcttgacccaggacatgatggaatgagcatcaaattttcagtgtcttggcaaccgtagatgtcctacagggttaccgttgtgctgctcaccacagagcagctgaggcattatgccttggaagacctaaatctcccatccagttcaggaggtgacaacatccttattttaaacttcctaaaattaggaattaggtagttggacatagtctgtgacctttatgtcgttggatacctgtattcttgacagttagaatattggtagggactttgttaaaattcacttgaatttcaagctcagaggaaactttgtctcatgccctgacatgaagtggcaaacacggaagttcatacttgaatgctgaattggccccgacagattaaatgcgtgttggggattggtttcctgtcatagctgctgctgctgccatgcgcagagctgctgtaacagctcttcctgttctgctcccctgagaacagtgtggtggggagaggcagggctgaggtggtctacgaatgtggcaggtagggaaggggagatgtctgtctcttgagaagagagaggcatgtgtgccggcatccttgatgggttcaaagagaaaggttggagatgatantgggtgagaagcaggctggtgagactgggctgaggttggagaaggggcagccgggggcactgctgagggtttgccgtgcacgcctcggacggagcacggtggggtggcggggagcagatagtgctgcctccctgcgggcagacaggagaggaacctcaactcagtccatttcatagccctgataggggaagtgggagttgacaggatggtttaaaataagacgtgaaggtttcagttacctgctctagactttgcctgagaacttgtaaattaatcagtgagacctaatttgtgacatgtcagtagcatcatcttttgacacacaggaggtcatggtcatttcattcctactcttcaggagacactgctgaacagaggaatgattctgttccttgtgtgcttacttccttaacatttatacattgttttaagaaaaaacttttaaaaatatttcttatagtctcctaacatttgtctctagcctttgcctttgtacaatcacagatatcctatggagatttaaggatgaaagccctgagttgttcttgggttcttggatctggactacttgttatcttatgcttctcacttctggctaaaacttgcacctcttcttctcttagctaagccccaaaatgaagatttccttcagaagtcttgttagcagaattatttatcagtcacagagagaaaaatctgctatttttctaagtaagagtctcgagaagcagagtttttgtcttgtcattgagaggagtcagcagtcttgttctgtaaaggaccagagatggtaaatactgtcccactcagctctgctggcgcagtacagcagcagcagccccagcacagctgtgttcctgcggagtcccctttacaaagccgctgacccctgatgtgaaactttgtagagcagcagagtggctgcgtgaaacgggaggctggcaggtcctcagataggttctgcagtgttacctgtcacttggaggcagccaacacttctggacattgcatccttattcacacatgtggcagctgaacgaggtgctgttgtgggtgtctcagctctgagggtctttgtgagctcccactgttgtgggtgtctcagctctgagggtctttgtgagctcccactgttgtgggtgtctcagctctgagggtctttgtgagttcccaccaacttttaattattcatgcccttgaccatgtggttgcttggagacctggggtcttctgcagactgaagaagacacatttctagattatttgtcctttttatcctctcaaaaatttaaacactgtacctcttcagtggtcagaagaaagttggaaacttttcctacatattaggcgttagtatgaggacatttgtttgaattatagaaatttgccctgagctgaactgggttgtgttaacacattggtagagctatgattccttcccagttctaagagatacgatctgtaagtccctatgtcaccacattgcttgagatgatcattcagttacttgtcaggatttctcctcttcagagagatttttttttatagcacagattcctttgccccttttatctccttatctggatatgataagtggttatgagggtctcactaactattttgtgtttaccttttatatgtgtaaaactttgcagtagcatttaaagtgtaatttatttttctatcaagtgcactattcatttagtgtgttccagttttatatgacttgtattagaaacactgcactgagttgtttgtacactgaaatgagaactctagatgtaactctattcaaataaaccttcgtgagacattca

SEQ ID NO: 311643 - DNA, 854 bp, Homo sapiens
cgtttaagagcggagcgctccgccctgggggcggagctgggagggagctttaaggggcggacgggcgggaggtcggggtcctccggggattagagccggtgggctcgttgtgggcgccatttctcggcgtctcccgaggagccgcccctttctcagccttgctcggctcttccccgctctggtcgccggggctgcgccgtccccagctcagtgacaaaaatgctgagtttcttccgtagaacactagggcgtcggtctatgcgtaaacatgcagagaaggaacgactccgagaagcacaacgcgccgccacacatattcctgcagctggagattctaagtccatcatcacgtgtcgggtgtcccttctggatggtactgatgttagtgtggacttgccaaaaaaagccaaaggacaagagttgtttgatcagattatgtaccacctggacctgattgaaagcgactattttggtctgagatttatggattcagcacaagtagcacattggttggatggtacaaaaagcatcaaaaagcaagtaaaaattggttcaccctattgtctgcatcttcgagttaagttttattcctcagaaccaaataaccttcgtgaggagctaacccggtaagaacaccatctagaattgtgccagggttattttgatagttttgaaagactgtctttatattgtttccaatttatagccagctaataaaatggattcctgtcccctggtaacaagacctcaaataatagaattttattctgggacgtgttttttaagtgtatgattcttttcctttagcattttcaaaataaagagttggtttcttagcatcctccaaaggtgac

SEQ ID NO: 311644 - DNA, 609 bp, Homo sapiens
cttagctcagtttttgtaaagatgaggtctcactatattgcccaggctggtctcaaactcctgggctcaagggatcctcccgccttggcctctcagagcgctaggattacaggtgtgagccactgcatccagccaaaataatttttttgtaattaaaaagaaaaagttaagagccagaatagtcataaccctacccaagttttgtcttaccaaaggagaatagctatttgaaaatttacatagcacttcagctttttcacatcctgattgtagtataggtttccctccatgcagaagtggaatcattaacaaccatgatttatgagtgtccctgtgtatttaaaggattaacactaatcaggcctgtgtcagaattataaattgagaggatatggaaaaaacttaacatctgatgataaaggggtcatttaacaattctagattcctgtcttccataggaagctacagatgaattggatgccttgcttgcatctctaactgagaatctaattgatcacacagttgcacctcaggtaaatatgctttaaaatagtatgatggaaagaaatttctgttttgaaaaatgttcctgctagattccagtttttt

SEQ ID NO: 311645 - DNA, 6502 bp, Homo sapiens
  misc_feature (4685)..(4685): n is a, c, g, or t
cgtttaagagcggagcgctccgccctgggggcggagctgggagggagctttaaggggcggacgggcgggaggtcggggtcctccggggattagagccggtgggctcgttgtgggcgccatttctcggcgtctcccgaggagccgcccctttctcagccttgctcggctcttccccgctctggtcgccggggctgcgccgtccccagctcagtgacaaaaatgctgagtttcttccgtagaacactagggcgtcggtctatgcgtaaacatgcagagaaggaacgactccgagaagcacaacgcgccgccacacatattcctgcagctggagattctaagtccatcatcacgtgtcgggtgtcccttctggatggtactgatgttagtgtggacttgccaaaaaaagccaaaggacaagagttgtttgatcagattatgtaccacctggacctgattgaaagcgactattttggtctgagatttatggattcagcacaagtagcacattggttggatggtacaaaaagcatcaaaaagcaagtaaaaattggttcaccctattgtctgcatcttcgagttaagttttattcctcagaaccaaataaccttcgtgaggagctaacccggtatttatttgttcttcagttaaaacaagatattctcagtggaaaattagactgtccctttgatacagcagtgcaattggcagcttataatctgcaagctgaacttggtgactatgatcttgctgagcatagtcctgaacttgtctcagagttcagattcgtgcctattcagactgaagagatggaactggctatttttgagaaatggaaggaatacagaggtcaaacaccagcacaggctgaaaccaattatctgaataaagccaaatggctagaaatgtatggggttgatatgcatgtggtcaaggctagagatgggaatgactatagtttgggactaacaccaacaggagtccttgtttttgaaggagataccaaaattggcttatttttttggccgaagataaccagattggattttaagaagaataaattaaccttggtggttgtagaagatgatgatcagggcaaagaacaggaacatacatttgtctttagactggatcatccaaaagcatgcaaacatttatggaaatgtgctgtggagcatcatgctttcttccgccttcgaggccccgtccaaaagagttctcatcgatcaggatttattcgactaggatcacgatttagatatagtgggaaaacagagtatcagaccacaaaaaccaataaagcaagaagatcaacatcctttgaaagaaggcccagcaaacgatattctagacgaactctacaaatgaaagcatgtgctacaaaacctgaagaacttagtgttcacaataatgtttcgacccaaagtaatggctcccaacaggcttgggggatgagatctgctctgcctgtgagtccttccatttcctctgctcctgtgccagtggagatagagaatcttccacagagtcctggaacagaccagcatgacaggaaatgcattcctctgaatattgatttgctgaatagcccagacttattggaaacaacgattggtgatgtaattggggcatctgacactatggaaacatcccaagcactgaatgacgttaatgtagccaccaggcttccgggattaggggaacctgaagttgaatatgagacattaaaagacacctcagagaagctcaaacagcttgagatggagaacagtcctttgctgtcccctcgatccaacatcgatgttaacataaacagccaggaggaagtggtgaagttgactgagaaatgccttaataatgtcattgagagcccaggattgaatgtcatgagagttcctcctgacttcaagagtaacattttgaaggctcaagtagaagcagtgcataaggttacaaaagaagatagcttattaagtcataaaaatgccaatgttcaggatgctgccacaaacagtgctgtgttaaatgagaataatgtgcccctccccaaagagtctcttgagactctgatgcttatcacacctgccgacagtggttctgttctaaaggaagctacagatgaattggatgccttgcttgcatctctaactgagaatctaattgatcacacagttgcacctcaggtgtcttccacatccatgatcacaccccggtggattgttccgctctggtcccattttggcagaagaagctgtcctgaagcagaagtgtttactgaccactgagctctgagggcctgtagctggaatacgcatctctccagcattccgtcctgggatccgtttcagctagaatatgttggattcaggagcttgtccattatttgtaggtaaaaaaagctgcacgtagatttgacttcaactccgtaaaaaagacagctgtattttccgtccaactggaattgttgaatcacactgcatagctgcccaaaagagagtgtttggtcttgaactttctatacttttataaatgttacaaattcccgaaagaagggaatttctttttctggggtttccttcaaactcttggctccacctagcggttctatttgttcataacaacttcataacaagcctgcctctggtagtcaacagccttttgaaagctatttccatctagtatcagggtgagagcatccttgatctggctgcctgttagagaaattgcacttttcctgacttacctagaaatcaagaatttaggaaattaatgtggacactataaaggcagacttagggccaacttttttttttttttacaattattacaacactaaagagaagtttagaatatagagagtttttaaatgtctcccattcttttgatttcttactgtactggctatcttaatatttcaagtttacatcaagataaaccctgagaagaactacggagaaatcaaataaaatcctgtcatatttttttcaccctgcctttccacaggaagcactcacaggcaccacacacgtatcatgtaacttatcagtggggtgggttactgttgaagagaccctggggcatttacctcaggcatctgcactcctccgagcccggtggagaatgcaggctgctgtagtctcaggtaatgaaggcacagcacagcagtactccacattgtttcctatttggacatagacttcatttcctttcagtataagctgaataaatttagagctttcaaactggaaaaaaaaatgaaacaaaacaaatacaccaagaccaaaataggcaataggaacaggggtgaagggatgttgtttcttaaatacctaccatgtatgaagctatacacagcatataccgaaagaacctgcattgcactaggaattctgtgttagtttaaaagagatctctaaaacttccccatccctttgggcctgtacaaagaaattctggatgttaaaataatatatactcatcacagaaaaataaagtatagcaatgtccatctgtaattctaatacccagaaataacgctatttagctttataattttcgaatgaacaaggtaaacctcggttgccatggggaagaaggatgatgtggaaaccatattggtaaagttgttaatccctcgttatggagaactgatcttaagctatacctcctggaatttgctttctagttttctgtcctgcaatatgtatataattaagcactaatttgtactgcttagcataaaagaacatccagtcttagatccttaaaacttcatggattggactttcctgggctccttataacataatcgtgtgtccaggcaaacgcacactagtgtctgactggaaagctcaggaattttaatcttgcactgtttcccagggagctgtagtgattggaacccacgtttgcacaaaacatttttgcagaaggaaagtcaacacttcttgctggctgcctccccttagccattatgctaaaaacagcttctgagtttcactggtggggctcttgccagttcttaattataggacatattttctcaaagctgaaggtgacacctagaaccaggggcttgacccaggacatgatggaatgagcatcaaattttcagtgtcttggcaaccgtagatgtcctacagggttaccgttgtgctgctcaccacagagcagctgaggcattatgccttggaagacctaaatctcccatccagttcaggaggtgacaacatccttattttaaacttcctaaaattaggaattaggtagttggacatagtctgtgacctttatgtcgttggatacctgtattcttgacagttagaatattggtagggactttgttaaaattcacttgaatttcaagctcagaggaaactttgtctcatgccctgacatgaagtggcaaacacggaagttcatacttgaatgctgaattggccccgacagattaaatgcgtgttggggattggtttcctgtcatagctgctgctgctgccatgcgcagagctgctgtaacagctcttcctgttctgctcccctgagaacagtgtggtggggagaggcagggctgaggtggtctacgaatgtggcaggtagggaaggggagatgtctgtctcttgagaagagagaggcatgtgtgccggcatccttgatgggttcaaagagaaaggttggagatgatantgggtgagaagcaggctggtgagactgggctgaggttggagaaggggcagccgggggcactgctgagggtttgccgtgcacgcctcggacggagcacggtggggtggcggggagcagatagtgctgcctccctgcgggcagacaggagaggaacctcaactcagtccatttcatagccctgataggggaagtgggagttgacaggatggtttaaaataagacgtgaaggtttcagttacctgctctagactttgcctgagaacttgtaaattaatcagtgagacctaatttgtgacatgtcagtagcatcatcttttgacacacaggaggtcatggtcatttcattcctactcttcaggagacactgctgaacagaggaatgattctgttccttgtgtgcttacttccttaacatttatacattgttttaagaaaaaacttttaaaaatatttcttatagtctcctaacatttgtctctagcctttgcctttgtacaatcacagatatcctatggagatttaaggatgaaagccctgagttgttcttgggttcttggatctggactacttgttatcttatgcttctcacttctggctaaaacttgcacctcttcttctcttagctaagccccaaaatgaagatttccttcagaagtcttgttagcagaattatttatcagtcacagagagaaaaatctgctatttttctaagtaagagtctcgagaagcagagtttttgtcttgtcattgagaggagtcagcagtcttgttctgtaaaggaccagagatggtaaatactgtcccactcagctctgctggcgcagtacagcagcagcagccccagcacagctgtgttcctgcggagtcccctttacaaagccgctgacccctgatgtgaaactttgtagagcagcagagtggctgcgtgaaacgggaggctggcaggtcctcagataggttctgcagtgttacctgtcacttggaggcagccaacacttctggacattgcatccttattcacacatgtggcagctgaacgaggtgctgttgtgggtgtctcagctctgagggtctttgtgagctcccactgttgtgggtgtctcagctctgagggtctttgtgagctcccactgttgtgggtgtctcagctctgagggtctttgtgagttcccaccaacttttaattattcatgcccttgaccatgtggttgcttggagacctggggtcttctgcagactgaagaagacacatttctagattatttgtcctttttatcctctcaaaaatttaaacactgtacctcttcagtggtcagaagaaagttggaaacttttcctacatattaggcgttagtatgaggacatttgtttgaattatagaaatttgccctgagctgaactgggttgtgttaacacattggtagagctatgattccttcccagttctaagagatacgatctgtaagtccctatgtcaccacattgcttgagatgatcattcagttacttgtcaggatttctcctcttcagagagatttttttttatagcacagattcctttgccccttttatctccttatctggatatgataagtggttatgagggtctcactaactattttgtgtttaccttttatatgtgtaaaactttgcagtagcatttaaagtgtaatttatttttctatcaagtgcactattcatttagtgtgttccagttttatatgacttgtattagaaacactgcactgagttgtttgtacactgaaatgagaactctagatgtaactctattcaaataaaccttcgtgagacattca

SEQ ID NO: 311646 - DNA, 6875 bp, Homo sapiens
  misc_feature (4685)..(4685): n is a, c, g, or t
cgtttaagagcggagcgctccgccctgggggcggagctgggagggagctttaaggggcggacgggcgggaggtcggggtcctccggggattagagccggtgggctcgttgtgggcgccatttctcggcgtctcccgaggagccgcccctttctcagccttgctcggctcttccccgctctggtcgccggggctgcgccgtccccagctcagtgacaaaaatgctgagtttcttccgtagaacactagggcgtcggtctatgcgtaaacatgcagagaaggaacgactccgagaagcacaacgcgccgccacacatattcctgcagctggagattctaagtccatcatcacgtgtcgggtgtcccttctggatggtactgatgttagtgtggacttgccaaaaaaagccaaaggacaagagttgtttgatcagattatgtaccacctggacctgattgaaagcgactattttggtctgagatttatggattcagcacaagtagcacattggttggatggtacaaaaagcatcaaaaagcaagtaaaaattggttcaccctattgtctgcatcttcgagttaagttttattcctcagaaccaaataaccttcgtgaggagctaacccggtatttatttgttcttcagttaaaacaagatattctcagtggaaaattagactgtccctttgatacagcagtgcaattggcagcttataatctgcaagctgaacttggtgactatgatcttgctgagcatagtcctgaacttgtctcagagttcagattcgtgcctattcagactgaagagatggaactggctatttttgagaaatggaaggaatacagaggtcaaacaccagcacaggctgaaaccaattatctgaataaagccaaatggctagaaatgtatggggttgatatgcatgtggtcaaggctagagatgggaatgactatagtttgggactaacaccaacaggagtccttgtttttgaaggagataccaaaattggcttatttttttggccgaagataaccagattggattttaagaagaataaattaaccttggtggttgtagaagatgatgatcagggcaaagaacaggaacatacatttgtctttagactggatcatccaaaagcatgcaaacatttatggaaatgtgctgtggagcatcatgctttcttccgccttcgaggccccgtccaaaagagttctcatcgatcaggatttattcgactaggatcacgatttagatatagtgggaaaacagagtatcagaccacaaaaaccaataaagcaagaagatcaacatcctttgaaagaaggcccagcaaacgatattctagacgaactctacaaatgaaagcatgtgctacaaaacctgaagaacttagtgttcacaataatgtttcgacccaaagtaatggctcccaacaggcttgggggatgagatctgctctgcctgtgagtccttccatttcctctgctcctgtgccagtggagatagagaatcttccacagagtcctggaacagaccagcatgacaggaaatgcattcctctgaatattgatttgctgaatagcccagacttattggaaacaacgattggtgatgtaattggggcatctgacactatggaaacatcccaagcactgaatgacgttaatgtagccaccaggcttccgggattaggggaacctgaagttgaatatgagacattaaaagacacctcagagaagctcaaacagcttgagatggagaacagtcctttgctgtcccctcgatccaacatcgatgttaacataaacagccaggaggaagtggtgaagttgactgagaaatgccttaataatgtcattgagagcccaggattgaatgtcatgagagttcctcctgacttcaagagtaacattttgaaggctcaagtagaagcagtgcataaggttacaaaagaagatagcttattaagtcataaaaatgccaatgttcaggatgctgccacaaacagtgctgtgttaaatgagaataatgtgcccctccccaaagagtctcttgagactctgatgcttatcacacctgccgacagtggttctgttctaaaggaagctacagatgaattggatgccttgcttgcatctctaactgagaatctaattgatcacacagttgcacctcaggtgtcttccacatccatgatcacaccccggtggattgttccgctctggtcccattttggcagaagaagctgtcctgaagcagaagtgtttactgaccactgagctctgagggcctgtagctggaatacgcatctctccagcattccgtcctgggatccgtttcagctagaatatgttggattcaggagcttgtccattatttgtaggtaaaaaaagctgcacgtagatttgacttcaactccgtaaaaaagacagctgtattttccgtccaactggaattgttgaatcacactgcatagctgcccaaaagagagtgtttggtcttgaactttctatacttttataaatgttacaaattcccgaaagaagggaatttctttttctggggtttccttcaaactcttggctccacctagcggttctatttgttcataacaacttcataacaagcctgcctctggtagtcaacagccttttgaaagctatttccatctagtatcagggtgagagcatccttgatctggctgcctgttagagaaattgcacttttcctgacttacctagaaatcaagaatttaggaaattaatgtggacactataaaggcagacttagggccaacttttttttttttttacaattattacaacactaaagagaagtttagaatatagagagtttttaaatgtctcccattcttttgatttcttactgtactggctatcttaatatttcaagtttacatcaagataaaccctgagaagaactacggagaaatcaaataaaatcctgtcatatttttttcaccctgcctttccacaggaagcactcacaggcaccacacacgtatcatgtaacttatcagtggggtgggttactgttgaagagaccctggggcatttacctcaggcatctgcactcctccgagcccggtggagaatgcaggctgctgtagtctcaggtaatgaaggcacagcacagcagtactccacattgtttcctatttggacatagacttcatttcctttcagtataagctgaataaatttagagctttcaaactggaaaaaaaaatgaaacaaaacaaatacaccaagaccaaaataggcaataggaacaggggtgaagggatgttgtttcttaaatacctaccatgtatgaagctatacacagcatataccgaaagaacctgcattgcactaggaattctgtgttagtttaaaagagatctctaaaacttccccatccctttgggcctgtacaaagaaattctggatgttaaaataatatatactcatcacagaaaaataaagtatagcaatgtccatctgtaattctaatacccagaaataacgctatttagctttataattttcgaatgaacaaggtaaacctcggttgccatggggaagaaggatgatgtggaaaccatattggtaaagttgttaatccctcgttatggagaactgatcttaagctatacctcctggaatttgctttctagttttctgtcctgcaatatgtatataattaagcactaatttgtactgcttagcataaaagaacatccagtcttagatccttaaaacttcatggattggactttcctgggctccttataacataatcgtgtgtccaggcaaacgcacactagtgtctgactggaaagctcaggaattttaatcttgcactgtttcccagggagctgtagtgattggaacccacgtttgcacaaaacatttttgcagaaggaaagtcaacacttcttgctggctgcctccccttagccattatgctaaaaacagcttctgagtttcactggtggggctcttgccagttcttaattataggacatattttctcaaagctgaaggtgacacctagaaccaggggcttgacccaggacatgatggaatgagcatcaaattttcagtgtcttggcaaccgtagatgtcctacagggttaccgttgtgctgctcaccacagagcagctgaggcattatgccttggaagacctaaatctcccatccagttcaggaggtgacaacatccttattttaaacttcctaaaattaggaattaggtagttggacatagtctgtgacctttatgtcgttggatacctgtattcttgacagttagaatattggtagggactttgttaaaattcacttgaatttcaagctcagaggaaactttgtctcatgccctgacatgaagtggcaaacacggaagttcatacttgaatgctgaattggccccgacagattaaatgcgtgttggggattggtttcctgtcatagctgctgctgctgccatgcgcagagctgctgtaacagctcttcctgttctgctcccctgagaacagtgtggtggggagaggcagggctgaggtggtctacgaatgtggcaggtagggaaggggagatgtctgtctcttgagaagagagaggcatgtgtgccggcatccttgatgggttcaaagagaaaggttggagatgatantgggtgagaagcaggctggtgagactgggctgaggttggagaaggggcagccgggggcactgctgagggtttgccgtgcacgcctcggacggagcacggtggggtggcggggagcagatagtgctgcctccctgcgggcagacaggagaggaacctcaactcagtccatttcatagccctgataggggaagtgggagttgacaggatggtttaaaataagacgtgaaggtttcagttacctgctctagactttgcctgagaacttgtaaattaatcagtgagacctaatttgtgacatgtcagtagcatcatcttttgacacacaggaggtcatggtcatttcattcctactcttcaggagacactgctgaacagaggaatgattctgttccttgtgtgcttacttccttaacatttatacattgttttaagaaaaaacttttaaaaatatttcttatagtctcctaacatttgtctctagcctttgcctttgtacaatcacagatatcctatggagatttaaggatgaaagccctgagttgttcttgggttcttggatctggactacttgttatcttatgcttctcacttctggctaaaacttgcacctcttcttctcttagctaagccccaaaatgaagatttccttcagaagtcttgttagcagaattatttatcagtcacagagagaaaaatctgctatttttctaagtaagagtctcgagaagcagagtttttgtcttgtcattgagaggagtcagcagtcttgttctgtaaaggaccagagatggtaaatactgtcccactcagctctgctggcgcagtacagcagcagcagccccagcacagctgtgttcctgcggagtcccctttacaaagccgctgacccctgatgtgaaactttgtagagcagcagagtggctgcgtgaaacgggaggctggcaggtcctcagataggttctgcagtgttacctgtcacttggaggcagccaacacttctggacattgcatccttattcacacatgtggcagctgaacgaggtgctgttgtgggtgtctcagctctgagggtctttgtgagctcccactgttgtgggtgtctcagctctgagggtctttgtgagctcccactgttgtgggtgtctcagctctgagggtctttgtgagttcccaccaacttttaattattcatgcccttgaccatgtggttgcttggagacctggggtcttctgcagactgaagaagacacatttctagattatttgtcctttttatcctctcaaaaatttaaacactgtacctcttcagtggtcagaagaaagttggaaacttttcctacatattaggcgttagtatgaggacatttgtttgaattatagaaatttgccctgagctgaactgggttgtgttaacacattggtagagctatgattccttcccagttctaagagatacgatctgtaagtccctatgtcaccacattgcttgagatgatcattcagttacttgtcaggatttctcctcttcagagagatttttttttatagcacagattcctttgccccttttatctccttatctggatatgataagtggttatgagggtctcactaactattttgtgtttaccttttatatgtgtaaaactttgcagtagcatttaaagtgtaatttatttttctatcaagtgcactattcatttagtgtgttccagttttatatgacttgtattagaaacactgcactgagttgtttgtacactgaaatgagaactctagatgtaactctattcaaataaaccttcgtgagacattcaaaaaaaaaaaaaaaaaaaaaaaacaaaccaacacaaaaaaaaaaaaaaaaaaaaaaaaaaaaaaaaaaaaaaaaaaaagggggggggggcagaaaaaaaacgagaggagaacaaaaagatcgaacaacacaacatgtcgtagaacacagaggcacccacaacaaggggaacagataaacaaaacacagaggccgcgaaatagcaaagcagcagagggaacaacaaaatgagggaatatagaaacacacaccctgttcggggcggcaacatacgtgcaaccatcaaggaaacggaccagagacaacaacagaagacagtaggaaacacagcaaatcaagagaaacagcaaataaaaacaataggggaagaaaaa

SEQ ID NO: 311647 - DNA, 2619 bp, Homo sapiens
cgtttaagagcggagcgctccgccctgggggcggagctgggagggagctttaaggggcggacgggcgggaggtcggggtcctccggggattagagccggtgggctcgttgtgggcgccatttctcggcgtctcccgaggagccgcccctttctcagccttgctcggctcttccccgctctggtcgccggggctgcgccgtccccagctcagtgacaaaaatgctgagtttcttccgtagaacactagggcgtcggtctatgcgtaaacatgcagagaaggaacgactccgagaagcacaacgcgccgccacacatattcctgcagctggagattctaagtccatcatcacgtgtcgggtgtcccttctggatggtactgatgttagtgtggacttgccaaaaaaagccaaaggacaagagttgtttgatcagattatgtaccacctggacctgattgaaagcgactattttggtctgagatttatggattcagcacaagtagcacattggttggatggtacaaaaagcatcaaaaagcaagtaaaaattggttcaccctattgtctgcatcttcgagttaagttttattcctcagaaccaaataaccttcgtgaggagctaacccggtatttatttgttcttcagttaaaacaagatattctcagtggaaaattagactgtccctttgatacagcagtgcaattggcagcttataatctgcaagctgaacttggtgactatgatcttgctgagcatagtcctgaacttgtctcagagttcagattcgtgcctattcagactgaagagatggaactggctatttttgagaaatggaaggaatacagaggtcaaacaccagcacaggctgaaaccaattatctgaataaagccaaatggctagaaatgtatggggttgatatgcatgtggtcaaggctagagatgggaatgactatagtttgggactaacaccaacaggagtccttgtttttgaaggagataccaaaattggcttatttttttggccgaagataaccagattggattttaagaagaataaattaaccttggtggttgtagaagatgatgatcagggcaaagaacaggaacatacatttgtctttagactggatcatccaaaagcatgcaaacatttatggaaatgtgctgtggagcatcatgctttcttccgccttcgaggccccgtccaaaagagttctcatcgatcaggatttattcgactaggatcacgatttagatatagtgggaaaacagagtatcagaccacaaaaaccaataaagcaagaagatcaacatcctttgaaagaaggcccagcaaacgatattctagacgaactctacaaatgaaagcatgtgctacaaaacctgaagaacttagtgttcacaataatgtttcgacccaaagtaatggctcccaacaggcttgggggatgagatctgctctgcctgtgagtccttccatttcctctgctcctgtgccagtggagatagagaatcttccacagagtcctggaacagaccagcatgacaggaaatggctctctgctgccagcgactgctgtcaacgtggtggaaaccagtggaacacaagggccttgcccccaccccagaccgcacatagaaactacactgactttgttcatgagcacaatgtgaagaatgcaggaatccgtcatgatgttcattttcctggccatacagccatgactgagatatgagtgttgagcctcttaggctttgggactctttgtcatgcaagttgatggtatacattatctggtgtttataaaggattaatcacattaggagtatttgggagaatttacagtgagtcactagttgttcagtgctgtttgtaattgaattcttccatgaaagggacaaggaatcaaggaagccatatagcatcaatgataatgacaaatgtttgtgttgaaaagagtgtgtataccattgtggttttggaagagttttcagaccttagtatgttcacacatcaccagactgtatctcaggagaaggtttgtgtttgtgaacaaggtgcccattattcccccaccacatgccatccaaagagatcgaggttaaaagaatcagacacactaaaaacacagtggaagcatgtctaggcataatatatcagccttttgagatatttattaaaaacttgttcttatacactattttaatatgtctaaagtgacacataccttaatttaagtgcctaagattttaattaatataatttttaattacaaacacttttactttttaataaacacgaatattttaacttaccaaaagatttagagatcacattaataatgtggctcatgtatagagaaatctgaatgtttagttttgaatggttaactgattaacattcagttatcataacagttaaccagtggttaactgaatggttacattactactgaatggttctataaaatgaaaaacatatttactttgtcttttcatttgactggcttttctctttcatctcatacacctgacagattacccaggtttgcaacagtctcataatctgatcctgtataacctttaaaataaaattctgaagccaaaaccaaaaaaaa

SEQ ID NO: 311648 - DNA, 3366 bp, Homo sapiens
gaaccaatcaggaccggcctggcagtgtcatggctgcccacaggtctgcaggcactcggtacgccgctaacgcggcgaggtagctcggtgcgtctcgcggtaccagtgcgaatcatcgggctatccaggtccgagatcctagtctcctgtcggctctgaggaggatggatccttctgcggatacatgggacctcttctcacctttaatatcattatggataaacaggttttacatttatttgggctttgctgttagcattagcctttggatttgtgtccagattgtcatcaagacgcagggcaagaacttacaggaaaaatctgttccaaaagcagctcaggatttgatgacaaatggttatgtctcccttcaagagaaagacatctttgtgtctggagtgaagattttttatggttctcagactggaacagcgaagggattcgcaacagttcttgctgaagcagttacatccctggatctgcctgtggccattattaatctaaaagaatatgatccagatgatcatctgatagaagaggtgactagtaaaaatgtctgtgtcttcctggttgcgacatacactgacggcctaccaactgaaagtgcagagtggttctgcaaatggttagaggaagcatccattgattttcgatttggcaaaacttacctgaagggtatgagatatgcggtatttggcctgggaaattctgcctatgctagccacttcaacaaggttggcaaaaatgttgacaagtggctctggatgcttggcgcgcatcgtgtgatgagtcgaggggagggcgactgcgacgtggttaaaagcaagcacggcagcattgaggccgacttcagagcatggaagaccaagttcatctcccagctgcaggcacttcagaaaggggagagaaagaagtcctgtggcggccactgcaagaaaggcaaatgtgaatctcaccaacatggctcagaggagagggaggaaggatctcatgagcaggatgaattgcatcatagagacaccgaggaggaagaaccctttgagagctccagtgaagaagagtttggtggtgaggaccatcagagcctaaattccattgttgatgttgaagatttgggcaaaattatggatcatgtgaagaaagaaaagagagaaaaggaacagcaggaagagaagtctggtttgttcaggaacatggggaggaatgaagatggtgaaagaagagctatgataactcctgctctccgagaagcccttactaaacaaggttatcagttgattgggagccactcgggggtgaagctttgcaggtggacaaagtccatgctccgagggagaggaggttgttacaaacacacattctatggaattgagagccatcgctgcatggaaaccaccccgagcttggcgtgtgctaataaatgtgtcttctgttggcggcaccacaccaaccccgtgggcactgagtggcggtggaagatggaccagcctgaaatgatcttgaaggaagccattgaaaaccatcagaacatgattaagcagtttaaaggagtaccgggcgtcaaagcagaacgctttgaagaaggaatgacggtaaagcactgtgcattgtccctcgtgggagaaccaataatgtacccagagatcaacaggtttttgaagctactccaccagtgtaaaatttccagcttcctggtcacaaacgcacaatttcctgcggaaatcaggaacctcgagccggttactcagctgtatgtcagtgtggatgccagtaccaaagacagcctgaagaaaatcgaccgcccactcttcaaggatttctggcagagattccttgacagtttaaaagccttggcagtcaagcaacaacgaactgtctacagactgacgctcgtgaaagcatggaacgtggacgagctccaggcctacgcgcagctcgtgtccctggggaatcctgacttcatcgaagtgaagggcgttacctactgcggagaaagttcagcaagcagtcttaccatggcccacgtgccctggcatgaggaagtggtacagtttgtccgcgagctggtggatctgatccccgaatatgaaattgcatgtgaacacgaacactctaattgcctcctgatagcacacagaaagtttaaaattggtggtgaatggtggacatggatcgattataaccgcttccaggagctcatccaggaatatgaagatagtggtggatcaaaaacgttcagcgcaaaggattatatggccagaactcctcactgggcattatttggtgccagtgaaagaggctttgatcccaaggacacaagacatcagagaaagaacaaatcaaaggctatttctggatgttgagattatctgatttcaaggtactgaaggacaaaaacttggatggcctcaaaaggttcttgaacaccactgtgattctccaaggacgaattacgtaaattatactttcatacaaaggagacaataaggcagtaaacacaggagacacgggggacagcgtccacactcagagggcctgggccacagccccgatgtttcttttcagaactcagcccctttcctgattttacttctaagaggaaaattattttggggaggaactacacagtcgtgattagaatttatctgatggttttgtattataacttgtaagacctgccagaatgctagtcccgagagtgtcagacaaggaagaagtccctgggcctcttccccttacccggcccttagatttcatggagcagccacttagcattgaattgcactaccctgagctaaacgtgtctgtgctttctaagataagagcttgatccctttcttctatcttaagacagcacctcctgaaaagaatcgaagttgtcacaactctcaattattttttaaatactgcatagattgagttttggtttattaccaacccttcccagaattgcgttggatctaaaactactagatctcatcccattcccatgtaaattaccacagaccgcagtaccggggctggagcggagtgaagctgtctgctgtaagaggagtggccatgtgagggcatggagtcattagtctcacaaacacactttggactgaagaggatcatttctttttgttcgtgaggtcactgtccaggcctctcatatcatgaccagacggcgggtctccatcttctttcactcctgtggccctggctgctttacacaatctgttctataaggttcaggtgttttcaagttggaaagatcataaatactcaaaattgttttcaagttagcaagttcttttaacagtcttttatgcaaaaattgaattaataaaataatcttttgtaaagacttgcagacatgaaaaa

SEQ ID NO: 311649 - DNA, 3198 bp, Homo sapiens
gaaccaatcaggaccggcctggcagtgtcatggctgcccacaggtctgcaggcactcggtacgccgctaacgcggcgaggtagctcggtgcgtctcgcggtaccagtgcgaatcatcgggctatccaggtccgagatcctagtctcctgtcggctctgaggaggatggatccttctgcggatacatgggacctcttctcacctttaatatcattatggataaacaggttttacatttatttgggctttgctgttagcattagcctttggatttgtgtccagattgtcatcaagacgcagggcaagaacttacaggaaaaatctgttccaaaagcagctcaggatttgatgacaaatggttatgtctcccttcaagagaaagacatctttgtgtctggagtgaagattttttatggttctcagactggaacagcgaagggattcgcaacagttcttgctgaagcagttacatccctggatctgcctgtggccattattaatctaaaagaatatgatccagatgatcatctgatagaagaggtgactagtaaaaatgtctgtgtcttcctggttgcgacatacactgacggcctaccaactgaaagtgcagagtggttctgcaaatggttagaggaagcatccattgattttcgatttggcaaaacttacctgaagggtatgagatatgcggtatttggcctgggaaattctgcctatgctagccacttcaacaaggttggcaaaaatgttgacaagtggctctggatgcttggcgcgcatcgtgtgatgagtcgaggggagggcgactgcgacgtggttaaaagcaagcacggcagcattgaggccgacttcagagcatggaagaccaagttcatctcccagctgcaggcacttcagaaaggggagagaaagaagtcctgtggcggccactgcaagaaaggcaaatgtgaatctcaccaacatggctcagaggagagggaggaaggatctcatgagcaggatgaattgcatcatagagacaccgaggaggaagaaccctttgagagctccagtgaagaagagtttggtggtgaggaccatcagagcctaaattccattgttgatgttgaagatttgggcaaaattatggatcatgtgaagaaagaaaagagagaaaaggaacagcaggaagagaagtctggtttgttcaggaacatggggaggaatgaagatggtgaaagaagagctatgataactcctgctctccgagaagcccttactaaacaaggttatcagttgattgggagccactcgggggtgaagctttgcaggtggacaaagtccatgctccgagggagaggaggttgttacaaacacacattctatggaattgagagccatcgctgcatggaaaccaccccgagcttggcgtgtgctaataaatgtgtcttctgttggcggcaccacaccaaccccgtgggcactgagtggcggtggaagatggaccagcctgaaatgatcttgaaggaagccattgaaaaccatcagaacatgattaagcagtttaaaggagtaccgggcgtcaaagcagaacgctttgaagaaggaatgacggtaaagcactgtgcattgtccctcgtgggagaaccaataatgtacccagagatcaacaggtttttgaagctactccaccagtgtaaaatttccagcttcctggtcacaaacgcacaatttcctgcggaaatcaggaacctcgagccggttactcagctgtatgtcagtgtggatgccagtaccaaagacagcctgaagaaaatcgaccgcccactcttcaaggatttctggcagagattccttgacagtttaaaagccttggcagtcaagcaacaacgaactgtctacagactgacgctcgtgaaagcatggaacgtggacgagctccaggcctacgcgcagctcgtgtccctggggaatcctgacttcatcgaagtgaagtttaaaattggtggtgaatggtggacatggatcgattataaccgcttccaggagctcatccaggaatatgaagatagtggtggatcaaaaacgttcagcgcaaaggattatatggccagaactcctcactgggcattatttggtgccagtgaaagaggctttgatcccaaggacacaagacatcagagaaagaacaaatcaaaggctatttctggatgttgagattatctgatttcaaggtactgaaggacaaaaacttggatggcctcaaaaggttcttgaacaccactgtgattctccaaggacgaattacgtaaattatactttcatacaaaggagacaataaggcagtaaacacaggagacacgggggacagcgtccacactcagagggcctgggccacagccccgatgtttcttttcagaactcagcccctttcctgattttacttctaagaggaaaattattttggggaggaactacacagtcgtgattagaatttatctgatggttttgtattataacttgtaagacctgccagaatgctagtcccgagagtgtcagacaaggaagaagtccctgggcctcttccccttacccggcccttagatttcatggagcagccacttagcattgaattgcactaccctgagctaaacgtgtctgtgctttctaagataagagcttgatccctttcttctatcttaagacagcacctcctgaaaagaatcgaagttgtcacaactctcaattattttttaaatactgcatagattgagttttggtttattaccaacccttcccagaattgcgttggatctaaaactactagatctcatcccattcccatgtaaattaccacagaccgcagtaccggggctggagcggagtgaagctgtctgctgtaagaggagtggccatgtgagggcatggagtcattagtctcacaaacacactttggactgaagaggatcatttctttttgttcgtgaggtcactgtccaggcctctcatatcatgaccagacggcgggtctccatcttctttcactcctgtggccctggctgctttacacaatctgttctataaggttcaggtgttttcaagttggaaagatcataaatactcaaaattgttttcaagttagcaagttcttttaacagtcttttatgcaaaaattgaattaataaaataatcttttgtaaagacttgcagacatgaaaaa

SEQ ID NO: 311650 - DNA, 2199 bp, Homo sapiens
atgctctgatgcgaatttcctgcgtcatgcagttaccagtaggagtattcatggttacgaaacacatggtttctcttaaaaatgatgccttggtggtttgtttctgtgctttgacaattttattcaaattgtgatttgtttacttgtcatagtccatgctccgagggagaggaggttgttacaaacacacattctatggaattgagagccatcgctgcatggaaaccaccccgagcttggcgtgtgctaataaatgtgtcttctgttggcggcaccacaccaaccccgtgggcactgagtggcggtggaagatggaccagcctgaaatgatcttgaaggaagccattgaaaaccatcagaacatgattaagcagtttaaaggagtaccgggcgtcaaagcagaacgctttgaagaaggaatgacggtaaagcactgtgcattgtccctcgtgggagaaccaataatgtacccagagatcaacaggtttttgaagctactccaccagtgtaaaatttccagcttcctggtcacaaacgcacaatttcctgcggaaatcaggaacctcgagccggttactcagctgtatgtcagtgtggatgccagtaccaaagacagcctgaagaaaatcgaccgcccactcttcaaggatttctggcagagattccttgacagtttaaaagccttggcagtcaagcaacaacgaactgtctacagactgacgctcgtgaaagcatggaacgtggacgagctccaggcctacgcgcagctcgtgtccctggggaatcctgacttcatcgaagtgaagggcgttacctactgcggagaaagttcagcaagcagtcttaccatggcccacgtgccctggcatgaggaagtggtacagtttgtccgcgagctggtggatctgatccccgaatatgaaattgcatgtgaacacgaacactctaattgcctcctgatagcacacagaaagtttaaaattggtggtgaatggtggacatggatcgattataaccgcttccaggagctcatccaggaatatgaagatagtggtggatcaaaaacgttcagcgcaaaggattatatggccagaactcctcactgggcattatttggtgccagtgaaagaggctttgatcccaaggacacaagacatcagagaaagaacaaatcaaaggctatttctggatgttgagattatctgatttcaaggtactgaaggacaaaaacttggatggcctcaaaaggttcttgaacaccactgtgattctccaaggacgaattacgtaaattatactttcatacaaaggagacaataaggcagtaaacacaggagacacgggggacagcgtccacactcagagggcctgggccacagccccgatgtttcttttcagaactcagcccctttcctgattttacttctaagaggaaaattattttggggaggaactacacagtcgtgattagaatttatctgatggttttgtattataacttgtaagacctgccagaatgctagtcccgagagtgtcagacaaggaagaagtccctgggcctcttccccttacccggcccttagatttcatggagcagccacttagcattgaattgcactaccctgagctaaacgtgtctgtgctttctaagataagagcttgatccctttcttctatcttaagacagcacctcctgaaaagaatcgaagttgtcacaactctcaattattttttaaatactgcatagattgagttttggtttattaccaacccttcccagaattgcgttggatctaaaactactagatctcatcccattcccatgtaaattaccacagaccgcagtaccggggctggagcggagtgaagctgtctgctgtaagaggagtggccatgtgagggcatggagtcattagtctcacaaacacactttggactgaagaggatcatttctttttgttcgtgaggtcactgtccaggcctctcatatcatgaccagacggcgggtctccatcttctttcactcctgtggccctggctgctttacacaatctgttctataaggttcaggtgttttcaagttggaaagatcataaatactcaaaattgttttcaagttagcaagttcttttaacagtcttttatgcaaaaattgaattaataaaataatcttttgtaaagacttgcagacatgaaaaa

SEQ ID NO: 311651 - DNA, 1944 bp, Homo sapiens
gctcgacctgtgaatgttagtgtataaaaattttgtagacaaatatttttgtttctcttggacaaacactgtgaggaattgctggatttgtaaacatccatttggacagtttgtcttttttaactggagtaccgggcgtcaaagcagaacgctttgaagaaggaatgacggtaaagcactgtgcattgtccctcgtgggagaaccaataatgtacccagagatcaacaggtttttgaagctactccaccagtgtaaaatttccagcttcctggtcacaaacgcacaatttcctgcggaaatcaggaacctcgagccggttactcagctgtatgtcagtgtggatgccagtaccaaagacagcctgaagaaaatcgaccgcccactcttcaaggatttctggcagagattccttgacagtttaaaagccttggcagtcaagcaacaacgaactgtctacagactgacgctcgtgaaagcatggaacgtggacgagctccaggcctacgcgcagctcgtgtccctggggaatcctgacttcatcgaagtgaagggcgttacctactgcggagaaagttcagcaagcagtcttaccatggcccacgtgccctggcatgaggaagtggtacagtttgtccgcgagctggtggatctgatccccgaatatgaaattgcatgtgaacacgaacactctaattgcctcctgatagcacacagaaagtttaaaattggtggtgaatggtggacatggatcgattataaccgcttccaggagctcatccaggaatatgaagatagtggtggatcaaaaacgttcagcgcaaaggattatatggccagaactcctcactgggcattatttggtgccagtgaaagaggctttgatcccaaggacacaagacatcagagaaagaacaaatcaaaggctatttctggatgttgagattatctgatttcaaggtactgaaggacaaaaacttggatggcctcaaaaggttcttgaacaccactgtgattctccaaggacgaattacgtaaattatactttcatacaaaggagacaataaggcagtaaacacaggagacacgggggacagcgtccacactcagagggcctgggccacagccccgatgtttcttttcagaactcagcccctttcctgattttacttctaagaggaaaattattttggggaggaactacacagtcgtgattagaatttatctgatggttttgtattataacttgtaagacctgccagaatgctagtcccgagagtgtcagacaaggaagaagtccctgggcctcttccccttacccggcccttagatttcatggagcagccacttagcattgaattgcactaccctgagctaaacgtgtctgtgctttctaagataagagcttgatccctttcttctatcttaagacagcacctcctgaaaagaatcgaagttgtcacaactctcaattattttttaaatactgcatagattgagttttggtttattaccaacccttcccagaattgcgttggatctaaaactactagatctcatcccattcccatgtaaattaccacagaccgcagtaccggggctggagcggagtgaagctgtctgctgtaagaggagtggccatgtgagggcatggagtcattagtctcacaaacacactttggactgaagaggatcatttctttttgttcgtgaggtcactgtccaggcctctcatatcatgaccagacggcgggtctccatcttctttcactcctgtggccctggctgctttacacaatctgttctataaggttcaggtgttttcaagttggaaagatcataaatactcaaaattgttttcaagttagcaagttcttttaacagtcttttatgcaaaaattgaattaataaaataatcttttgtaaagacttgcagacatgaaaaa

SEQ ID NO: 311652 - DNA, 1332 bp, Homo sapiens
gacgtgatagggagaaaagatcagacttgttcatgattttaaaaacattcattttttttttctagggatgtttttacttctgacttgacacatttttttctttccagtttaaaattggtggtgaatggtggacatggatcgattataaccgcttccaggagctcatccaggaatatgaagatagtggtggatcaaaaacgttcagcgcaaaggattatatggccagaactcctcactgggcattatttggtgccagtgaaagaggctttgatcccaaggacacaagacatcagagaaagaacaaatcaaaggctatttctggatgttgagattatctgatttcaaggtactgaaggacaaaaacttggatggcctcaaaaggttcttgaacaccactgtgattctccaaggacgaattacgtaaattatactttcatacaaaggagacaataaggcagtaaacacaggagacacgggggacagcgtccacactcagagggcctgggccacagccccgatgtttcttttcagaactcagcccctttcctgattttacttctaagaggaaaattattttggggaggaactacacagtcgtgattagaatttatctgatggttttgtattataacttgtaagacctgccagaatgctagtcccgagagtgtcagacaaggaagaagtccctgggcctcttccccttacccggcccttagatttcatggagcagccacttagcattgaattgcactaccctgagctaaacgtgtctgtgctttctaagataagagcttgatccctttcttctatcttaagacagcacctcctgaaaagaatcgaagttgtcacaactctcaattattttttaaatactgcatagattgagttttggtttattaccaacccttcccagaattgcgttggatctaaaactactagatctcatcccattcccatgtaaattaccacagaccgcagtaccggggctggagcggagtgaagctgtctgctgtaagaggagtggccatgtgagggcatggagtcattagtctcacaaacacactttggactgaagaggatcatttctttttgttcgtgaggtcactgtccaggcctctcatatcatgaccagacggcgggtctccatcttctttcactcctgtggccctggctgctttacacaatctgttctataaggttcaggtgttttcaagttggaaagatcataaatactcaaaattgttttcaagttagcaagttcttttaacagtcttttatgcaaaaattgaattaataaaataatcttttgtaaagacttgcagacatgaaaaa

SEQ ID NO: 311653 - DNA, 2502 bp, Homo sapiens
gaaccaatcaggaccggcctggcagtgtcatggctgcccacaggtctgcaggcactcggtacgccgctaacgcggcgaggtagctcggtgcgtctcgcggtaccagtgcgaatcatcgggctatccaggtccgagatcctagtctcctgtcggctctgaggaggatggatccttctgcggatacatgggacctcttctcacctttaatatcattatggataaacaggttttacatttatttgggctttgctgttagcattagcctttggatttgtgtccagattgtcatcaagacgcagggcaagaacttacaggaaaaatctgttccaaaagcagctcaggatttgatgacaaatggttatgtctcccttcaagagaaagacatctttgtgtctggagtgaagattttttatggttctcagactggaacagcgaagggattcgcaacagttcttgctgaagcagttacatccctggatctgcctgtggccattattaatctaaaagaatatgatccagatgatcatctgatagaagaggtgactagtaaaaatgtctgtgtcttcctggttgcgacatacactgacggcctaccaactgaaagtgcagagtggttctgcaaatggttagaggaagcatccattgattttcgatttggcaaaacttacctgaagggtatgagatatgcggtatttggcctgggaaattctgcctatgctagccacttcaacaaggttggcaaaaatgttgacaagtggctctggatgcttggcgcgcatcgtgtgatgagtcgaggggagggcgactgcgacgtggttaaaagcaagcacggcagcattgaggccgacttcagagcatggaagaccaagttcatctcccagctgcaggcacttcagaaaggggagagaaagaagtcctgtggcggccactgcaagaaaggcaaatgtgaatctcaccaacatggctcagaggagagggaggaaggatctcatgagcaggatgaattgcatcatagagacaccgaggaggaagaaccctttgagagctccagtgaagaagagtttggtggtgaggaccatcagagcctaaattccattgttgatgttgaagatttgggcaaaattatggatcatgtgaagaaagaaaagagagaaaaggaacagcaggaagagaagtctggtttgttcaggaacatggggaggaatgaagatggtgaaagaagagctatgataactcctgctctccgagaagcccttactaaacaaggttatcagttgattgggagccactcgggggtgaagctttgcaggtggacaaagtccatgctccgagggagaggaggttgttacaaacacacattctatggaattgagagccatcgctgcatggaaaccaccccgagcttggcgtgtgctaataaatgtgtcttctgttggcggcaccacaccaaccccgtgggcactgagtggcggtggaagatggaccagcctgaaatgatcttgaaggaagccattgaaaaccatcagaacatgattaagcagtttaaaggagtaccgggcgtcaaagcagaacgctttgaagaaggaatgacggtaaagcactgtgcattgtccctcgtgggagaaccaataatgtacccagagatcaacaggtttttgaagctactccaccagtgtaaaatttccagcttcctggtcacaaacgcacaatttcctgcggaaatcaggaacctcgagccggttactcagctgtatgtcagtgtggatgccagtaccaaagacagcctgaagaaaatcgaccgcccactcttcaaggatttctggcagagattccttgacagtttaaaagccttggcagtcaagcaacaacgaactgtctacagactgacgctcgtgaaagcatggaacgtggacgagctccaggcctacgcgcagctcgtgtccctggggaatcctgacttcatcgaagtgaagggcgttacctactgcggagaaagttcagcaagcagtcttaccatggcccacgtgccctggcatgaggaagtggtacagtttgtccgcgagctggtggatctgatccccgaatatgaaattgcatgtgaacacgaacactctaattgcctcctgatagcacacagaaagaccgcagtaccggggctggagcggagtgaagctgtctgctgtaagaggagtggccatgtgagggcatggagtcattagtctcacaaacacactttggactgaagaggatcatttctttttgttcgtgaggtcactgtccaggcctctcatatcatgaccagacggcgggtctccatcttctttcactcctgtggccctggctgctttacacaatctgttctataaggttcaggtgttttcaagttggaaagatcataaatactcaaaattgttttcaagttagcaagttcttttaacagtcttttatgcaaaaattgaattaataaaataatcttttgtaaagacttgcagacatgaaaaa

SEQ ID NO: 311654 - DNA, 319 bp, Homo sapiens
  misc_feature (17)..(17): n is a, c, g, or t
agctcggtaccccgggncagtacggatgtgtttgctctgcgcgtccacctccagccggagcacattcccgctttcgggcccgtcgggggtgaagctttgcaggtggacaaaggtattttttttgtttttattcaatatgtctattacatgcaacttttaaatagctattattatacactgtctataaatttactatttagaggtataatttacatttaatttgcacagatttttaaatgattctttaaaatgagttcagcaaattttgatgtagaacctatattcaccaactccaattaagatataagttattatcccc

SEQ ID NO: 311655 - DNA, 2432 bp, Homo sapiens
accaggagatagcaggagagaagtggttgtcaggatggtgaggaggaaggatctcaagagcaggacgaatggcatcacagagacaccaagggaggaagaaccctttgagagctccagtgaagaagagtttggtggtgaggaccatcagagcctaaattccattgttgatgttgaagatttgggcaaaattatggatcatgtgaagaaagaaaagagagaaaaggaacagcaggaagagaagtctggtttgttcaggaacatggggaggaatgaagatggtgaaagaagagctatgataactcctgctctccgagaagcccttactaaacaaggttatcagttgattgggagccactcgggggtgaagctttgcaggtggacaaagtccatgctccgagggagaggaggttgttacaaacacacattctatggaattgagagccatcgctgcatggaaaccaccccgagcttggcgtgtgctaataaatgtgtcttctgttggcggcaccacaccaaccccgtgggcactgagtggcggtggaagatggaccagcctgaaatgatcttgaaggaagccattgaaaaccatcagaacatgattaagcagtttaaaggagtaccgggcgtcaaagcagaacgctttgaagaaggaatgacggtaaagcactgtgcattgtccctcgtgggagaaccaataatgtacccagagatcaacaggtttttgaagctactccaccagtgtaaaatttccagcttcctggtcacaaacgcacaatttcctgcggaaatcaggaacctcgagccggttactcagctgtatgtcagtgtggatgccagtaccaaagacagcctgaagaaaatcgaccgcccactcttcaaggatttctggcagagattccttgacagtttaaaagccttggcagtcaagcaacaacgaactgtctacagactgacgctcgtgaaagcatggaacgtggacgagctccaggcctacgcgcagctcgtgtccctggggaatcctgacttcatcgaagtgaagggcgttacctactgcggagaaagttcagcaagcagtcttaccatggcccacgtgccctggcatgaggaagtggtacagtttgtccgcgagctggtggatctgatccccgaatatgaaattgcatgtgaacacgaacactctaattgcctcctgatagcacacagaaagtttaaaattggtggtgaatggtggacatggatcgattataaccgcttccaggagctcatccaggaatatgaagatagtggtggatcaaaaacgttcagcgcaaaggattatatggccagaactcctcactgggcattatttggtgccagtgaaagaggctttgatcccaaggacacaagacatcagagaaagaacaaatcaaaggctatttctggatgttgagattatctgatttcaaggtactgaaggacaaaaacttggatggcctcaaaaggttcttgaacaccactgtgattctccaaggacgaattacgtaaattatactttcatacaaaggagacaataaggcagtaaacacaggagacacgggggacagcgtccacactcagagggcctgggccacagccccgatgtttcttttcagaactcagcccctttcctgattttacttctaagaggaaaattattttggggaggaactacacagtcgtgattagaatttatctgatggttttgtattataacttgtaagacctgccagaatgctagtcccgagagtgtcagacaaggaagaagtccctgggcctcttccccttacccggcccttagatttcatggagcagccacttagcattgaattgcactaccctgagctaaacgtgtctgtgctttctaagataagagcttgatccctttcttctatcttaagacagcacctcctgaaaagaatcgaagttgtcacaactctcaattattttttaaatactgcatagattgagttttggtttattaccaacccttcccagaattgcgttggatctaaaactactagatctcatcccattcccatgtaaattaccacagaccgcagtaccggggctggagcggagtgaagctgtctgctgtaagaggagtggccatgtgagggcatggagtcattagtctcacaaacacactttggactgaagaggatcatttctttttgttcgtgaggtcactgtccaggcctctcatatcatgaccagacggcgggtctccatcttctttcactcctgtggccctggctgctttacacaatctgttctataaggttcaggtgttttcaagttggaaagatcataaatactcaaaattgttttcaagttagcaagttcttttaacagtcttttatgcaaaaattgaattaataaaataatcttttgtaaagacttgcagacatgaaaaa

SEQ ID NO: 311656 - DNA, 3341 bp, Homo sapiens
gaaccaatcaggaccggcctggcagtgtcatggctgcccacaggtctgcaggcactcggtacgccgctaacgcggcgaggtagctcggtgcgtctcgcggtaccagtgcgaatcatcgggctatccaggtccgagatcctagtctcctgtcggctctgaggaggatggatccttctgcggatacatgggacctcttctcacctttaatatcattatggataaacaggttttacatttatttgggctttgctgttagcattagcctttggatttgtgtccagattgtcatcaagacgcagggcaagaacttacaggaaaaatctgttccaaaagcagctcaggatttgatgacaaatggttatgtctcccttcaagagaaagacatctttgtgtctggagtgaagattttttatggttctcagactggaacagcgaagggattcgcaacagttcttgctgaagcagttacatccctggatctgcctgtggccattattaatctaaaagaatatgatccagatgatcatctgatagaagaggtgactagtaaaaatgtctgtgtcttcctggttgcgacatacactgacggcctaccaactgaaagtgcagagtggttctgcaaatggttagaggaagcatccattgattttcgatttggcaaaacttacctgaagggtatgagatatgcggtatttggcctgggaaattctgcctatgctagccacttcaacaaggttggcaaaaatgttgacaagtggctctggatgcttggcgcgcatcgtgtgatgagtcgaggggagggcgactgcgacgtggttaaaagcaagcacggcagcattgaggccgacttcagagcatggaagaccaagttcatctcccagctgcaggcacttcagaaaggggagagaaagaagtcctgtggcggccactgcaagaaaggcaaatgtgaatctcaccaacatggctcagaggagagggaggaaggatctcatgagcaggatgaattgcatcatagagacaccgaggaggaagaaccctttgagagctccagtgaagaagagtttggtggtgaggaccatcagagcctaaattccattgttgatgttgaagatttgggcaaaattatggatcatgtgaagaaagaaaagagagaaaaggaacagcaggaagagaagtctggtttgttcaggaacatggggaggaatgaagatggtgaaagaagagctatgataactcctgctctccgagaagcccttactaaacaaggttatcagttgattgggagccactcgggggtgaagctttgcaggtggacaaagtccatgctccgagggagaggaggttgttacaaacacacattctatggaattgagagccatcgctgcatggaaaccaccccgagcttggcgtgtgctaataaatgtgtcttctgttggcggcaccacaccaaccccgtgggcactgagtggcggtggaagatggaccagcctgaaatgatcttgaaggaagccattgaaaaccatcagaacatgattaagcagtttaaaggagtaccgggcgtcaaagcagaacgctttgaagaaggaatgacggtaaagcactgtgcattgtccctcgtgggagaaccaataatgtacccagagatcaacaggtttttgaagctactccaccagtgtaaaatttccagcttcctggtcacaaacgcacaatttcctgcggaaatcaggaacctcgagccggttactcagctgtatgtcagtgtggatgccagtaccaaagacagcctgaagaaaatcgaccgcccactcttcaaggatttctggcagagattccttgacagtttaaaagccttggcagtcaagcaacaacgaactgtctacagactgacgctcgtgaaagcatggaacgtggacgagctccaggcctacgcgcagctcgtgtccctggggaatcctgacttcatcgaagtgaagggcgttacctactgcggagaaagttcagcaagcagtcttaccatggcccacgtgccctggcatgaggaagtggtacagtttgtccgcgagctggtggatctgatccccgaatatgaaattgcatgtgaacacgaacactctaattgcctcctgatagcacacagaaagtttaaaattggtggtgaatggtggacatggatcgattataaccgcttccaggagctcatccaggaatatgaagatagtggtggatcaaaaacgttcagcgcaaaggattatatggccagaactcctcactgggcattatttggtgccagtgaaagaggctttgatcccaaggacacaagacatcagagaaagaacaaatcaaaggctatttctggatgttgagattatctgatttcaaggtactgaaggacaaaaacttggatggcctcaaaaggttcttgaacaccactgtgattctccaaggacgaattacgtaaattatactttcatacaaaggagacaataaggcagtaaacacaggagacacgggggacagcgtccacactcagagggcctgggccacagccccgatgtttcttttcagaactcagcccctttcctgattttacttctaagaggaaaattattttggggaggaactacacagtcgtgattagaatttatctgatggttttgtattataacttgtaagacctgccagaatgctagtcccgagagtgtcagacaaggaagaagtccctgggcctcttccccttacccggcccttagatttcatggagcagccacttagcattgaattgcactaccctgagctaaacgtgtctgtgctttctaagataagagcttgatccctttcttctatcttaagacagcacctcctgaaaagaatcgaagttgtcacaactctcaattattttttaaatactgcatagattgagttttggtttattaccaacccttcccagaattgcgttggatctccgtccctgcagcgcagtgaaaccgccttgttgcaacacgatagtcatgtgagggcatgcagtattaacttcacaaccacatttgtactgaagagacatttccttctgtaccgatgttatcgtcactgtcctatatctgccagacggcggtcttcatctctctccctcctggtcctggctcgcttacccctccagtccatttcgtctagcgttttctcctccattacgctactctcaattcggtgcacgcctctcctctctaccttcctcttgccatacttgctatcacctgctcctcgcgacatctctcgtcactcctgtgctacccggctccacctctcctctcttatcgccttatactcctggcctgctctactcg

SEQ ID NO: 311657 - DNA, 1118 bp, Homo sapiens
gaccacaacctgtcctaattccatggggaggacaggtttgggagtgttcccctcctgctccagacaatcccataaggaggtggaggtgctggagccatagctgactggggggcagaggatcaggatgattattcaggggattcaaagcaccaagcagtgccctgtcttccccacctaatggtgggagtctaaaaccttaggtttgggctgtttttccttttgcagcatcaaattatacctcttttgagtaggttcattctgataaaagagtataaaagcctggacatacaggattgcatcctattttctctgctcttacagaatagttgcagttgtattatagtagcataacttaaagaactgtttgtcagccattttttcccaaattctaaggcatattgaggccaagcagcgttacagttaaaaaaattttatttttcttcatgggctcatagctgaaagtggcccaattctggagaatgcagccaatgatgctactctctgggatcaattccaaatttgccctgttcagtcttttcacataacacacacaccacacacacacacacacacagatacacacacacacaccccccaaaccaaacaacaacaacaacaaaacaaaatcacaaacagaaaaccaaactccctacaggaaagcaaacaagaaaatgggcatagtccaccattctattactcccccaaaagggccctcttcacaatgcaagcagagagagtgagatatggctgtgtgcaccgcagtgacttacccttcaaaccaaaaccagaagtccagatagcagtctgagatgtttctctgctctaagcttctagagtaccaacagcagcctacactgacctagaagagcgactttagggccccctgaccaacacacttgggcagctgctgggacactcgttcgcctaacctggccagggcctattgccatgctagacctggcatggttgccaaaatctgttgcagaaccccaaaagttaggttcaagtacctgatgcgcagtaagccaaacactgacacatcggtgcttcagagcagagaaaggtttattcaatttgaccaaagcatgagggtgggagaggcaaattctcaaattcag

SEQ ID NO: 311658 - DNA, 453 bp, Homo sapiens
acatttgaaagacatcctactattaagcatttatttattgactgcttgctgtatgttcaacattgtggaatatcatgggaagataagttataatcttattaaacaaagtgctgggattacaggtgtgacacaccgtactgggccctaggctgtgtttttaaaaagcacttggccttggtgtcttcagtctcttgctctcaggtattgttcagttctgaacttgactgaccactgttggtcatttttgttagagatttgcaggtaaacatttaacgtattgtagtttgggaaatcttttacgtttctgaagagagtgtgggtagttgtaaggactttgctttaaacctaatcaccaaagcaggaacagaaatttaagttccaaaataaatttttaaggtcatttttaatctcacttgtttcatagacgttcaaggacattttcaaagaaacacc

SEQ ID NO: 311659 - DNA, 246 bp, Homo sapiens
acatttgaaagacatcctactattaagcatttatttattgactgcttgctgtatgttcaacattgtggaatatcatgggaagataagttataatcttattaaacaaagagaaaaaggcagcatatggttaaagtatttaaaaagtatattgctgaattcaaagttgtgccggagagagtagtatgatctgaatattcagaaaagcttcatgaaggatttaagacaagctaataatgtttggagaaa

SEQ ID NO: 311660 - DNA, 3763 bp, Homo sapiens
cccgcgagcgtccatccatctgtccggccgactgtccagcgaaaggggctccaggccgggcgcacgtcgacccgggggaccgaggccaggagaggggccaagagcgcggctgacccttgcgggccggggcaggggacggtggccgcggccatgcagtcctgtgccagggcgtgggggctgcgcctgggccgcggggtcgggggcggccgccgcctggctgggggatcggggccgtgctgggcgccgcggagccgggacagcagcagtggcggcggggacagcgccgcggctggggcctcgcgcctcctggagcgccttctgcccagacacgacgacttcgctcggaggcacatcggccctggggacaaagaccagagagagatgctgcagaccttggggctggcgagcattgatgaattgatcgagaagacggtccctgccaacatccgtttgaaaagacccttgaaaatggaagaccctgtttgtgaaaatgaaatccttgcaactctgcatgccatttcaagcaaaaaccagatctggagatcgtatattggcatgggctattataactgctcagtgccacagacgattttgcggaacttactggagaactcaggatggatcacccagtatactccataccagcctgaggtgtctcaggggaggctggagagtttactcaactaccagaccatggtgtgtgacatcacaggcctggacatggccaatgcatccctgctggatgaggggactgcagccgcagaggcactgcagctgtgctacagacacaacaagaggaggaaatttctcgttgatccccgttgccacccacagacaatagctgttgtccagactcgagccaaatatactggagtcctcactgagctgaagttaccctgtgaaatggacttcagtggaaaagatgtcagtggagtgttgttccagtacccagacacggaggggaaggtggaagactttacggaactcgtggagagagctcatcagagtgggagcctggcctgctgtgctactgaccttttagctttgtgcatcttgaggccacctggagaatttggggtagacatcgccctgggcagctcccagagatttggagtgccactgggctatgggggaccccatgcagcattttttgctgtccgagaaagcttggtgagaatgatgcctggaagaatggtgggggtaacaagagatgccactgggaaagaagtgtatcgtcttgctcttcaaaccagggagcaacacattcggagagacaaggctaccagcaacatctgtacagctcaggccctcttggcgaatatggctgccatgtttgcaatctaccatggttcccatgggctggagcatattgctaggagggtacataatgccactttgattttgtcagaaggtctcaagcgagcagggcatcaactccagcatgacctgttctttgataccttgaagattcagtgtggctgctcagtgaaggaggtcttgggcagggccgctcagcggcagatcaattttcggctttttgaggatggcacacttggtatttctcttgatgaaacagtcaatgaaaaagatctggacgatttgttgtggatctttggttgtgagtcatctgcagaactggttgctgaaagcatgggagaggagtgcagaggtattccagggtctgtgttcaagaggaccagcccgttcctcacccatcaagtgttcaacagctaccactctgaaacaaacattgtccggtacatgaagaaactggaaaataaagacatttcccttgttcacagcatgattccactgggatcctgcaccatgaaactgaacagttcgtctgaactcgcacctatcacatggaaagaatttgcaaacatccacccctttgtgcctctggatcaagctcaaggatatcagcagcttttccgagagcttgagaaggatttgtgtgaactcacaggttatgaccaggtctgtttccagccaaacagcggagcccagggagaatatgctggactggccactatccgagcctacttaaaccagaaaggagaggggcacagaacggtttgcctcattccgaaatcagcacatgggaccaacccagcaagtgcccacatggcaggcatgaagattcagcctgtggaggtggataaatatgggaatatcgatgcagttcacctcaaggccatggtggataagcacaaggagaacctagcagctatcatgattacatacccatccaccaatggggtgtttgaagagaacatcagtgacgtgtgtgacctcatccatcaacatggaggacaggtctacctagacggggcaaatatgaatgctcaggtgggaatctgtcgccctggagacttcgggtctgatgtctcgcacctaaatcttcacaagaccttctgcattccccacggaggaggtggtcctggcatggggcccatcggagtgaagaaacatctcgccccgtttttgcccaatcatcccgtcatttcactaaagcggaatgaggatgcctgtcctgtgggaaccgtcagtgcggccccatggggctccagttccatcttgcccatttcctgggcttatatcaagatgatgggaggcaagggtcttaaacaagccacggaaactgcgatattaaatgccaactacatggccaagcgattagaaacacactacagaattcttttcaggggtgcaagaggttatgtgggtcatgaatttattttggacacgagacccttcaaaaagtctgcaaatattgaggctgtggatgtggccaagagactccaggattatggatttcacgcccctaccatgtcctggcctgtggcagggaccctcatggtggagcccactgagtcggaggacaaggcagagctggacagattctgtgatgccatgatcagcattcggcaggaaattgctgacattgaggagggccgcatcgaccccagggtcaatccgctgaagatgtctccacactccctgacctgcgttacatcttcccactgggaccggccttattccagagaggtggcagcattcccactccccttcgtgaaaccagagaacaaattctggccaacgattgcccggattgatgacatatatggagatcagcacctggtttgtacctgcccacccatggaagtttatgagtctccattttctgaacaaaagagggcgtcttcttagtcctctctccctaagtttaaaggactgatttgatgcctctccccagagcatttgataagcaagaaagatttcatctcccaccccagcctcaagtaggagttttatatactgtgtatatctctgtaatctctgtcaaggtaaatgtaaatacagtagctggagggagtcgaagctgatggttggaagacggatttgctttggtattctgcttccacatgtgccagttgcctggattgggagccattttgtgttttgcgtagaaagttttaggaactttaacttttaatgtggcaagtttgcagatgtcatagaggctatcctggagacttaatagacatttttttgttccaaaagagtccatgtggactgtgccatctgtgggaaatcccagggcaaatgtttacattttgtataccctgaagaactctttttcctctaatatgcctaatctgtaatcacatttctgagtgttttcctctttttctgtgtgaggtttttttttttttaatctgcatttattagtattctaataaaagcattttgatcggaa

SEQ ID NO: 311661 - DNA, 3710 bp, Homo sapiens
cccgcgagcgtccatccatctgtccggccgactgtccagcgaaaggggctccaggccgggcgcacgtcgacccgggggaccgaggccaggagaggggccaagagcgcggctgacccttgcgggccggggcaggggacggtggccgcggccatgcagtcctgtgccagggcgtgggggctgcgcctgggccgcggggtcgggggcggccgccgcctggctgggggatcggggccgtgctgggcgccgcggagccgggacagcagcagtggcggcggggacagcgccgcggctggggcctcgcgcctcctggagcgccttctgcccagacacgacgacttcgctcggaggcacatcggccctggggacaaagaccagagagagatgctgcagaccttggggctggcgagcattgatgaattgatcgagaagacggtccctgccaacatccgtttgaaaagacccttgaaaatggaagaccctgtttgtgaaaatgaaatccttgcaactctgcatgccatttcaagcaaaaaccagatctggagatcgtatattggcatgggctattataactgctcagtgccacagacgattttgcggaacttactggagaactcaggatggatcacccagtatactccataccagcctgaggtgtctcaggggaggctggagagtttactcaactaccagaccatggtgtgtgacatcacaggcctggacatggccaatgcatccctgctggatgaggggactgcagccgcagaggcactgcagctgtgctacagacacaacaagaggaggaaatttctcgttgatccccgttgccacccacagacaatagctgttgtccagactcgagccaaatatactggagtcctcactgagctgaagttaccctgtgaaatggacttcagtggaagactttacggaactcgtggagagagctcatcagagtgggagcctggcctgctgtgctactgaccttttagctttgtgcatcttgaggccacctggagaatttggggtagacatcgccctgggcagctcccagagatttggagtgccactgggctatgggggaccccatgcagcattttttgctgtccgagaaagcttggtgagaatgatgcctggaagaatggtgggggtaacaagagatgccactgggaaagaagtgtatcgtcttgctcttcaaaccagggagcaacacattcggagagacaaggctaccagcaacatctgtacagctcaggccctcttggcgaatatggctgccatgtttgcaatctaccatggttcccatgggctggagcatattgctaggagggtacataatgccactttgattttgtcagaaggtctcaagcgagcagggcatcaactccagcatgacctgttctttgataccttgaagattcagtgtggctgctcagtgaaggaggtcttgggcagggccgctcagcggcagatcaattttcggctttttgaggatggcacacttggtatttctcttgatgaaacagtcaatgaaaaagatctggacgatttgttgtggatctttggttgtgagtcatctgcagaactggttgctgaaagcatgggagaggagtgcagaggtattccagggtctgtgttcaagaggaccagcccgttcctcacccatcaagtgttcaacagctaccactctgaaacaaacattgtccggtacatgaagaaactggaaaataaagacatttcccttgttcacagcatgattccactgggatcctgcaccatgaaactgaacagttcgtctgaactcgcacctatcacatggaaagaatttgcaaacatccacccctttgtgcctctggatcaagctcaaggatatcagcagcttttccgagagcttgagaaggatttgtgtgaactcacaggttatgaccaggtctgtttccagccaaacagcggagcccagggagaatatgctggactggccactatccgagcctacttaaaccagaaaggagaggggcacagaacggtttgcctcattccgaaatcagcacatgggaccaacccagcaagtgcccacatggcaggcatgaagattcagcctgtggaggtggataaatatgggaatatcgatgcagttcacctcaaggccatggtggataagcacaaggagaacctagcagctatcatgattacatacccatccaccaatggggtgtttgaagagaacatcagtgacgtgtgtgacctcatccatcaacatggaggacaggtctacctagacggggcaaatatgaatgctcaggtgggaatctgtcgccctggagacttcgggtctgatgtctcgcacctaaatcttcacaagaccttctgcattccccacggaggaggtggtcctggcatggggcccatcggagtgaagaaacatctcgccccgtttttgcccaatcatcccgtcatttcactaaagcggaatgaggatgcctgtcctgtgggaaccgtcagtgcggccccatggggctccagttccatcttgcccatttcctgggcttatatcaagatgatgggaggcaagggtcttaaacaagccacggaaactgcgatattaaatgccaactacatggccaagcgattagaaacacactacagaattcttttcaggggtgcaagaggttatgtgggtcatgaatttattttggacacgagacccttcaaaaagtctgcaaatattgaggctgtggatgtggccaagagactccaggattatggatttcacgcccctaccatgtcctggcctgtggcagggaccctcatggtggagcccactgagtcggaggacaaggcagagctggacagattctgtgatgccatgatcagcattcggcaggaaattgctgacattgaggagggccgcatcgaccccagggtcaatccgctgaagatgtctccacactccctgacctgcgttacatcttcccactgggaccggccttattccagagaggtggcagcattcccactccccttcgtgaaaccagagaacaaattctggccaacgattgcccggattgatgacatatatggagatcagcacctggtttgtacctgcccacccatggaagtttatgagtctccattttctgaacaaaagagggcgtcttcttagtcctctctccctaagtttaaaggactgatttgatgcctctccccagagcatttgataagcaagaaagatttcatctcccaccccagcctcaagtaggagttttatatactgtgtatatctctgtaatctctgtcaaggtaaatgtaaatacagtagctggagggagtcgaagctgatggttggaagacggatttgctttggtattctgcttccacatgtgccagttgcctggattgggagccattttgtgttttgcgtagaaagttttaggaactttaacttttaatgtggcaagtttgcagatgtcatagaggctatcctggagacttaatagacatttttttgttccaaaagagtccatgtggactgtgccatctgtgggaaatcccagggcaaatgtttacattttgtataccctgaagaactctttttcctctaatatgcctaatctgtaatcacatttctgagtgttttcctctttttctgtgtgaggtttttttttttttaatctgcatttattagtattctaataaaagcattttgatcggaa

SEQ ID NO: 311662 - DNA, 3566 bp, Homo sapiens
cccgcgagcgtccatccatctgtccggccgactgtccagcgaaaggggctccaggccgggcgcacgtcgacccgggggaccgaggccaggagaggggccaagagcgcggctgacccttgcgggccggggcaggggacggtggccgcggccatgcagtcctgtgccagggcgtgggggctgcgcctgggccgcggggtcgggggcggccgccgcctggctgggggatcggggccgtgctgggcgccgcggagccgggacagcagcagtggcggcggggacagcgccgcggctggggcctcgcgcctcctggagcgccttctgcccagacacgacgacttcgctcggaggcacatcggccctggggacaaagaccagagagagatgctgcagaccttggggctggcgagcattgatgaattgatcgagaagacggtccctgccaacatccgtttgaaaagacccttgaaaatggaagaccctgtttgtgaaaatgaaatccttgcaactctgcatgccatttcaagcaaaaaccagatctggagatcgtatattggcatgggctattataactgctcagtgccacagacgattttgcggaacttactggagaactcaggatggatcacccagtatactccataccagcctgaggtgtctcaggggaggctggagagtttactcaactaccagaccatggtgtgtgacatcacaggcctggacatggccaatgcatccctgctggatgaggggactgcagccgcagaggcactgcagctgtgctacagacacaacaagaggaggaaatttctcgttgatccccgttgccacccacagacaatagctgttgtccagactcgagccaaatatactggagtcctcactgagctgaagttaccctgtgaaatggacttcagtggaaaagatgtcagtggagtgttgttccagtacccagacacggaggggaaggtggaagactttacggaactcgtggagagagctcatcagagtgggagatgccactgggaaagaagtgtatcgtcttgctcttcaaaccagggagcaacacattcggagagacaaggctaccagcaacatctgtacagctcaggccctcttggcgaatatggctgccatgtttgcaatctaccatggttcccatgggctggagcatattgctaggagggtacataatgccactttgattttgtcagaaggtctcaagcgagcagggcatcaactccagcatgacctgttctttgataccttgaagattcagtgtggctgctcagtgaaggaggtcttgggcagggccgctcagcggcagatcaattttcggctttttgaggatggcacacttggtatttctcttgatgaaacagtcaatgaaaaagatctggacgatttgttgtggatctttggttgtgagtcatctgcagaactggttgctgaaagcatgggagaggagtgcagaggtattccagggtctgtgttcaagaggaccagcccgttcctcacccatcaagtgttcaacagctaccactctgaaacaaacattgtccggtacatgaagaaactggaaaataaagacatttcccttgttcacagcatgattccactgggatcctgcaccatgaaactgaacagttcgtctgaactcgcacctatcacatggaaagaatttgcaaacatccacccctttgtgcctctggatcaagctcaaggatatcagcagcttttccgagagcttgagaaggatttgtgtgaactcacaggttatgaccaggtctgtttccagccaaacagcggagcccagggagaatatgctggactggccactatccgagcctacttaaaccagaaaggagaggggcacagaacggtttgcctcattccgaaatcagcacatgggaccaacccagcaagtgcccacatggcaggcatgaagattcagcctgtggaggtggataaatatgggaatatcgatgcagttcacctcaaggccatggtggataagcacaaggagaacctagcagctatcatgattacatacccatccaccaatggggtgtttgaagagaacatcagtgacgtgtgtgacctcatccatcaacatggaggacaggtctacctagacggggcaaatatgaatgctcaggtgggaatctgtcgccctggagacttcgggtctgatgtctcgcacctaaatcttcacaagaccttctgcattccccacggaggaggtggtcctggcatggggcccatcggagtgaagaaacatctcgccccgtttttgcccaatcatcccgtcatttcactaaagcggaatgaggatgcctgtcctgtgggaaccgtcagtgcggccccatggggctccagttccatcttgcccatttcctgggcttatatcaagatgatgggaggcaagggtcttaaacaagccacggaaactgcgatattaaatgccaactacatggccaagcgattagaaacacactacagaattcttttcaggggtgcaagaggttatgtgggtcatgaatttattttggacacgagacccttcaaaaagtctgcaaatattgaggctgtggatgtggccaagagactccaggattatggatttcacgcccctaccatgtcctggcctgtggcagggaccctcatggtggagcccactgagtcggaggacaaggcagagctggacagattctgtgatgccatgatcagcattcggcaggaaattgctgacattgaggagggccgcatcgaccccagggtcaatccgctgaagatgtctccacactccctgacctgcgttacatcttcccactgggaccggccttattccagagaggtggcagcattcccactccccttcgtgaaaccagagaacaaattctggccaacgattgcccggattgatgacatatatggagatcagcacctggtttgtacctgcccacccatggaagtttatgagtctccattttctgaacaaaagagggcgtcttcttagtcctctctccctaagtttaaaggactgatttgatgcctctccccagagcatttgataagcaagaaagatttcatctcccaccccagcctcaagtaggagttttatatactgtgtatatctctgtaatctctgtcaaggtaaatgtaaatacagtagctggagggagtcgaagctgatggttggaagacggatttgctttggtattctgcttccacatgtgccagttgcctggattgggagccattttgtgttttgcgtagaaagttttaggaactttaacttttaatgtggcaagtttgcagatgtcatagaggctatcctggagacttaatagacatttttttgttccaaaagagtccatgtggactgtgccatctgtgggaaatcccagggcaaatgtttacattttgtataccctgaagaactctttttcctctaatatgcctaatctgtaatcacatttctgagtgttttcctctttttctgtgtgaggtttttttttttttaatctgcatttattagtattctaataaaagcattttgatcggaa

SEQ ID NO: 311663 - DNA, 1430 bp, Homo sapiens
ggtttccgacaggatccagtatgcccatgattcagaatcgatgctcggtaccgctggtgaataacaatgacgtcacaagaccttctgcattccccacggaggaggtggtcctggcatggggcccatcggagtgaagaaacatctcgccccgtttttgcccaatcatcccgtcatttcactaaagcggaatgaggatgcctgtcctgtgggaaccgtcagtgcggccccatggggctccagttccatcttgcccatttcctgggcttatatcaagatgatgggaggcaagggtcttaaacaagccacggaaactgcgatattaaatgccaactacatggccaagcgattagaaacacactacagaattcttttcaggggtgcaagaggttatgtgggtcatgaatttattttggacacgagacccttcaaaaagtctgcaaatattgaggctgtggatgtggccaagagactccaggattatggatttcacgcccctaccatgtcctggcctgtggcagggaccctcatggtggagcccactgagtcggaggacaaggcagagctggacagattctgtgatgccatgatcagcattcggcaggaaattgctgacattgaggagggccgcatcgaccccagggtcaatccgctgaagatgtctccacactccctgacctgcgttacatcttcccactgggaccggccttattccagagaggtggcagcattcccactccccttcgtgaaaccagagaacaaattctggccaacgattgcccggattgatgacatatatggagatcagcacctggtttgtacctgcccacccatggaagtttatgagtctccattttctgaacaaaagagggcgtcttcttagtcctctctccctaagtttaaaggactgatttgatgcctctccccagagcatttgataagcaagaaagatttcatctcccaccccagcctcaagtaggagttttatatactgtgtatatctctgtaatctctgtcaaggtaaatgtaaatacagtagctggagggagtcgaagctgatggttggaagacggatttgctttggtattctgcttccacatgtgccagttgcctggattgggagccattttgtgttttgcgtagaaagttttaggaactttaacttttaatgtggcaagtttgcagatgtcatagaggctatcctggagacttaatagacatttttttgttccaaaagagtccatgtggactgtgccatctgtgggaaatcccagggcaaatgtttacattttgtataccctgaagaactctttttcctctaatatgcctaatctgtaatcacatttctgagtgttttcctctttttctgtgtgaggtttttttttttttaatctgcatttattagtattctaataaaagcattttgatcggaa

SEQ ID NO: 311664 - DNA, 3709 bp, Homo sapiens
cccgcgagcgtccatccatctgtccggccgactgtccagcgaaaggggctccaggccgggcgcacgtcgacccgggggaccgaggccaggagaggggccaagagcgcggctgacccttgcgggccggggcaggggacggtggccgcggccatgcagtcctgtgccagggcgtgggggctgcgcctgggccgcggggtcgggggcggccgccgcctggctgggggatcggggccgtgctgggcgccgcggagccgggacagcagcagtggcggcggggacagcgccgcggctggggcctcgcgcctcctggagcgccttctgcccagacacgacgacttcgctcggaggcacatcggccctggggacaaagaccagagagagatgctgcagaccttggggctggcgagcattgatgaattgatcgagaagacggtccctgccaacatccgtttgaaaagacccttgaaaatggaagaccctgtttgtgaaaatgaaatccttgcaactctgcatgccatttcaagcaaaaaccagatctggagatcgtatattggcatgggctattataactgctcagtgccacagacgattttgcggaacttactggagaactcaggatggatcacccagtatactccataccagcctgaggtgtctcaggggaggctggagagtttactcaactaccagaccatggtgtgtgacatcacaggcctggacatggccaatgcatccctgctggatgaggggactgcagccgcagaggcactgcagctgtgctacagacacaacaagaggaggaaatttctcgttgatccccgttgccacccacagacaatagctgttgtccagactcgagccaaatatactggagtcctcactgagctgaagttaccctgtgaaatggacttcagtggaaaagatgtcagtggagtgttgttccagtacccagacacggaggggaaggtggaagactttacggaactcgtggagagagctcatcagagtgggagcctggcctgctgtgctactgaccttttagctttgtgcatcttgaggccacctggagaatttggggtagacatcgccctgggcagctcccagagatttggagtgccactgggctatgggggaccccatgcagcattttttgctgtccgagaaagcttggtgagaatgatgcctggaagaatggtgggggtaacaagagatgccactgggaaagaagtgtatcgtcttgctcttcaaaccagggagcaacacattcggagagacaaggctaccagcaacatctgtacagctcaggccctcttggcgaatatggctgccatgtttgcaatctaccatggttcccatgggctggagcatattgctaggagggtacataatgccactttgattttgtcagaaggtctcaagcgagcagggcatcaactccagcatgacctgttctttgataccttgaagattcagtgtggctgctcagtgaaggaggtcttgggcagggccgctcagcggcagatcaattttcggctttttgaggatggcacacttggtatttctcttgatgaaacagtcaatgaaaaagatctggacgatttgttgtggatctttggttgtgagtcatctgcagaactggttgctgaaagcatgggagaggagtgcagaggtattccagggtctgtgttcaagaggaccagcccgttcctcacccatcaagtgttcaacagctaccactctgaaacaaacattgtccggtacatgaagaaactggaaaataaagacatttcccttgttcacagcatgattccactgggatcctgcaccatgaaactgaacagttcgtctgaactcgcacctatcacatggaaagaatttgcaaacatccacccctttgtgcctctggatcaagctcaaggatatcagcagcttttccgagagcttgagaaggatttgtgtgaactcacaggttatgaccaggtctgtttccagccaaacagcggagcccagggagaatatgctggactggccactatccgagcctacttaaaccagaaaggagaggggcacagaacggtttgcctcattccgaaatcagcacatgggaccaacccagcaagtgcccacatggcaggcatgaagattcagcctgtggaggtggataaatatgggaatatcgatgcagttcacctcaaggccatggtggataagcacaaggagaacctagcagctatcatgattacatacccatccaccaatggggtgtttgaagagaacatcagtgacgtgtgtgacctcatccatcaacatggaggacaggtctacctagacggggcaaatatgaatgctcaggtgggaatctgtcgccctggagacttcgggtctgatgtctcgcacctaaatcttcacaagaccttctgcattccccacggaggaggtggtcctggcatggggcccatcggagtgaagaaacatctcgccccgtttttgcccaatcatcccgtcatttcactaaagcggaatgaggatgcctgtcctgtgggaaccgtcagtgcggccccatggggctccagttccatcttgcccatttcctgggcttatatcaagatgatgggaggcaagggtcttaaacaagccacggaaactgcgatattaaatgccaactacatggccaagcgattagaaacacactacagaattcttttcaggggtgcaagaggttatgtgggtcatgaatttattttggacacgagacccttcaaaaagtctgcaaatattgaggctgtggatgtggccaagagactccaggattatggatttcacgcccctaccatgtcctggcctgtggcagggaccctcatggtggagcccactgagtcggaggacaaggcagagctggacagattctgtgatgccatgatcagcattcggcaggaaattgctgacattgaggagggccgcatcgaccccagggtcaatccgctgaagatgtctccacactccctgacctgcgttacatcttcccactgggaccggccttattccagagaggtggcagcattcccactccccttcgtgaaaccagagaacaaattctggccaacgattgcccggattgatgacatatatggagatcagcacctggtttgtacctgcccacccatggaagtttatgagtctccattttctgaacgcctctccccagagcatttgataagcaagaaagatttcatctcccaccccagcctcaagtaggagttttatatactgtgtatatctctgtaatctctgtcaaggtaaatgtaaatacagtagctggagggagtcgaagctgatggttggaagacggatttgctttggtattctgcttccacatgtgccagttgcctggattgggagccattttgtgttttgcgtagaaagttttaggaactttaacttttaatgtggcaagtttgcagatgtcatagaggctatcctggagacttaatagacatttttttgttccaaaagagtccatgtggactgtgccatctgtgggaaatcccagggcaaatgtttacattttgtataccctgaagaactctttttcctctaatatgcctaatctgtaatcacatttctgagtgttttcctctttttctgtgtgaggtttttttttttttaatctgcatttattagtattctaataaaagcattttgatcggaa

SEQ ID NO: 311665 - DNA, 1425 bp, Homo sapiens
cccgcgagcgtccatccatctgtccggccgactgtccagcgaaaggggctccaggccgggcgcacgtcgacccgggggaccgaggccaggagaggggccaagagcgcggctgacccttgcgggccggggcaggggacggtggccgcggccatgcagtcctgtgccagggcgtgggggctgcgcctgggccgcggggtcgggggcggccgccgcctggctgggggatcggggccgtgctgggcgccgcggagccgggacagcagcagtggcggcggggacagcgccgcggctggggcctcgcgcctcctggagcgccttctgcccagacacgacgacttcgctcggaggcacatcggccctggggacaaagaccagagagagatgctgcagaccttggggctggcgagcattgatgaattgatcgagaagacggtccctgccaacatccgtttgaaaagacccttgaaaatggaagaccctgtttgtgaaaatgaaatccttgcaactctgcatgccatttcaagcacacagacgattttgcggaacttactggagaactcaggatggatcacccagtatactccataccagcctgaggtgtctcaggggaggctggagagtttactcaactaccagaccatggtgtgtgacatcacaggcctggacatggccaatgcatccctgctggatgaggggactgcagccgcagaggcactgcagctgtgctacagcccttcgtgaaaccagagaacaaattctggccaacgattgcccggattgatgacatatatggagatcagcacctggtttgtacctgcccacccatggaagtttatgagtctccattttctgaacaaaagagggcgtcttcttagtcctctctccctaagtttaaaggactgatttgatgcctctccccagagcatttgataagcaagaaagatttcatctcccaccccagcctcaagtaggagttttatatactgtgtatatctctgtaatctctgtcaaggtaaatgtaaatacagtagctggagggagtcgaagctgatggttggaagacggatttgctttggtattctgcttccacatgtgccagttgcctggattgggagccattttgtgttttgcgtagaaagttttaggaactttaacttttaatgtggcaagtttgcagatgtcatagaggctatcctggagacttaatagacatttttttgttccaaaagagtccatgtggactgtgccatctgtgggaaatcccagggcaaatgtttacattttgtataccctgaagaactctttttcctctaatatgcctaatctgtaatcacatttctgagtgttttcctctttttctgtgtgaggtttttttttttttaatctgcatttattagtattctaataaaagcattttgatcggaa

SEQ ID NO: 311666 - DNA, 3093 bp, Homo sapiens
cccgcgagcgtccatccatctgtccggccgactgtccagcgaaaggggctccaggccgggcgcacgtcgacccgggggaccgaggccaggagaggggccaagagcgcggctgacccttgcgggccggggcaggggacggtggccgcggccatgcagtcctgtgccagggcgtgggggctgcgcctgggccgcggggtcgggggcggccgccgcctggctgggggatcggggccgtgctgggcgccgcggagccgggacagcagcagtggcggcggggacagcgccgcggctggggcctcgcgcctcctggagcgccttctgcccagacacgacgacttcgctcggaggcacatcggccctggggacaaagaccagagagagatgctgcagaccttggggctggcgagcattgatgaattgatcgagaagacggtccctgccaacatccgtttgaaaagacccttgaaaatggaagaccctgtttgtgaaaatgaaatccttgcaactctgcatgccatttcaagcaaaaaccagatctggagatcgtatattggcatgggctattataactgctcagtgccacagacgattttgcggaacttactggagaactcaggatggatcacccagtatactccataccagcctgaggtgtctcaggggaggctggagagtttactcaactaccagaccatggtgtgtgacatcacaggcctggacatggccaatgcatccctgctggatgaggggactgcagccgcagaggcactgcagctgtgctacagacacaacaagaggaggaaatttctcgttgatccccgttgccacccacagacaatagctgttgtccagactcgagccaaatatactggagtcctcactgagctgaagttaccctgtgaaatggacttcagtggaaaagatgtcagtggagtgttgttccagtacccagacacggaggggaaggtggaagactttacggaactcgtggagagagctcatcagagtgggagcctggcctgctgtgctactgaccttttagctttgtgcatcttgaggccacctggagaatttggggtagacatcgccctgggcagctcccagagatttggagtgccactgggctatgggggaccccatgcagcattttttgctgtccgagaaagcttggtgagaatgatgcctggaagaatggtgggggtaacaagagatgccactgggaaagaagtgtatcgtcttgctcttcaaaccagggagcaacacattcggagagacaaggctaccagcaacatctgtacagctcaggccctcttggcgaatatggctgccatgtttgcaatctaccatggttcccatgggctggagcatattgctaggagggtacataatgccactttgattttgtcagaaggtctcaagcgagcagggcatcaactccagcatgacctgttctttgataccttgaagattcagtgtggctgctcagtgaaggaggtcttgggcagggccgctcagcggcagatcaattttcggctttttgaggatggcacacttggtatttctcttgatgaaacagtcaatgaaaaagatctggacgatttgttgtggatctttggttgtgagtcatctgcagaactggttgctgaaagcatgggagaggagtgcagaggtattccagggtctgtgttcaagaggaccagcccgttcctcacccatcaagtgttcaacagctaccactctgaaacaaacattgtccggtacatgaagaaactggaaaataaagacatttcccttgttcacagcatgattccactgggatcctgcaccatgaaactgaacagttcgtctgaactcgcacctatcacatggaaagaatttgcaaacatccacccctttgtgcctctggatcaagctcaaggatatcagcagcttttccgagagcttgagaaggatttgtgtgaactcacaggttatgaccaggtctgtttccagccaaacagcggagcccagggagaatatgctggactggccactatccgagcctacttaaaccagaaaggagaggggcacagaacggtttgcctcattccgaaatcagcacatgggaccaacccagcaagtgcccacatggcaggcatgaagattcagcctgtggaggtggataaatatgggaatatcgatgcagttcacctcaaggccatggtacttgtcttctccttagcagatgggagaggccgggatggggagtgctggtggggatcagggacttgatggattatgtaaatgtcttctcttgcattctaatgaaaagtctgcagttcttcctttgaccagagtctactctacccctcccatcaccaacagggagaaatccccgttttctaattccagcttgtgtaaaaaactgaatgaattattcatggtggtagtaagagtactccttgcagaacctgcctgcctctttctgcccaatcttccctctccttctcgccttccccacttaataatcaaaatggcagtcacacttacacatcttcgtgtcaggaattgtaacacaaatgtcagctttgcaaatatccatgactgtgccagccccatcatgctgaattcctggcatcatgcagcttggtttccaccaacccccactctcaacctcccaacctccaggaagaagttgcttagcaaccgtatctgcttcccaccagcggactggcagctgcatcttaagcgggaaggaaaccagtggaatagcaatgtgattttgatggtggtgttattaggcatggagactgtgaactctgtgcagttgccttctaaaggaagctgaaaatccacaatgctgcacctctcttcgatccacctctacccttccattgctccacaaagcttttttccaacaagtgttccaggccagtagttgaaattattaagtccctccattatagtaatataggacatgacttccctggccacccccatgttctcaaacatgcctgctctgatatgctggccaggaaaacaaacagggatgtgacttttatatatgcttgccttctgtaaaaggaaagaataaagaagacttttatttacaga

SEQ ID NO: 311667 - DNA, 1579 bp, Homo sapiens
tattgacatttgaactgatgataggatgtttgaagtttgcttcaaaatatatagttcagcatgaaagtggttagtgagaaatataataggaaacaagattgaccgtaaaccaaattgttacagctggctgacacacacgtcgtagttccttttgttcttcactgtattttggtatagttttgaaatttttcataataacaaaaggctattttcaatgcgtggtcctgagcaaggatatagaaagctccatctttgggtaggagtggttgagctgtagtgcacaaactggatgctgttgctttgattgttttgattgttcaagaccttttgactccagcagagctccttgatgagcttctctcagcgtctggacagtgaccatgtgtcacgtgctggtgaacccctggccagggcccaataaatattgaatgagtaaatgaaagccagaagacctaaccgtgatccctttcttcttgtctttgcaagcggagcccagggagaatatgctggactggccactatccgagcctacttaaaccagaaaggagaggggcacagaacggtttgcctcattccgaaatcagcacatgggaccaacccagcaagtgcccacatggcaggcatgaagattcagcctgtggaggtggataaatatgggaatatcgatgcagttcacctcaaggccatggtacttgtcttctccttagcagatgggagaggccgggatggggagtgctggtggggatcagggacttgatggattatgtaaatgtcttctcttgcattctaatgaaaagtctgcagttcttcctttgaccagagtctactctacccctcccatcaccaacagggagaaatccccgttttctaattccagcttgtgtaaaaaactgaatgaattattcatggtggtagtaagagtactccttgcagaacctgcctgcctctttctgcccaatcttccctctccttctcgccttccccacttaataatcaaaatggcagtcacacttacacatcttcgtgtcaggaattgtaacacaaatgtcagctttgcaaatatccatgactgtgccagccccatcatgctgaattcctggcatcatgcagcttggtttccaccaacccccactctcaacctcccaacctccaggaagaagttgcttagcaaccgtatctgcttcccaccagcggactggcagctgcatcttaagcgggaaggaaaccagtggaatagcaatgtgattttgatggtggtgttattaggcatggagactgtgaactctgtgcagttgccttctaaaggaagctgaaaatccacaatgctgcacctctcttcgatccacctctacccttccattgctccacaaagcttttttccaacaagtgttccaggccagtagttgaaattattaagtccctccattatagtaatataggacatgacttccctggccacccccatgttctcaaacatgcctgctctgatatgctggccaggaaaacaaacagggatgtgacttttatatatgcttgccttctgtaaaaggaaagaataaagaagacttttatttacaga

SEQ ID NO: 311668 - DNA, 3722 bp, Homo sapiens
cccgcgagcgtccatccatctgtccggccgactgtccagcgaaaggggctccaggccgggcgcacgtcgacccgggggaccgaggccaggagaggggccaagagcgcggctgacccttgcgggccggggcaggggacggtggccgcggccatgcagtcctgtgccagggcgtgggggctgcgcctgggccgcggggtcgggggcggccgccgcctggctgggggatcggggccgtgctgggcgccgcggagccgggacagcagcagtggcggcggggacagcgccgcggctggggcctcgcgcctcctggagcgccttctgcccagacacgacgacttcgctcggaggcacatcggccctggggacaaagaccagagagagatgctgcagaccttggggctggcgagcattgatgaattgatcgagaagacggtccctgccaacatccgtttgaaaagacccttgaaaatggaagaccctgtttgtgaaaatgaaatccttgcaactctgcatgccatttcaagcaaaaaccagatctggagatcgtatattggcatgggctattataactgctcagtgccacagacgattttgcggaacttactggagaactcaggatggatcacccagtatactccataccagcctgaggtgtctcaggggaggctggagagtttactcaactaccagaccatggtgtgtgacatcacaggcctggacatggccaatgcatccctgctggatgaggggactgcagccgcagaggcactgcagctgtgctacagacacaacaagaggaggaaatttctcgttgatccccgttgccacccacagacaatagctgttgtccagactcgagccaaatatactggagtcctcactgagctgaagttaccctgtgaaatggacttcagtggaaaagatgtcagtggagtgttgttccagtacccagacacggaggggaaggtggaagactttacggaactcgtggagagagctcatcagagtgggagcctggcctgctgtgctactgaccttttagctttgtgcatcttgaggccacctggagaatttggggtagacatcgccctgggcagctcccagagatttggagtgccactgggctatgggggaccccatgcagcattttttgctgtccgagaaagcttggtgagaatgatgcctggaagaatggtgggggtaacaagagatgccactgggaaagaagtgtatcgtcttgctcttcaaaccagggagcaacacattcggagagacaaggctaccagcaacatctgtacagctcaggccctcttggcgaatatggctgccatgtttgcaatctaccatggttcccatgggctggagcatattgctaggagggtacataatgccactttgattttgtcagaaggtctcaagcgagcagggcatcaactccagcatgacctgttctttgataccttgaagattcagtgtggctgctcagtgaaggaggtcttgggcagggccgctcagcggcagatcaattttcggctttttgaggatggcacacttggtatttctcttgatgaaacagtcaatgaaaaagatctggacgatttgttgtggatctttggttgtgagtcatctgcagaactggttgctgaaagcatgggagaggagtgcagaggtattccagggtctgtgttcaagaggaccagcccgttcctcacccatcaagtgttcaacagctaccactctgaaacaaacattgtccggtacatgaagaaactggggatcctgcaccatgaaactgaacagttcgtctgaactcgcacctatcacatggaaagaatttgcaaacatccacccctttgtgcctctggatcaagctcaaggatatcagcagcttttccgagagcttgagaaggatttgtgtgaactcacaggttatgaccaggtctgtttccagccaaacagcggagcccagggagaatatgctggactggccactatccgagcctacttaaaccagaaaggagaggggcacagaacggtttgcctcattccgaaatcagcacatgggaccaacccagcaagtgcccacatggcaggcatgaagattcagcctgtggaggtggataaatatgggaatatcgatgcagttcacctcaaggccatggtggataagcacaaggagaacctagcagctatcatgattacatacccatccaccaatggggtgtttgaagagaacatcagtgacgtgtgtgacctcatccatcaacatggaggacaggtctacctagacggggcaaatatgaatgctcaggtgggaatctgtcgccctggagacttcgggtctgatgtctcgcacctaaatcttcacaagaccttctgcattccccacggaggaggtggtcctggcatggggcccatcggagtgaagaaacatctcgccccgtttttgcccaatcatcccgtcatttcactaaagcggaatgaggatgcctgtcctgtgggaaccgtcagtgcggccccatggggctccagttccatcttgcccatttcctgggcttatatcaagatgatgggaggcaagggtcttaaacaagccacggaaactgcgatattaaatgccaactacatggccaagcgattagaaacacactacagaattcttttcaggggtgcaagaggttatgtgggtcatgaatttattttggacacgagacccttcaaaaagtctgcaaatattgaggctgtggatgtggccaagagactccaggattatggatttcacgcccctaccatgtcctggcctgtggcagggaccctcatggtggagcccactgagtcggaggacaaggcagagctggacagattctgtgatgccatgatcagcattcggcaggaaattgctgacattgaggagggccgcatcgaccccagggtcaatccgctgaagatgtctccacactccctgacctgcgttacatcttcccactgggaccggccttattccagagaggtggcagcattcccactccccttcgtgaaaccagagaacaaattctggccaacgattgcccggattgatgacatatatggagatcagcacctggtttgtacctgcccacccatggaagtttatgagtctccattttctgaacaaaagagggcgtcttcttagtcctctctccctaagtttaaaggactgatttgatgcctctccccagagcatttgataagcaagaaagatttcatctcccaccccagcctcaagtaggagttttatatactgtgtatatctctgtaatctctgtcaaggtaaatgtaaatacagtagctggagggagtcgaagctgatggttggaagacggatttgctttggtattctgcttccacatgtgccagttgcctggattgggagccattttgtgttttgcgtagaaagttttaggaactttaacttttaatgtggcaagtttgcagatgtcatagaggctatcctggagacttaatagacatttttttgttccaaaagagtccatgtggactgtgccatctgtgggaaatcccagggcaaatgtttacattttgtataccctgaagaactctttttcctctaatatgcctaatctgtaatcacatttctgagtgttttcctctttttctgtgtgaggtttttttttttttaatctgcatttattagtattctaataaaagcattttgatcggaa

SEQ ID NO: 311669 - DNA, 2249 bp, Homo sapiens
tattgacatttgaactgatgataggatgtttgaagtttgcttcaaaatatatagttcagcatgaaagtggttagtgagaaatataataggaaacaagattgaccgtaaaccaaattgttacagctggctgacacacacgtcgtagttccttttgttcttcactgtattttggtatagttttgaaatttttcataataacaaaaggctattttcaatgcgtggtcctgagcaaggatatagaaagctccatctttgggtaggagtggttgagctgtagtgcacaaactggatgctgttgctttgattgttttgattgttcaagaccttttgactccagcagagctccttgatgagcttctctcagcgtctggacagtgaccatgtgtcacgtgctggtgaacccctggccagggcccaataaatattgaatgagtaaatgaaagccagaagacctaaccgtgatccctttcttcttgtctttgcaagcggagcccagggagaatatgctggactggccactatccgagcctacttaaaccagaaaggagaggggcacagaacggtttgcctcattccgaaatcagcacatgggaccaacccagcaagtgcccacatggcaggcatgaagattcagcctgtggaggtggataaatatgggaatatcgatgcagttcacctcaaggccatggtggataagcacaaggagaacctagcagctatcatgattacatacccatccaccaatggggtgtttgaagagaacatcagtgacgtgtgtgacctcatccatcaacatggaggacaggtctacctagacggggcaaatatgaatgctcaggtgggaatctgtcgccctggagacttcgggtctgatgtctcgcacctaaatcttcacaagaccttctgcattccccacggaggaggtggtcctggcatggggcccatcggagtgaagaaacatctcgccccgtttttgcccaatcatcccgtcatttcactaaagcggaatgaggatgcctgtcctgtgggaaccgtcagtgcggccccatggggctccagttccatcttgcccatttcctgggcttatatcaagatgatgggaggcaagggtcttaaacaagccacggaaactgcgatattaaatgccaactacatggccaagcgattagaaacacactacagaattcttttcaggggtgcaagaggttatgtgggtcatgaatttattttggacacgagacccttcaaaaagtctgcaaatattgaggctgtggatgtggccaagagactccaggattatggatttcacgcccctaccatgtcctggcctgtggcagggaccctcatggtggagcccactgagtcggaggacaaggcagagctggacagattctgtgatgccatgatcagcattcggcaggaaattgctgacattgaggagggccgcatcgaccccagggtcaatccgctgaagatgtctccacactccctgacctgcgttacatcttcccactgggaccggccttattccagagaggtggcagcattcccactccccttcgtgaaaccagagaacaaattctggccaacgattgcccggattgatgacatatatggagatcagcacctggtttgtacctgcccacccatggaagtttatgagtctccattttctgaacaaaagagggcgtcttcttagtcctctctccctaagtttaaaggactgatttgatgcctctccccagagcatttgataagcaagaaagatttcatctcccaccccagcctcaagtaggagttttatatactgtgtatatctctgtaatctctgtcaaggtaaatgtaaatacagtagctggagggagtcgaagctgatggttggaagacggatttgctttggtattctgcttccacatgtgccagttgcctggattgggagccattttgtgttttgcgtagaaagttttaggaactttaacttttaatgtggcaagtttgcagatgtcatagaggctatcctggagacttaatagacatttttttgttccaaaagagtccatgtggactgtgccatctgtgggaaatcccagggcaaatgtttacattttgtataccctgaagaactctttttcctctaatatgcctaatctgtaatcacatttctgagtgttttcctctttttctgtgtgaggtttttttttttttaatctgcatttattagtattctaataaaagcattttgatcggaa

SEQ ID NO: 311670 - DNA, 4123 bp, Homo sapiens
cccgcgagcgtccatccatctgtccggccgactgtccagcgaaaggggctccaggccgggcgcacgtcgacccgggggaccgaggccaggagaggggccaagagcgcggctgacccttgcgggccggggcaggggacggtggccgcggccatgcagtcctgtgccagggcgtgggggctgcgcctgggccgcggggtcgggggcggccgccgcctggctgggggatcggggccgtgctgggcgccgcggagccgggacagcagcagtggcggcggggacagcgccgcggctggggcctcgcgcctcctggagcgccttctgcccagacacgacgacttcgctcggaggcacatcggccctggggacaaagaccagagagagatgctgcagaccttggggctggcgagcattgatgaattgatcgagaagacggtccctgccaacatccgtttgaaaagacccttgaaaatggaagaccctgtttgtgaaaatgaaatccttgcaactctgcatgccatttcaagcaaaaaccagatctggagatcgtatattggcatgggctattataactgctcagtgccacagacgattttgcggaacttactggagaactcaggatggatcacccagtatactccataccagcctgaggtgtctcaggggaggctggagagtttactcaactaccagaccatggtgtgtgacatcacaggcctggacatggccaatgcatccctgctggatgaggggactgcagccgcagaggcactgcagctgtgctacagacacaacaagaggaggaaatttctcgttgatccccgttgccacccacagacaatagctgttgtccagactcgagccaaatatactggagtcctcactgagctgaagttaccctgtgaaatggacttcagtggaaaagatgtcagtggagtgttgttccagtacccagacacggaggggaaggtggaagactttacggaactcgtggagagagctcatcagagtgggagcctggcctgctgtgctactgaccttttagctttgtgcatcttgaggccacctggagaatttggggtagacatcgccctgggcagctcccagagatttggagtgccactgggctatgggggaccccatgcagcattttttgctgtccgagaaagcttggtgagaatgatgcctggaagaatggtgggggtaacaagagatgccactgggaaagaagtgtatcgtcttgctcttcaaaccagggagcaacacattcggagagacaaggctaccagcaacatctgtacagctcaggccctcttggcgaatatggctgccatgtttgcaatctaccatggttcccatgggctggagcatattgctaggagggtacataatgccactttgattttgtcagaaggtctcaagcgagcagggcatcaactccagcatgacctgttctttgataccttgaagattcagtgtggctgctcagtgaaggaggtcttgggcagggccgctcagcggcagatcaattttcggctttttgaggatggcacacttggtatttctcttgatgaaacagtcaatgaaaaagatctggacgatttgttgtggatctttggttgtgagtcatctgcagaactggttgctgaaagcatgggagaggagtgcagaggtattccagggtctgtgttcaagaggaccagcccgttcctcacccatcaagtgttcaacagctaccactctgaaacaaacattgtccggtacatgaagaaactggaaaataaagacatttcccttgttcacagcatgattccactgggatcctgcaccatgaaactgaacagttcgtctgaactcgcacctatcacatggaaagaatttgcaaacatccacccctttgtgcctctggatcaagctcaaggatatcagcagcttttccgagagcttgagaaggatttgtgtgaactcacaggttatgaccaggtctgtttccagccaaacagcggagcccagggagaatatgctggactggccactatccgagcctacttaaaccagaaaggagaggggcacagaacggtttgcctcattccgaaatcagcacatgggaccaacccagcaagtgcccacatggcaggcatgaagattcagcctgtggaggtggataaatatgggaatatcgatgcagttcacctcaaggccatggtggataagcacaaggagaacctagcagctatcatgattacatacccatccaccaatggggtgtttgaagagaacatcagtgacgtgtgtgacctcatccatcaacatggaggacaggtctacctagacggggcaaatatgaatgctcaggtgggaatctgtcgccctggagacttcgggtctgatgtctcgcacctaaatcttcacaagaccttctgcattccccacggaggaggtggtcctggcatggggcccatcggagtgaagaaacatctcgccccgtttttgcccaatcatcccgtcatttcactaaagcggaatgaggatgcctgtcctgtgggaaccgtcagtgcggccccatggggctccagttccatcttgcccatttcctgggcttatatcaagatgatgggaggcaagggtcttaaacaagccacggaaactgcgatattaaatgccaactacatggccaagcgattagaaacacactacagaattcttttcaggggtgcaagaggttatgtgggtcatgaatttattttggacacgagacccttcaaaaagtctgcaaatattgaggctgtggatgtggccaagagactccaggattatggatttcacgcccctaccatgtcctggcctgtggcagggaccctcatggtggagcccactgagtcggaggacaaggcagagctggacagattctgtgatgccatgatcagcattcggcaggaaattgctgacattgaggagggccgcatcgaccccagggtcaatccgctgaagatgtctccacactccctgacctgcgttacatcttcccactgggaccggccttattccagagaggtggcagcattcccactccccttcgtgaaaccagagaacaaattctggccaacgattgcccggattgatgacatatatggagatcagcacctggtttgtacctgcccacccatggaagtttatgagtctccattttctgaacaaaagagggcgtcttcttagtcctctctccctaagtttaaaggactgatttgatgcctctccccagagcatttgataagcaagaaagatttcatctcccaccccagcctcaagtaggagttttatatactgtgtatatctctgtaatctctgtcaaggtaaatgtaaatacagtagctggagggagtcgaagctgatggttggaagacggatttgctttggtattctgcttccacatgtgccagttgcctggattgggagccattttgtgttttgcgtagaaagttttaggaactttaacttttaatgtggcaagtttgcagatgtcatagaggctatcctggagacttaatagacatttttttgttccaaaagagtccatgtggactgtgccatctgtgggaaatcccagggcaaatgtttacattttgtataccctgaagaactctttttcctctaatatgcctaatctgtaatcacatttctgagtgttttcctctttttctgtgtgaggtttttttttttttaatctgcatttattagtattctaataaaagcattttgatcggaagaatgcctttctcttggtgtactttatagttttaccaccgttacaacctagattcagtgggagctgaagggcaatgagaacacccaacccaatagccattgttacatcatcagttttgcctttgactggctgaagaaacagttgtcttggtcaacagtgaaaaccactttgaccctttttgttggaactgagttagagtgcatgtaactgtactccagctatggaaggtcaatcaaatagcaatttatcttttctcatttaagtccagaggtaataagccaagcactggtgctccttcagttttcccgctctgccctcctttgcataaaattttcatccgcatgtctcaagaaggctgtt

SEQ ID NO: 311671 - DNA, 1194 bp, Homo sapiens
ctaatcttgggctgaaacaactttcctgaacaggttatgtgggtcatgaatttattttggacacgagacccttcaaaaagtctgcaaatattgaggctgtggatgtggccaagagactccaggattatggatttcacgcccctaccatgtcctggcctgtggcagggaccctcatggtggagcccactgagtcggaggacaaggcagagctggacagattctgtgatgccatgatcagcattcggcaggaaattgctgacattgaggagggccgcatcgaccccagggtcaatccgctgaaggtgcgtaggccctggaacattgcttgaaatgttccttaaactagaaaatgatgtctggacagtgtaccagcaactcccgaactctcaactgaggatgatactcttccctagaataagatgtctccacactccctgacctgcgttacatcttcccactgggaccggccttattccagagaggtggcagcattcccactccccttcgtgaaaccagagaacaaattctggccaacgattgcccggattgatgacatatatggagatcagcacctggtttgtacctgcccacccatggaagtttatgagtctccattttctgaacaaaagagggcgtcttcttagtcctctctccctaagtttaaaggactgatttgatgcctctccccagagcatttgataagcaagaaagatttcatctcccaccccagcctcaagtaggagttttatatactgtgtatatctctgtaatctctgtcaaggtaaatgtaaatacagtagctggagggagtcgaagctgatggttggaagacggatttgctttggtattctgcttccacatgtgccagttgcctggattgggagccattttgtgttttgcgtagaaagttttaggaactttaacttttaatgtggcaagtttgcagatgtcatagaggctatcctggagacttaatagacatttttttgttccaaaagagtccatgtggactgtgccatctgtgggaaatcccagggcaaatgtttacattttgtataccctgaagaactctttttcctctaatatgcctaatctgtaatcacatttctgagtgttttcctctttttctgtgtgaggtttttttttttttaatctgcatttattagtattctaataaaagcattttgatcggaa

SEQ ID NO: 311672 - DNA, 1432 bp, Homo sapiens
tcacgtatgttttaaatattcaaaagtttctgtcagaaaacagtattttggaattaaatttctagaatctttcataatattctctcctctctactgaacatagtactaggttggtaactggaggatcccagaaagtcatgctaatttttctaacaaaacaggccttgctgtctctaactctgatctgatatcctgctttgagcaaataaaagagccctggaatgtgaagagacatgagacagtagtcagcttctcaggtaggtaagcatgaatgaagcagataacagagacgagggatacgaaggtcagaaagaatttcagaccttaaaatgtggtatagaatgctctgcttccatggaaaggtttcctaaaaagccatttatttctctagctcccaaataggagcatcttttgtcccatacccttaaattctttaaggatcctacttcctatttagtgattttccttagagggtaccgtgagagctaaagtcctctttatggcttataaggtgctgcatgatatgcctgctcttccattgttttgggggagtataagaatatttctgagtattttagaggaactgcatgttagatcatttaacgtttcttttcccatcatgtctgaaatgtgtaagaggagtggtgatattaagatttgtttcagaaatcacaggaacatgaatgacagatgttacttctctatttttttttaatattagcaatcctaacagatttcgagtgatagctcatcattgttttcatttgcagttgccttttggtaggtgatattgagcacttttttatatatctattggtcatttgtatatatttgttggcaaaatatttttttcactctttcaaccattttttagttggattattattgttattattatacttgcttttgctttgaattttctatatattttgaatattaagcttttctgatatatacagtttgctgttgtgagcatgctgcaataaatgtgcaagtatacgtatcattttcatataataaactatttttctttgggtagatacccaatgatgagatttctgaatcaaatgatagttctggccaggcgtgagccaccgcacccaaccaaatctatacatttcaatgaaggatttaatttatttatattcaaggtaaatattaatatgtaaggttttgttactatcataatgttaattattttcttgtcttattttttctttttatctgtctttgtagtttaataaaattctgtcatgttgtgatttgatttatttcactttgttttgtaagacctgttagttttatacttttatatattttaataatggtgaatatcaatctcttgtttttatattagaattttttttaacatctttcataggcccagtctagtggtaattagtttccccagcatttatttgtcagggtaaga

SEQ ID NO: 311673 - DNA, 1355 bp, Homo sapiens
tcacgtatgttttaaatattcaaaagtttctgtcagaaaacagtattttggaattaaatttctagaatctttcataatattctctcctctctactgaacatagtactaggttggtaactggaggatcccagaaagtcatgctaatttttctaacaaaacaggccttgctgtctctaactctgatctgatatcctgctttgagcaaataaaagagccctggaatgtgaagagacatgagacagtagtcagcttctcaggtaggtaagcatgaatgaagcagataacagagacgagggatacgaaggtcagaaagaatttcagaccttaaaatgtggtatagaatgctctgcttccatggaaaggtttcctaaaaagccatttatttctctagctcccaaataggagcatcttttgtcccatacccttaaattctttaaggatcctacttcctatttagtgattttccttagagggtaccgtgagagctaaagtcctctttatggcttataaggtgctgcatgatatgcctgctcttccattgttttgggggagtataagaatatttctgagtattttagaggaactgcatgttagatcatttaacgtttcttttcccatcatgtctgaaatgtgtaagaggagtggtgatattaagatttgtttcagaaatcacaggaacatgaatgacagatgttacttctctatttttttttaatattagcaatcctaacagatttcgagtgatagctcatcattgttttcatttgcagttgccttttggtaggtgatattgagcacttttttatatatctattggtcatttgtatatatttgttggcaaaatatttttttcactctttcaaccattttttagttggattattattgttattattatacttgcttttgctttgaattttctatatattttgaatattaagcttttctgatatatacagtttgctgttgtgagcatgctgcaataaatgtgcaagtatacgtatcattttcatataataaactatttttctttgggtagatacccaatgatgagatttctgaatcaaatgatagttctggccaggcgtggtagctcacgcctgtaatcccaacactttgggaggtagaggcgggcaggtcatgaggtcagaagtttgagaccagcctgagcgatatggtgaaaccccgtctctactaaaaatacaaaagttagccaggcgtggtggcacttgcctgcagccccaactcctcaggaggctgacacagaagaattgcttgaacctgggagtcagtggttgcagtgagctgagatcgtaccactgcactccagcctggacaactaagactccatctca

SEQ ID NO: 311674 - DNA, 5262 bp, Homo sapiens
gccggagtttccaggtctcgacttcactgctctgtgtcctctgctccaggaggcccagcctgtgtggccctgtgacctgcaggtattggaagagccacagctaagatgccaggaacccctggaagcctagaaatgggactgttgacatttagggatgtggccatagaattctctccggaggagtggcaatgtctggacactgcacagcagaatttatataggaatgtgatgttagagaactacagaaacctggccttcctgggtattgctctctctaagccagacctgattacttatctggagcaaggaaaagagccctggaatatgaagcaacatgagatggtggatgaacccacaggtatatgtcctcattttcctcaagacttttggccagagcagagcatggaagattcttttcaaaaagtattactgagaaaatatgaaaaatgtggacatgagaatttacagttaagaaaaggttgtaaaagtgtggatgagtgtaaggtgcacaaagaaggttataataaacttaaccagtgtctcacaactgcccagagcaaagtatttcaatgtgggaaatatttgaaagtcttctataaatttttaaattcaaacagacatacgataagacataccggaaagaaatgcttcaaatgtaaaaaatgtgtcaagtcattttgcatccgtttacacaaaacccaacataaatgcgtttatattacagagaagtcctgtaaatgtaaagaatgtgaaaaaacctttcattggtcctcaacccttactaatcataaggaaattcatactgaagataaaccctacaaatgtgaagaatgtggcaaagcttttaagcagctctcaacccttactacacataaaataatctgtgctaaagagaaaatctacaagtgtgaagaatgtggcaaagcatttctatggtcctcaaccctaactagacataagaggatacacactggagagaaaccctacaaatgtgaagaatgtggcaaagcttttagccattcttcaacccttgctaaacataagagaattcatactggagagaaaccctacaaatgtgaagaatgtggcaaagcttttagccgttcttcaacccttgctaaacataagagaattcatactggagagaaaccctacaaatgtaaagaatgtggcaaagcttttagcaattcctcaacccttgctaatcataagataactcatactgaagagaaaccctacaaatgtaaagaatgtgacaaagcttttaagcgactctcaacccttactaaacataaaataatacatgctggagagaaactctacaaatgtgaagaatgtggcaaagcttttaatcgatcttcaaatcttactatacataagtttattcatactggagagaaaccttacaagtgtgaagaatgtggcaaagcatttaactggtcctcaagccttactaaacataaaagatttcatactagagagaaacccttcaaatgtaaagaatgtggcaaaggatttatatggtcttcaaccctaactagacataagaggatacacactggagagaagccctacaaatgtgaagaatgtggcaaagcttttaggcaatcctcaacccttactaaacataagataattcatactggagagaaaccctacaaatttgaagaatgtggcaaagcttttagacaatccttaacccttaataaacataagataattcatagtagagagaaaccctacaaatgtaaagaatgtggcaaagcttttaagcaattctcaacccttactacacataaaataattcatgctggaaagaaactctacaaatgtgaagaatgtggcaaagcttttaatcattcctcaagtctttctacacataagataattcatactggagagaagtcttacaagtgtgaagaatgtggcaaagcatttctatggtcctcaaccctaagaagacataagaggatacacactggagagaaaccctacaaatgtgaagaatgtggcaaagcttttagccattcttcagcccttgctaaacataagagaattcatactggagagaaaccctacaaatgtaaagaatgtggcaaagcttttagcaattcctcaacccttgctaatcataagataactcatactgaagagaaaccctacaaatgtaaagaatgtgacaaaacttttaagcgactctcaacccttactaaacataaaataatacatgctggagagaaactctacaaatgtgaagaatgtggcaaagcttttaatcgatcttcaaatcttactatacataagtttattcatactggagagaaaccttacaagtgtgaagaatgtggcaaagcatttaactggtcctcaagccttactaaacataaaagaattcatactagagagaaacccttcaaatgtaaagaatgtggcaaagcatttatatggtcttcaaccctaactagacataagaggatacacactggagagaagccctacaaatgtgaagaatgtggcaaagcttttagccgttcctcaacccttactaagcataagacaattcatactggagagaaaccctacaaatgtaaagaatgtggcaaagcttttaagcactcctcagcccttgctaaacataaaataatacatgctggagagaaactctacaaatgtgaggaatgtggcaaagcttttaatcaatcttcaaatcttacgacacataagataattcatactaaagagaaaccttccaagagtgaagaatgtgacaaagcatttatctggtcctcaacccttactgaacataagagaattcataccagagagaaaacctacaaatgtgaagaatgtggcaaagcatttagccagccttcacaccttactacacataagaggatgcacactggagagaaaccctacaaatgtgaagaatgtggcaaagcttttagccaatcctcaacccttactacacataagataattcatactggagagaaaccctacaaatgtgaagaatgtggcaaagcttttaggaaatcttcaactcttactgaacataagataattcatactggagagaaaccctacaaatgtgaagaatgtggcaaagcatttagccaatcctcaaccctaactagacatacgaggatgcacactggagagaaaccatacaaatgtgaagaatgtgggaaagcttttaatcgatcctcaaagcttactacacataagataattcatactggagagaaaccttacaagtgtgaagaatgtggcaaagcatttatatcatcctcaaccctaaatggacataagagaattcatactagagagaaaccctacaaatgtgaagaatgtggcaaagcatttagccaatcttcaaccctaactagacataagaggttgcacaccggagagaaaccctacaaatgtggagaatgtggcaaagcctttaaagagtcctcagctcttactaaacataagataattcacactggagagaaaccctacaaatgtgaaaaatgtggcaaagcctttaaccagtcttcaatccttactaaccataagaaaattcatactatcacacctgtaatcccactactttgggaggccgaggcgggcggatcacgaggtcaggagatggagaccatcctggctaacacagtgaaaccccttctctactaaaaaatacaaaaaattagccgggcgtggtggcgggcgcctgtagtcccagctatgcgagaggctgaggcaggagaatggcgtgaacccgggaggcggagcttgcagtgagccgagatcacgccactgcactcaagcctgggcgacagagcgagactccgtctcaaaaaaaaaaaaagaaaattcatactagagagaaaccctacaaatataaagaatgtggcaaatcttttaaccggtcttcaacctttactaaacataaggtaattcatactggagtaaaactctacaaatgtgaagaatgtggcaaatcctttttctggtcctcagccctaaccagacataagaaaattcatactggacagcaaccctacaaacaggaaaaatttggcaaagcctttaaccagttttcacaccttactacagataagataactcatattggagagaaatcttacaagtgtgaataatgtggtaaagtctataaaaagtcctgaattcttaacagacataatattattcatactggagagaaactctacaaacctgaaagatgtgccaacgcttttgacaagtcaaacttttctaaacatcaagaaaatcatgctgctgagaaatcctagaaatgtgaagaatgtgacaaagcctctaaatgattgtcacacttgatcgtaggtaagataattcatactggagaaaactaccagtgtgaacaatgtggccaagctttgaaccaatgctcacaccttaatgcataggaaagcatttatgcttgagaaaaagtgaacaaatatagacaaaaagccattaatacctgctcacatcgtactcaaaatcagagcgttcatactaaataagaagtgtaattactgtcaaacgactgatcagaaaatatgtctttaaagtacagaagagtattttgaaaaagcattacaaatatgaagaggcattatttatgaccttttctatggaaagacggagtcttgctccatcgccaggctggagtgcagtggcgcgatctcgtcccactgctcactgcaacctctgcctcccctattgaagtgattctcctgtctcagcctcctgagtagctgggactacaggcacacaccaccacgctcagctaatttttgtattttcagaagagacggggtttcatcatattcaccaggctggtcttgatctcttgacctcgtgataccctcacctcaccctcccaaagtgctgggactacaggcgtgagccaccgcacccaaccaaatctatacatttcaatgaaggatttaatttatttatattcaaggtaaatattaatatgtaaggttttgttactatcataatgttaattattttcttgtcttattttttctttttatctgtctttgtagtttaataaaattctgtcatgttgtgatttgatttatttcactttgttttgtaagacctgttagttttatacttttatatattttaataatggtgaatatcaatctcttgtttttatattagaattttttttaacatctttcataggcccagtctagtggtaattagtttccccagcatttatttgtcagggtaaga

SEQ ID NO: 311675 - DNA, 5090 bp, Homo sapiens
gccggagtttccaggtctcgacttcactgctctgtgtcctctgctccaggaggcccagcctgtgtggccctgtgacctgcaggtattggaagagccacagctaagatgccaggaacccctggaagcctagaaatgggactgttgacatttagggatgtggccatagaattctctccggaggagtggcaatgtctggacactgcacagcagaatttatataggaatgtgatgttagagaactacagaaacctggccttcctgggtattgctctctctaagccagacctgattacttatctggagcaaggaaaagagccctggaatatgaagcaacatgagatggtggatgaacccacaggtatatgtcctcattttcctcaagacttttggccagagcagagcatggaagattcttttcaaaaagtattactgagaaaatatgaaaaatgtggacatgagaatttacagttaagaaaaggttgtaaaagtgtggatgagtgtaaggtgcacaaagaaggttataataaacttaaccagtgtctcacaactgcccagagcaaagtatttcaatgtgggaaatatttgaaagtcttctataaatttttaaattcaaacagacatacgataagacataccggaaagaaatgcttcaaatgtaaaaaatgtgtcaagtcattttgcatccgtttacacaaaacccaacataaatgcgtttatattacagagaagtcctgtaaatgtaaagaatgtgaaaaaacctttcattggtcctcaacccttactaatcataaggaaattcatactgaagataaaccctacaaatgtgaagaatgtggcaaagcttttaagcagctctcaacccttactacacataaaataatctgtgctaaagagaaaatctacaagtgtgaagaatgtggcaaagcatttctatggtcctcaaccctaactagacataagaggatacacactggagagaaaccctacaaatgtgaagaatgtggcaaagcttttagccattcttcaacccttgctaaacataagagaattcatactggagagaaaccctacaaatgtgaagaatgtggcaaagcttttagccgttcttcaacccttgctaaacataagagaattcatactggagagaaaccctacaaatgtaaagaatgtggcaaagcttttagcaattcctcaacccttgctaatcataagataactcatactgaagagaaaccctacaaatgtaaagaatgtgacaaagcttttaagcgactctcaacccttactaaacataaaataatacatgctggagagaaactctacaaatgtgaagaatgtggcaaagcttttaatcgatcttcaaatcttactatacataagtttattcatactggagagaaaccttacaagtgtgaagaatgtggcaaagcatttaactggtcctcaagccttactaaacataaaagatttcatactagagagaaacccttcaaatgtaaagaatgtggcaaaggatttatatggtcttcaaccctaactagacataagaggatacacactggagagaagccctacaaatgtgaagaatgtggcaaagcttttaggcaatcctcaacccttactaaacataagataattcatactggagagaaaccctacaaatttgaagaatgtggcaaagcttttagacaatccttaacccttaataaacataagataattcatagtagagagaaaccctacaaatgtaaagaatgtggcaaagcttttaagcaattctcaacccttactacacataaaataattcatgctggaaagaaactctacaaatgtgaagaatgtggcaaagcttttaatcattcctcaagtctttctacacataagataattcatactggagagaagtcttacaagtgtgaagaatgtggcaaagcatttctatggtcctcaaccctaagaagacataagaggatacacactggagagaaaccctacaaatgtgaagaatgtggcaaagcttttagccattcttcagcccttgctaaacataagagaattcatactggagagaaaccctacaaatgtaaagaatgtggcaaagcttttagcaattcctcaacccttgctaatcataagataactcatactgaagagaaaccctacaaatgtaaagaatgtgacaaaacttttaagcgactctcaacccttactaaacataaaataatacatgctggagagaaactctacaaatgtgaagaatgtggcaaagcttttaatcgatcttcaaatcttactatacataagtttattcatactggagagaaaccttacaagtgtgaagaatgtggcaaagcatttaactggtcctcaagccttactaaacataaaagaattcatactagagagaaacccttcaaatgtaaagaatgtggcaaagcatttatatggtcttcaaccctaactagacataagaggatacacactggagagaagccctacaaatgtgaagaatgtggcaaagcttttagccgttcctcaacccttactaagcataagacaattcatactggagagaaaccctacaaatgtaaagaatgtggcaaagcttttaagcactcctcagcccttgctaaacataaaataatacatgctggagagaaactctacaaatgtgaggaatgtggcaaagcttttaatcaatcttcaaatcttacgacacataagataattcatactaaagagaaaccttccaagagtgaagaatgtgacaaagcatttatctggtcctcaacccttactgaacataagagaattcataccagagagaaaacctacaaatgtgaagaatgtggcaaagcatttagccagccttcacaccttactacacataagaggatgcacactggagagaaaccctacaaatgtgaagaatgtggcaaagcttttagccaatcctcaacccttactacacataagataattcatactggagagaaaccctacaaatgtgaagaatgtggcaaagcttttaggaaatcttcaactcttactgaacataagataattcatactggagagaaaccctacaaatgtgaagaatgtggcaaagcatttagccaatcctcaaccctaactagacatacgaggatgcacactggagagaaaccatacaaatgtgaagaatgtgggaaagcttttaatcgatcctcaaagcttactacacataagataattcatactggagagaaaccttacaagtgtgaagaatgtggcaaagcatttatatcatcctcaaccctaaatggacataagagaattcatactagagagaaaccctacaaatgtgaagaatgtggcaaagcatttagccaatcttcaaccctaactagacataagaggttgcacaccggagagaaaccctacaaatgtggagaatgtggcaaagcctttaaagagtcctcagctcttactaaacataagataattcacactggagagaaaccctacaaatgtgaaaaatgtggcaaagcctttaaccagtcttcaatccttactaaccataagaaaattcatactatcacacctgtaatcccactactttgggaggccgaggcgggcggatcacgaggtcaggagatggagaccatcctggctaacacagtgaaaccccttctctactaaaaaatacaaaaaattagccgggcgtggtggcgggcgcctgtagtcccagctatgcgagaggctgaggcaggagaatggcgtgaacccgggaggcggagcttgcagtgagccgagatcacgccactgcactcaagcctgggcgacagagcgagactccgtctcaaaaaaaaaaaaagaaaattcatactagagagaaaccctacaaatataaagaatgtggcaaatcttttaaccggtcttcaacctttactaaacataaggtaattcatactggagtaaaactctacaaatgtgaagaatgtggcaaatcctttttctggtcctcagccctaaccagacataagaaaattcatactggacagcaaccctacaaacaggaaaaatttggcaaagcctttaaccagttttcacaccttactacagataagataactcatattggagagaaatcttacaagtgtgaataatgtggtaaagtctataaaaagtcctgaattcttaacagacataatattattcatactggagagaaactctacaaacctgaaagatgtgccaacgcttttgacaagtcaaacttttctaaacatcaagaaaatcatgctgctgagaaatcctagaaatgtgaagaatgtgacaaagcctctaaatgattgtcacacttgatcgtaggtaagataattcatactggagaaaactaccagtgtgaacaatgtggccaagctttgaaccaatgctcacaccttaatgcataggaaagcatttatgcttgagaaaaagtgaacaaatatagacaaaaagccattaatacctgctcacatcgtactcaaaatcagagcgttcatactaaataagaagtgtaattactgtcaaacgactgatcagaaaatatgtctttaaagtacagaagagtattttgaaaaagcattacaaatatgaagaggcattatttatgaccttttctatggaaagacggggtttcatcatattcaccaggctggtcttgatctcttgacctcgtgataccctcacctcaccctcccaaagtgctgggactacaggcgtgagccaccgcacccaaccaaatctatacatttcaatgaaggatttaatttatttatattcaaggtaaatattaatatgtaaggttttgttactatcataatgttaattattttcttgtcttattttttctttttatctgtctttgtagtttaataaaattctgtcatgttgtgatttgatttatttcactttgttttgtaagacctgttagttttatacttttatatattttaataatggtgaatatcaatctcttgtttttatattagaattttttttaacatctttcataggcccagtctagtggtaattagtttccccagcatttatttgtcagggtaaga

SEQ ID NO: 311676 - DNA, 5069 bp, Homo sapiens
caacctgctcacatcgtactcaaattcagagcgttcatactaaataagaagtgtaattactgtcaaacgactgatcagaaaatatgtctttaaagtacagaagagtattttgaaaaagcattacaaatatgaagaggcattatttatgaccttttctatggaaaggtatatgtcctcattttcctcaagacttttggccagagcagagcatggaagattcttttcaaaaagtattactgagaaaatatgaaaaatgtggacatgagaatttacagttaagaaaaggttgtaaaagtgtggatgagtgtaaggtgcacaaagaaggttataataaacttaaccagtgtctcacaactgcccagagcaaagtatttcaatgtgggaaatatttgaaagtcttctataaatttttaaattcaaacagacatacgataagacataccggaaagaaatgcttcaaatgtaaaaaatgtgtcaagtcattttgcatccgtttacacaaaacccaacataaatgcgtttatattacagagaagtcctgtaaatgtaaagaatgtgaaaaaacctttcattggtcctcaacccttactaatcataaggaaattcatactgaagataaaccctacaaatgtgaagaatgtggcaaagcttttaagcagctctcaacccttactacacataaaataatctgtgctaaagagaaaatctacaagtgtgaagaatgtggcaaagcatttctatggtcctcaaccctaactagacataagaggatacacactggagagaaaccctacaaatgtgaagaatgtggcaaagcttttagccattcttcaacccttgctaaacataagagaattcatactggagagaaaccctacaaatgtgaagaatgtggcaaagcttttagccgttcttcaacccttgctaaacataagagaattcatactggagagaaaccctacaaatgtaaagaatgtggcaaagcttttagcaattcctcaacccttgctaatcataagataactcatactgaagagaaaccctacaaatgtaaagaatgtgacaaagcttttaagcgactctcaacccttactaaacataaaataatacatgctggagagaaactctacaaatgtgaagaatgtggcaaagcttttaatcgatcttcaaatcttactatacataagtttattcatactggagagaaaccttacaagtgtgaagaatgtggcaaagcatttaactggtcctcaagccttactaaacataaaagatttcatactagagagaaacccttcaaatgtaaagaatgtggcaaaggatttatatggtcttcaaccctaactagacataagaggatacacactggagagaagccctacaaatgtgaagaatgtggcaaagcttttaggcaatcctcaacccttactaaacataagataattcatactggagagaaaccctacaaatttgaagaatgtggcaaagcttttagacaatccttaacccttaataaacataagataattcatagtagagagaaaccctacaaatgtaaagaatgtggcaaagcttttaagcaattctcaacccttactacacataaaataattcatgctggaaagaaactctacaaatgtgaagaatgtggcaaagcttttaatcattcctcaagtctttctacacataagataattcatactggagagaagtcttacaagtgtgaagaatgtggcaaagcatttctatggtcctcaaccctaagaagacataagaggatacacactggagagaaaccctacaaatgtgaagaatgtggcaaagcttttagccattcttcagcccttgctaaacataagagaattcatactggagagaaaccctacaaatgtaaagaatgtggcaaagcttttagcaattcctcaacccttgctaatcataagataactcatactgaagagaaaccctacaaatgtaaagaatgtgacaaaacttttaagcgactctcaacccttactaaacataaaataatacatgctggagagaaactctacaaatgtgaagaatgtggcaaagcttttaatcgatcttcaaatcttactatacataagtttattcatactggagagaaaccttacaagtgtgaagaatgtggcaaagcatttaactggtcctcaagccttactaaacataaaagaattcatactagagagaaacccttcaaatgtaaagaatgtggcaaagcatttatatggtcttcaaccctaactagacataagaggatacacactggagagaagccctacaaatgtgaagaatgtggcaaagcttttagccgttcctcaacccttactaagcataagacaattcatactggagagaaaccctacaaatgtaaagaatgtggcaaagcttttaagcactcctcagcccttgctaaacataaaataatacatgctggagagaaactctacaaatgtgaggaatgtggcaaagcttttaatcaatcttcaaatcttacgacacataagataattcatactaaagagaaaccttccaagagtgaagaatgtgacaaagcatttatctggtcctcaacccttactgaacataagagaattcataccagagagaaaacctacaaatgtgaagaatgtggcaaagcatttagccagccttcacaccttactacacataagaggatgcacactggagagaaaccctacaaatgtgaagaatgtggcaaagcttttagccaatcctcaacccttactacacataagataattcatactggagagaaaccctacaaatgtgaagaatgtggcaaagcttttaggaaatcttcaactcttactgaacataagataattcatactggagagaaaccctacaaatgtgaagaatgtggcaaagcatttagccaatcctcaaccctaactagacatacgaggatgcacactggagagaaaccatacaaatgtgaagaatgtgggaaagcttttaatcgatcctcaaagcttactacacataagataattcatactggagagaaaccttacaagtgtgaagaatgtggcaaagcatttatatcatcctcaaccctaaatggacataagagaattcatactagagagaaaccctacaaatgtgaagaatgtggcaaagcatttagccaatcttcaaccctaactagacataagaggttgcacaccggagagaaaccctacaaatgtggagaatgtggcaaagcctttaaagagtcctcagctcttactaaacataagataattcacactggagagaaaccctacaaatgtgaaaaatgtggcaaagcctttaaccagtcttcaatccttactaaccataagaaaattcatactatcacacctgtaatcccactactttgggaggccgaggcgggcggatcacgaggtcaggagatggagaccatcctggctaacacagtgaaaccccttctctactaaaaaatacaaaaaattagccgggcgtggtggcgggcgcctgtagtcccagctatgcgagaggctgaggcaggagaatggcgtgaacccgggaggcggagcttgcagtgagccgagatcacgccactgcactcaagcctgggcgacagagcgagactccgtctcaaaaaaaaaaaaagaaaattcatactagagagaaaccctacaaatataaagaatgtggcaaatcttttaaccggtcttcaacctttactaaacataaggtaattcatactggagtaaaactctacaaatgtgaagaatgtggcaaatcctttttctggtcctcagccctaaccagacataagaaaattcatactggacagcaaccctacaaacaggaaaaatttggcaaagcctttaaccagttttcacaccttactacagataagataactcatattggagagaaatcttacaagtgtgaataatgtggtaaagtctataaaaagtcctgaattcttaacagacataatattattcatactggagagaaactctacaaacctgaaagatgtgccaacgcttttgacaagtcaaacttttctaaacatcaagaaaatcatgctgctgagaaatcctagaaatgtgaagaatgtgacaaagcctctaaatgattgtcacacttgatcgtaggtaagataattcatactggagaaaactaccagtgtgaacaatgtggccaagctttgaaccaatgctcacaccttaatgcataggaaagcatttatgcttgagaaaaagtgaacaaatatagacaaaaagccattaatacctgctcacatcgtactcaaaatcagagcgttcatactaaataagaagtgtaattactgtcaaacgactgatcagaaaatatgtctttaaagtacagaagagtattttgaaaaagcattacaaatatgaagaggcattatttatgaccttttctatggaaagacggagtcttgctccatcgccaggctggagtgcagtggcgcgatctcgtcccactgctcactgcaacctctgcctcccctattgaagtgattctcctgtctcagcctcctgagtagctgggactacaggcacacaccaccacgctcagctaatttttgtattttcagaagagacggggtttcatcatattcaccaggctggtcttgatctcttgacctcgtgataccctcacctcaccctcccaaagtgctgggactacaggcgtgagccaccgcacccaaccaaatctatacatttcaatgaaggatttaatttatttatattcaaggtaaatattaatatgtaaggttttgttactatcataatgttaattattttcttgtcttattttttctttttatctgtctttgtagtttaataaaattctgtcatgttgtgatttgatttatttcactttgttttgtaagacctgttagttttatacttttatatattttaataatggtgaatatcaatctcttgtttttatattagaattttttttaacatctttcataggcccagtctagtggtaattagtttccccagcatttatttgtcagggtaaga

SEQ ID NO: 311677 - DNA, 1519 bp, Homo sapiens
cagatcgaatcgagctcgtacggtaatcctctacggatcgaacagctggcaatgtgtgactgaatgtgggaccgtcgtttatatagggctcgcagaccgtgagctagacataagaggatacacactggagagaaaccctacaaatataaagaatgtggcaaatcttttaaccggtcttcaacctttactaaacataaggtaattcatactggagtaaaactctacaaatgtgaagaatgtggcaaatcctttttctggtcctcagccctaaccagacataagaaaattcatactggacagcaaccctacaaacaggaaaaatttggcaaagcctttaaccagttttcacaccttactacagataagataactcatattggagagaaatcttacaagtgtgaataatgtggtaaagtctataaaaagtcctgaattcttaacagacataatattattcatactggagagaaactctacaaacctgaaagatgtgccaacgcttttgacaagtcaaacttttctaaacatcaagaaaatcatgctgctgagaaatcctagaaatgtgaagaatgtgacaaagcctctaaatgattgtcacacttgatcgtaggtaagataattcatactggagaaaactaccagtgtgaacaatgtggccaagctttgaaccaatgctcacaccttaatgcataggaaagcatttatgcttgagaaaaagtgaacaaatatagacaaaaagccattaatacctgctcacatcgtactcaaaatcagagcgttcatactaaataagaagtgtaattactgtcaaacgactgatcagaaaatatgtctttaaagtacagaagagtattttgaaaaagcattacaaatatgaagaggcattatttatgaccttttctatggaaagacggagtcttgctccatcgccaggctggagtgcagtggcgcgatctcgtcccactgctcactgcaacctctgcctcccctattgaagtgattctcctgtctcagcctcctgagtagctgggactacaggcacacaccaccacgctcagctaatttttgtattttcagaagagacggggtttcatcatattcaccaggctggtcttgatctcttgacctcgtgataccctcacctcaccctcccaaagtgctgggactacaggcgtgagccaccgcacccaaccaaatctatacatttcaatgaaggatttaatttatttatattcaaggtaaatattaatatgtaaggttttgttactatcataatgttaattattttcttgtcttattttttctttttatctgtctttgtagtttaataaaattctgtcatgttgtgatttgatttatttcactttgttttgtaagacctgttagttttatacttttatatattttaataatggtgaatatcaatctcttgtttttatattagaattttttttaacatctttcataggcccagtctagtggtaattagtttccccagcatttatttgtcagggtaaga

SEQ ID NO: 311678 - DNA, 1238 bp, Homo sapiens
acaggtgggagccaccacccctggtcaaccatcataattacttcatttacatagtcactgttgaggagtatgttatttaaattctttgtaaatttatagtttctgaaatttctcttgatactgatttgtagttttattctgctgtggtctaagtaggtagttcgtataattttgatttggggggatactttgttgatttgccagatttcctatctcaatggtctctctaatgctgtgagtagaatgttgaatttctccactattattgtattactgtctatctcgttctatagatttaataatatttctttgtaaatcagggtgctgtgatgttgggttcatatatatttagaattgttatatcttttggctgaaatgatttctttattattggatgatgatctttatccttttttgttacagctttttaatttaaagtctgttttatttgatgtaagtatagatactcctatttacttttggtttctgtttgtgttaatatattcccccccatttgcctttaatctatatgtgtcttacaagtaaggtgagatttttgtaggcaacatagatttgcgttattttttctcattcatttcataaatctatactttttttttttttttgagacggagtcttgctccatcgccaggctggagtgcagtggcgcgatctcgtcccactgctcactgcaacctctgcctcccctattgaagtgattctcctgtctcagcctcctgagtagctgggactacaggcacacaccaccacgctcagctaatttttgtattttcagaagagacggggtttcatcatattcaccaggctggtcttgatctcttgacctcgtgataccctcacctcaccctcccaaagtgctgggactacaggcgtgagccaccgcacccaaccaaatctatacatttcaatgaaggatttaatttatttatattcaaggtaaatattaatatgtaaggttttgttactatcataatgttaattattttcttgtcttattttttctttttatctgtctttgtagtttaataaaattctgtcatgttgtgatttgatttatttcactttgttttgtaagacctgttagttttatacttttatatattttaataatggtgaatatcaatctcttgtttttatattagaattttttttaacatctttcataggcccagtctagtggtaattagtttccccagcatttatttgtcagggtaaga

SEQ ID NO: 311679 - DNA, 362 bp, Homo sapiens
gagaactagtctctctctctctctcttggaactggtgggcagcggttaccgcatgtcgctggtgaagaggaggtttgccacagggatgtacctggtgagctgctgaacccgcaaatgctgctgccccagctctacactgcgccctggtgctggctgaccaccccctgccctcctgccggaccctggggcctcccaccccagcctccctgaggcccatactccacggagaggagccccatgcccagcctggctgagcccgagattcgctcctccccctcatgccaaccccacacaggtcccggccttttaatgttctttgaataaacactttattttctaataaaataaaaaaggaaaccttt

SEQ ID NO: 311680 - DNA, 3204 bp, Homo sapiens
cgcgccgcagccgcggagggaggggcggggcgggctccggtgtcagcgaccaagccgcaggtggcggcgagcgcggggctcggccgagctcaggagatggggaaactgaggcacggagctggacagtgactcagacaccaggagctgcctggagtggagctgagagctcaggtctgggctcagccagtccagagtgcaaatctactgtcccttcctagctgtgtgatcttgacaggcactggacggggcctgcaggggtctccacagagaccatcaggatgtcgtattttggggagcatttttggggcgagaaaaatcatggctttgaggtcctgtaccacagcgtgaagcaggggcccatctccaccaaggagctggcggacttcatccgggagagggccaccatcgaggagacctactcgaaggcgatggcgaaactctccaagctggccagcaacgggacccccatggggaccttcgccccgctctgggaggtcttccgcgtctcctcggacaagctggcgctgtgccacctggaactgacacggaagttacaggatctcatcaaggacgttctccgctacggcgaggaacagctcaagacccacaagaagtgcaaggaggaagtggtgagcaccttggatgctgtgcaggtactctcgggcgtcagccagctcctgcccaagtcccgcgagaactacctgaaccgttgcatggaccaggagcggctgcggagggagagtaccagccagaaggagatggacaaggcggagactaaaaccaagaaggcggcagagagcctgcggcgctcagtggaaaaatacaactcagcccgagctgactttgagcagaagatgctggactcagccctgcgcttccaagccatggaggagacacacctgaggcacatgaaggcactgctgggctcatatgctcactcggtggaggacacgcacgtgcagattgggcaggtgcatgaggaatttaagcagaacatcgagaacgtcagcgtggagatgctactcaggaagtttgcagagagtaagggcacaggccgggagaagcctggacctctggacttcgaggcatacagtgcggctgccctgcaggaagcgatgaaacgtttgcggggagccaaggcctttcgccttccaggactaagccggcgggagcgggagccagagccacctgcagctgtagatttcctggagcccgattcagggacatgtccagaggtggatgaagaaggtttcactgtccggcctgatgtgacccagaacagcacggccgagccctcccgtttctcgtccagcgactccgacttcgacgatgaagagccccgcaagttctatgtgcacatcaagcctgccccggcccgggctccagcctgcagccccgaggcagcagcggcacagctcagggccaccgcgggcagcctcatccttcctcctggcccagggggcaccatgaaacgccattcttcacgggacgctgctgggaaaccccagagacctcggtctgcccccagaaccagcagctgtgcagagagattgcagtcagaggagcaggtgtccaagaacctctttgggccgcccctggagtcagcctttgaccacgaagattttacaggctctagcagcctgggcttcacctccagcccctcccctttctcctcctcgtcgcccgaaaacgtggaggattccggcctggactctccgtcccacgcggcacctggcccctccccagattcctgggtcccccgcccaggcaccccgcagagcccgcccagctgtagggcgccacccccagaggccaggggtatccgggcaccgcctctgccagactcgccgcagcccctcgcctcgtctccaggcccctgggggctggaggccttggccggaggagacctgatgcctgcacctgctgaccccacagccagggagggcctggcagccccacccaggagacttcgctctaggaaggtgtcctgccctctcacacgtagcaatggggacctgtctcgttccctgagcccctccccactgggctcttcagccgccagcactgccttggaacggcccagcttcttatcccagacaggacacggagtctcccggggtccgagccctgtggtcctgggctcccaggatgccctgcccatagccacagccttcacggagtatgtccacgcctacttccgtggccacagccccagctgcctggctcgagtaactggggagctgaccatgaccttccctgctggcatcgtgcgtgtgttcagcgggaccccaccaccacctgtcctcagcttccggcttgtacacacaaccgctattgagcacttccagcccaacgccgatctgctgttcagtgacccctcccagagtgaccctgagaccaaagacttctggctcaacatggcagctctgaccgaagccctgcagcgccaggcagagcagaaccccactgcctcctactacaacgtggtgctgctgcgataccagttctcccgcccgggtccccagtctgtgcctctgcagctcagtgcccactggcagtgtggagccaccctcacccaggtctcagtggagtacggctaccggcccggtgccacggctgtgcccacaccactcacgaacgtccagatcctgctgcctgtgggggagcctgtgaccaacgtccgcttgcagccggctgccacctggaacctggaggagaagcggctcacttggaggcttccagatgtgtccgaggcaggcggttctggccgcctctctgccagctgggagccgctctcagggcccagcacacccagccccgtggctgcacagttcaccagcgaggggaccactctgtcgggcgtggacttggaactggtgggcagcggttaccgcatgtcgctggtgaagaggaggtttgccacagggatgtacctggtgagctgctgaacccgcaaatgctgctgccccagctctacactgcgccctggtgctggctgaccaccccctgccctcctgccggaccctggggcctcccaccccagcctccctgaggcccatactccacggagaggagccccatgcccagcctggctgagcccgagattcgctcctccccctcatgccaaccccacacaggtcccggccttttaatgttctttgaataaacactttattttctaataaaataaaaaaggaaaccttt

SEQ ID NO: 311681 - DNA, 1796 bp, Homo sapiens
agagaggctggctggatgcactcgtgtgtgatgttgcccactttgtccacagggcaccatgaaacgccattcttcacgggacgctgctgggaaaccccagagacctcggtctgcccccagaaccagcagctgtgcagagagattgcagtcagaggagcaggtgtccaagaacctctttgggccgcccctggagtcagcctttgaccacgaagattttacaggctctagcagcctgggcttcacctccagcccctcccctttctcctcctcgtcgcccgaaaacgtggaggattccggcctggactctccgtcccacgcggcacctggcccctccccagattcctgggtcccccgcccaggcaccccgcagagcccgcccagctgtagggcgccacccccagaggccaggggtatccgggcaccgcctctgccagactcgccgcagcccctcgcctcgtctccaggcccctgggggctggaggccttggccggaggagacctgatgcctgcacctgctgaccccacagccagggagggcctggcagccccacccaggagacttcgctctaggaaggtgtcctgccctctcacacgtagcaatggggacctgtctcgttccctgagcccctccccactgggctcttcagccgccagcactgccttggaacggcccagcttcttatcccagacaggacacggagtctcccggggtccgagccctgtggtcctgggctcccaggatgccctgcccatagccacagccttcacggagtatgtccacgcctacttccgtggccacagccccagctgcctggctcgagtaactggggagctgaccatgaccttccctgctggcatcgtgcgtgtgttcagcgggaccccaccaccacctgtcctcagcttccggcttgtacacacaaccgctattgagcacttccagcccaacgccgatctgctgttcagtgacccctcccagagtgaccctgagaccaaagacttctggctcaacatggcagctctgaccgaagccctgcagcgccaggcagagcagaaccccactgcctcctactacaacgtggtgctgctgcgataccagttctcccgcccgggtccccagtctgtgcctctgcagctcagtgcccactggcagtgtggagccaccctcacccaggtctcagtggagtacggctaccggcccggtgccacggctgtgcccacaccactcacgaacgtccagatcctgctgcctgtgggggagcctgtgaccaacgtccgcttgcagccggctgccacctggaacctggaggagaagcggctcacttggaggcttccagatgtgtccgaggcaggcggttctggccgcctctctgccagctgggagccgctctcagggcccagcacacccagccccgtggctgcacagttcaccagcgaggggaccactctgtcgggcgtggacttggaactggtgggcagcggttaccgcatgtcgctggtgaagaggaggtttgccacagggatgtacctggtgagctgctgaacccgcaaatgctgctgccccagctctacactgcgccctggtgctggctgaccaccccctgccctcctgccggaccctggggcctcccaccccagcctccctgaggcccatactccacggagaggagccccatgcccagcctggctgagcccgagattcgctcctccccctcatgccaaccccacacaggtcccggccttttaatgttctttgaataaacactttattttctaataaaataaaaaaggaaaccttt

SEQ ID NO: 311682 - DNA, 1799 bp, Homo sapiens
cctgggcagcaagaggaaactccgtctcaaaaaaaaaaaaaaaaaaaaaaaaaaagcaaataagttagagcatattcgatacttctaagtgctacgaagaaactaaagcagatgacgcgaagacaggaggagctgtgcagagagattgcagtcagaggagcaggtgtccaagaacctctttgggccgcccctggagtcagcctttgaccacgaagattttacaggctctagcagcctgggcttcacctccagcccctcccctttctcctcctcgtcgcccgaaaacgtggaggattccggcctggactctccgtcccacgcggcacctggcccctccccagattcctgggtcccccgcccaggcaccccgcagagcccgcccagctgtagggcgccacccccagaggccaggggtatccgggcaccgcctctgccagactcgccgcagcccctcgcctcgtctccaggcccctgggggctggaggccttggccggaggagacctgatgcctgcacctgctgaccccacagccagggagggcctggcagccccacccaggagacttcgctctaggaaggtgtcctgccctctcacacgtagcaatggggacctgtctcgttccctgagcccctccccactgggctcttcagccgccagcactgccttggaacggcccagcttcttatcccagacaggacacggagtctcccggggtccgagccctgtggtcctgggctcccaggatgccctgcccatagccacagccttcacggagtatgtccacgcctacttccgtggccacagccccagctgcctggctcgagtaactggggagctgaccatgaccttccctgctggcatcgtgcgtgtgttcagcgggaccccaccaccacctgtcctcagcttccggcttgtacacacaaccgctattgagcacttccagcccaacgccgatctgctgttcagtgacccctcccagagtgaccctgagaccaaagacttctggctcaacatggcagctctgaccgaagccctgcagcgccaggcagagcagaaccccactgcctcctactacaacgtggtgctgctgcgataccagttctcccgcccgggtccccagtctgtgcctctgcagctcagtgcccactggcagtgtggagccaccctcacccaggtctcagtggagtacggctaccggcccggtgccacggctgtgcccacaccactcacgaacgtccagatcctgctgcctgtgggggagcctgtgaccaacgtccgcttgcagccggctgccacctggaacctggaggagaagcggctcacttggaggcttccagatgtgtccgaggcaggcggttctggccgcctctctgccagctgggagccgctctcagggcccagcacacccagccccgtggctgcacagttcaccagcgaggggaccactctgtcgggcgtggacttggaactggtgggcagcggttaccgcatgtcgctggtgaagaggaggtttgccacagggatgtacctggtgagctgctgaacccgcaaatgctgctgccccagctctacactgcgccctggtgctggctgaccaccccctgccctcctgccggaccctggggcctcccaccccagcctccctgaggcccatactccacggagaggagccccatgcccagcctggctgagcccgagattcgctcctccccctcatgccaaccccacacaggtcccggccttttaatgttctttgaataaacactttattttctaataaaataaaaaaggaaaccttt

SEQ ID NO: 311683 - DNA, 726 bp, Homo sapiens
accttcgccccgctctgggaggtcttccgcgtctcctcggacaagctggcgctgtgccacctggaactgacacggaagttacaggatctcatcaaggacgttctccgctacggcgaggaacagctcaagacccacaagaaggtgtgtgtcgtgggcgccgcccagcggctgggtgggtgtggaacaccggcagctcacaggaccccagatcttctggggctttataacctgcggatgtccgcctccgagaattccgttaattccacaacgtcaagcccagggtcttacggacctgagcgttgttgaatttcaaacttgcaaaattccagaccaggagttagcacactgtggcccacgggccaaatcccgcccaccccccaccaatgtttgtacagctaagaagggttttttttttttctgcttgtttgtttttaagagacagggtctcactctgtcacccacatgcagtggcgtgatcagagctccctgcagcctcaaacacttgggctcaagcgaacctcctgcctcagcccccacagaatagctgggactacgttgcacgccaccatgcctggctaatttttaaaaaatgtttgggcctggcgtagtgactcatgcctataatcccagcactttgggaggctgaggcaggaggatggctggagcccaggatcctacaggagtttgagaccagcctgggcaacatagggagaccccatctttacc

SEQ ID NO: 311684 - DNA, 739 bp, Homo sapiens
agagaggctggctggatgcactcgtgtgtgatgttgcccactttgtccacagggcaccatgaaacgccattcttcacgggacgctgctgggaaaccccagagacctcggtctgcccccagaaccagcagctgtgcagagagattgcagtcagaggagcaggtgtccaagaacctctttgggccgcccctggagtcagcctttgaccacgaagattttacaggctctagcagcctgggcttcacctccagcccctcccctttctcctcctcgtcgcccgaaaacgtggaggattccggcctggactctccgtcccacgcggcacctggcccctccccagattcctgggtcccccgcccaggcaccccgcagagcccgcccagctgtagggcgccacccccagaggccaggggtatccgggcaccgcctctgccagactcgccgcagcccctcgcctcgtctccaggcccctgggggctggaggccttggccggaggagacctgatgcctgcacctgctgaccccacagccagggagggcctggcagccccacccaggagacttcgctctaggaaggtgtcctgccctctcacacgtagcaatggggacctgtctcgttccctgagcccctccccactgggctcttcagccgccagcactgccttggaacggcccagcttcttatcccagacaggacacggtatgtgagggcggtcctgggcctggctttgggcctcagtg

SEQ ID NO: 311685 - DNA, 3680 bp, Homo sapiens
  misc_feature (3219)..(3219): n is a, c, g, or t
  misc_feature (3224)..(3224): n is a, c, g, or t
  misc_feature (3226)..(3226): n is a, c, g, or t
  misc_feature (3230)..(3230): n is a, c, g, or t
  misc_feature (3237)..(3238): n is a, c, g, or t
  misc_feature (3242)..(3242): n is a, c, g, or t
  misc_feature (3248)..(3248): n is a, c, g, or t
  misc_feature (3251)..(3251): n is a, c, g, or t
  misc_feature (3260)..(3260): n is a, c, g, or t
  misc_feature (3263)..(3263): n is a, c, g, or t
cgcgccgcagccgcggagggaggggcggggcgggctccggtgtcagcgaccaagccgcaggtggcggcgagcgcggggctcggccgagctcaggagatggggaaactgaggcacggagctggacagtgactcagacaccaggagctgcctggagtggagctgagagctcaggtctgggctcagccagtccagagtgcaaatctactgtcccttcctagctgtgtgatcttgacaggcactggacggggcctgcaggggtctccacagagaccatcaggatgtcgtattttggggagcatttttggggcgagaaaaatcatggctttgaggtcctgtaccacagcgtgaagcaggggcccatctccaccaaggagctggcggacttcatccgggagagggccaccatcgaggagacctactcgaaggcgatggcgaaactctccaagctggccagcaacgggacccccatggggaccttcgccccgctctgggaggtcttccgcgtctcctcggacaagctggcgctgtgccacctggaactgacacggaagttacaggatctcatcaaggacgttctccgctacggcgaggaacagctcaagacccacaagaagtgcaaggaggaagtggtgagcaccttggatgctgtgcaggtactctcgggcgtcagccagctcctgcccaagtcccgcgagaactacctgaaccgttgcatggaccaggagcggctgcggagggagagtaccagccagaaggagatggacaaggcggagactaaaaccaagaaggcggcagagagcctgcggcgctcagtggaaaaatacaactcagcccgagctgactttgagcagaagatgctggactcagccctgcgcttccaagccatggaggagacacacctgaggcacatgaaggcactgctgggctcatatgctcactcggtggaggacacgcacgtgcagattgggcaggtgcatgaggaatttaagcagaacatcgagaacgtcagcgtggagatgctactcaggaagtttgcagagagtaagggcacaggccgggagaagcctggacctctggacttcgaggcatacagtgcggctgccctgcaggaagcgatgaaacgtttgcggggagccaaggcctttcgccttccaggactaagccggcgggagcgggagccagagccacctgcagctgtagatttcctggagcccgattcagggacatgtccagaggtggatgaagaaggtttcactgtccggcctgatgtgacccagaacagcacggccgagccctcccgtttctcgtccagcgactccgacttcgacgatgaagagccccgcaagttctatgtgcacatcaagcctgccccggcccgggctccagcctgcagccccgaggcagcagcggcacagctcagggccaccgcgggcagcctcatccttcctcctggcccagggggcaccatgaaacgccattcttcacgggacgctgctgggaaaccccagagacctcggtctgcccccagaaccagcagctgtgcagagagattgcagtcagaggagcaggtgtccaagaacctctttgggccgcccctggagtcagcctttgaccacgaagattttacaggctctagcagcctgggcttcacctccagcccctcccctttctcctcctcgtcgcccgaaaacgtggaggattccggcctggactctccgtcccacgcggcacctggcccctccccagattcctgggtcccccgcccaggcaccccgcagagcccgcccagctgtagggcgccacccccagaggccaggggtatccgggcaccgcctctgccagactcgccgcagcccctcgcctcgtctccaggcccctgggggctggaggccttggccggaggagacctgatgcctgcacctgctgaccccacagccagggagggcctggcagccccacccaggagacttcgctctaggaaggtgtcctgccctctcacacgtagcaatggggacctgtctcgttccctgagcccctccccactgggctcttcagccgccagcactgccttggaacggcccagcttcttatcccagacaggacacggagtctcccggggtccgagccctgtggtcctgggctcccaggatgccctgcccatagccacagccttcacggagtatgtccacgcctacttccgtggccacagccccagctgcctggctcgagtaactggggagctgaccatgaccttccctgctggcatcgtgcgtgtgttcagcgggaccccaccaccacctgtcctcagcttccggcttgtacacacaaccgctattgagcacttccagcccaacgccgatctgctgttcagtgacccctcccagagtgaccctgagaccaaagacttctggctcaacatggcagctctgaccgaagccctgcagcgccaggcagagcagaaccccactgcctcctactacaacgtggtgctgctgcgataccagttctcccgcccgggtccccagtctgtgcctctgcagctcagtgcccactggcagtgtggagccaccctcacccaggtctcagtggagtacggctaccggcccggtgccacggctgtgcccacaccactcacgaacgtccagatcctgctgcctgtgggggagcctgtgaccaacgtccgcttgcagccggctgccacctggaacctggaggagaagcggctcacttggaggcttccagatgtgtccgaggcaggcggttctggccgcctctctgccagctgggagccgctctcagggcccagcacacccagccccgtggctgcacagttcaccagcgaggggaccactctgtcgggcgtggacttggaactggtgggcagcggttaccgcatgtcgctggtgaagaggaggtttgccacagggatgtacctggtgagctgctgaacccgcaaatgctgctgccccagctctacactgcgccctggtgctggctgaccaccccctgccctcctgccggaccctggggcctcccaccccagcctccctgaggcccatactccacggagaggagccccatgcccagcctggctgagcccgagattcgctcctccccctcatgccaaccccacacaggtcccggccttttaatgttctttgaataaacactttattttctaataaaataaaaaaggaaacctttaaaaaaaaaacacanaaaananaaanaaaaacnnaaancaacanaanaacagaaanaangaacaacaaaaaaaaaaactcagacccaacaccacacacacaacccacgccagcacacagacgaacaaaaccaacataacaacacaagacacacacacaaccccaccacaacacaccacaccaaacactacctcccccacccaacaatacacactatcctctcacatcacaaaccaaccacaccacacccccccccccgtaaaagacaccaaccacaccaccccacccacacgaccacaacacccaccaaccaacaaacgccacacacaacacctctttcccatacacactctccaagccacactcacacaaacaaaaacaacattcataaccatcaaaaactaaccccaaccccatccccccacaccatatcaatcacccacacaacaacacaacacaccaaatcaccccaccaca

SEQ ID NO: 311686 - DNA, 3114 bp, Homo sapiens
cgcgccgcagccgcggagggaggggcggggcgggctccggtgtcagcgaccaagccgcaggtggcggcgagcgcggggctcggccgagctcaggagatggggaaactgaggcacggagctggacagtgactcagacaccagacaggcactggacggggcctgcaggggtctccacagagaccatcaggatgtcgtattttggggagcatttttggggcgagaaaaatcatggctttgaggtcctgtaccacagcgtgaagcaggggcccatctccaccaaggagctggcggacttcatccgggagagggccaccatcgaggagacctactcgaaggcgatggcgaaactctccaagctggccagcaacgggacccccatggggaccttcgccccgctctgggaggtcttccgcgtctcctcggacaagctggcgctgtgccacctggaactgacacggaagttacaggatctcatcaaggacgttctccgctacggcgaggaacagctcaagacccacaagaagtgcaaggaggaagtggtgagcaccttggatgctgtgcaggtactctcgggcgtcagccagctcctgcccaagtcccgcgagaactacctgaaccgttgcatggaccaggagcggctgcggagggagagtaccagccagaaggagatggacaaggcggagactaaaaccaagaaggcggcagagagcctgcggcgctcagtggaaaaatacaactcagcccgagctgactttgagcagaagatgctggactcagccctgcgcttccaagccatggaggagacacacctgaggcacatgaaggcactgctgggctcatatgctcactcggtggaggacacgcacgtgcagattgggcaggtgcatgaggaatttaagcagaacatcgagaacgtcagcgtggagatgctactcaggaagtttgcagagagtaagggcacaggccgggagaagcctggacctctggacttcgaggcatacagtgcggctgccctgcaggaagcgatgaaacgtttgcggggagccaaggcctttcgccttccaggactaagccggcgggagcgggagccagagccacctgcagctgtagatttcctggagcccgattcagggacatgtccagaggtggatgaagaaggtttcactgtccggcctgatgtgacccagaacagcacggccgagccctcccgtttctcgtccagcgactccgacttcgacgatgaagagccccgcaagttctatgtgcacatcaagcctgccccggcccgggctccagcctgcagccccgaggcagcagcggcacagctcagggccaccgcgggcagcctcatccttcctcctggcccagggggcaccatgaaacgccattcttcacgggacgctgctgggaaaccccagagacctcggtctgcccccagaaccagcagctgtgcagagagattgcagtcagaggagcaggtgtccaagaacctctttgggccgcccctggagtcagcctttgaccacgaagattttacaggctctagcagcctgggcttcacctccagcccctcccctttctcctcctcgtcgcccgaaaacgtggaggattccggcctggactctccgtcccacgcggcacctggcccctccccagattcctgggtcccccgcccaggcaccccgcagagcccgcccagctgtagggcgccacccccagaggccaggggtatccgggcaccgcctctgccagactcgccgcagcccctcgcctcgtctccaggcccctgggggctggaggccttggccggaggagacctgatgcctgcacctgctgaccccacagccagggagggcctggcagccccacccaggagacttcgctctaggaaggtgtcctgccctctcacacgtagcaatggggacctgtctcgttccctgagcccctccccactgggctcttcagccgccagcactgccttggaacggcccagcttcttatcccagacaggacacggagtctcccggggtccgagccctgtggtcctgggctcccaggatgccctgcccatagccacagccttcacggagtatgtccacgcctacttccgtggccacagccccagctgcctggctcgagtaactggggagctgaccatgaccttccctgctggcatcgtgcgtgtgttcagcgggaccccaccaccacctgtcctcagcttccggcttgtacacacaaccgctattgagcacttccagcccaacgccgatctgctgttcagtgacccctcccagagtgaccctgagaccaaagacttctggctcaacatggcagctctgaccgaagccctgcagcgccaggcagagcagaaccccactgcctcctactacaacgtggtgctgctgcgataccagttctcccgcccgggtccccagtctgtgcctctgcagctcagtgcccactggcagtgtggagccaccctcacccaggtctcagtggagtacggctaccggcccggtgccacggctgtgcccacaccactcacgaacgtccagatcctgctgcctgtgggggagcctgtgaccaacgtccgcttgcagccggctgccacctggaacctggaggagaagcggctcacttggaggcttccagatgtgtccgaggcaggcggttctggccgcctctctgccagctgggagccgctctcagggcccagcacacccagccccgtggctgcacagttcaccagcgaggggaccactctgtcgggcgtggacttggaactggtgggcagcggttaccgcatgtcgctggtgaagaggaggtttgccacagggatgtacctggtgagctgctgaacccgcaaatgctgctgccccagctctacactgcgccctggtgctggctgaccaccccctgccctcctgccggaccctggggcctcccaccccagcctccctgaggcccatactccacggagaggagccccatgcccagcctggctgagcccgagattcgctcctccccctcatgccaaccccacacaggtcccggccttttaatgttctttgaataaacactttattttctaataaaataaaaaaggaaaccttt

SEQ ID NO: 311687 - DNA, 1743 bp, Homo sapiens
atttgtggagagggaagtcaccagaaggtgtagccttgggggcgtgcacaaggactttgaatgggggcccccctgaccttccctcgacgtggccgtggcctgcaggaggatgggcagggactctgagtgggcgagggtcggagctgaccgcccgcttccctccccaaggctctagcagcctgggcttcacctccagcccctcccctttctcctcctcgtcgcccgaaaacgtggaggattccggcctggactctccgtcccacgcggcacctggcccctccccagattcctgggtcccccgcccaggcaccccgcagagcccgcccagctgtagggcgccacccccagaggccaggggtatccgggcaccgcctctgccagactcgccgcagcccctcgcctcgtctccaggcccctgggggctggaggccttggccggaggagacctgatgcctgcacctgctgaccccacagccagggagggcctggcagccccacccaggagacttcgctctaggaaggtgtcctgccctctcacacgtagcaatggggacctgtctcgttccctgagcccctccccactgggctcttcagccgccagcactgccttggaacggcccagcttcttatcccagacaggacacggagtctcccggggtccgagccctgtggtcctgggctcccaggatgccctgcccatagccacagccttcacggagtatgtccacgcctacttccgtggccacagccccagctgcctggctcgagtaactggggagctgaccatgaccttccctgctggcatcgtgcgtgtgttcagcgggaccccaccaccacctgtcctcagcttccggcttgtacacacaaccgctattgagcacttccagcccaacgccgatctgctgttcagtgacccctcccagagtgaccctgagaccaaagacttctggctcaacatggcagctctgaccgaagccctgcagcgccaggcagagcagaaccccactgcctcctactacaacgtggtgctgctgcgataccagttctcccgcccgggtccccagtctgtgcctctgcagctcagtgcccactggcagtgtggagccaccctcacccaggtctcagtggagtacggctaccggcccggtgccacggctgtgcccacaccactcacgaacgtccagatcctgctgcctgtgggggagcctgtgaccaacgtccgcttgcagccggctgccacctggaacctggaggagaagcggctcacttggaggcttccagatgtgtccgaggcaggcggttctggccgcctctctgccagctgggagccgctctcagggcccagcacacccagccccgtggctgcacagttcaccagcgaggggaccactctgtcgggcgtggacttggaactggtgggcagcggttaccgcatgtcgctggtgaagaggaggtttgccacagggatgtacctggtgagctgctgaacccgcaaatgctgctgccccagctctacactgcgccctggtgctggctgaccaccccctgccctcctgccggaccctggggcctcccaccccagcctccctgaggcccatactccacggagaggagccccatgcccagcctggctgagcccgagattcgctcctccccctcatgccaaccccacacaggtcccggccttttaatgttctttgaataaacactttattttctaataaaataaaaaaggaaaccttt

SEQ ID NO: 311688 - DNA, 1630 bp, Homo sapiens
atttgtggagagggaagtcaccagaaggtgtagccttgggggcgtgcacaaggactttgaatgggggcccccctgaccttccctcgacgtggccgtggcctgcaggaggatgggcagggactctgagtgggcgagggtcggagctgaccgcccgcttccctccccaaggctctagcagcctgggcttcacctccagcccctcccctttctcctcctcgtcgcccgaaaacgtggaggattccggcctggactctccgtcccacgcggcacctggcccctccccagattcctgggtcccccgcccaggcaccccgcagagcccgcccagctgtagggcgccacccccagaggccaggggtatccgggcaccgcctctgccagactcgccgcagcccctcgcctcgtctccaggcccctgggggctggaggccttggccggaggagtctcgttccctgagcccctccccactgggctcttcagccgccagcactgccttggaacggcccagcttcttatcccagacaggacacggagtctcccggggtccgagccctgtggtcctgggctcccaggatgccctgcccatagccacagccttcacggagtatgtccacgcctacttccgtggccacagccccagctgcctggctcgagtaactggggagctgaccatgaccttccctgctggcatcgtgcgtgtgttcagcgggaccccaccaccacctgtcctcagcttccggcttgtacacacaaccgctattgagcacttccagcccaacgccgatctgctgttcagtgacccctcccagagtgaccctgagaccaaagacttctggctcaacatggcagctctgaccgaagccctgcagcgccaggcagagcagaaccccactgcctcctactacaacgtggtgctgctgcgataccagttctcccgcccgggtccccagtctgtgcctctgcagctcagtgcccactggcagtgtggagccaccctcacccaggtctcagtggagtacggctaccggcccggtgccacggctgtgcccacaccactcacgaacgtccagatcctgctgcctgtgggggagcctgtgaccaacgtccgcttgcagccggctgccacctggaacctggaggagaagcggctcacttggaggcttccagatgtgtccgaggcaggcggttctggccgcctctctgccagctgggagccgctctcagggcccagcacacccagccccgtggctgcacagttcaccagcgaggggaccactctgtcgggcgtggacttggaactggtgggcagcggttaccgcatgtcgctggtgaagaggaggtttgccacagggatgtacctggtgagctgctgaacccgcaaatgctgctgccccagctctacactgcgccctggtgctggctgaccaccccctgccctcctgccggaccctggggcctcccaccccagcctccctgaggcccatactccacggagaggagccccatgcccagcctggctgagcccgagattcgctcctccccctcatgccaaccccacacaggtcccggccttttaatgttctttgaataaacactttattttctaataaaataaaaaaggaaaccttt

SEQ ID NO: 311689 - DNA, 1180 bp, Homo sapiens
tatcagccccctgggactccctggccccaacctgccacctcaccaaagctctgagccctgctagccttgaggcgcggaccctcccccatacctcccacagtatcccagcgcctcatgcccccaaccccaagccctgcccttcaccgcccggctgcactggcctctaggactcacagcagccagccccagctaggaacgggcaggacttggggcagctgaagctcacggtgactcagcagtgcccaactgaccaatctcccgcagctctcctgcccctgggggcccacgactcacctggtgggcctgggctcagcaaacagccctccctcccagtatttcatcaaggacagggaatatccctcccacacacaggccagctgctcaccctgccacctccatgtgacaagtttgacacctgtctacccagagccagtgactgtccctcccagcagcctccaaagggtccaaagtccaagctagctctggcctgtgtggcccccacataaataaattagtggggagggggcagacctgggggcccttgggtgccagagtgagacacagcaggacccttccccaaatactaggctcagagcaacctccagccttctccagcaggatctgctccctgtgtccttggacagcagatccacacaccacttccccacccacacacagtaccctgggctggttggacaacaggatggtgtgttaaggggttaagggagggtactgttgacaccagctatggccaatagctgggctgtcctgaggggtggctggggacagagtccagctcccttggatcagcccagaggattcaggataggacaaaggccctggctgtgcccaaaagggtctacctcaggtggggttacaagcaaacctgggtgaccctcttgtccctaccagcagcttctcttgccccttccattcagggttccctggcaggggaagctgagagccatggctgaactatcagggacaaaggcccatgtccccacatccctgctccctccttcctcatccagcaccaaatctttgcttatgttccacagccagggcctgtgctgcagtcggggacaaggagcttccgtctggcaaggccggggcacaatttgcactcccctcagctagacgcacagactcagcaataaacctttgcatcaggctccagctg

SEQ ID NO: 311690 - DNA, 1218 bp, Homo sapiens
  misc_feature (8)..(8): n is a, c, g, or t
  misc_feature (14)..(14): n is a, c, g, or t
  misc_feature (90)..(90): n is a, c, g, or t
  misc_feature (149)..(149): n is a, c, g, or t
  misc_feature (171)..(172): n is a, c, g, or t
  misc_feature (190)..(190): n is a, c, g, or t
  misc_feature (353)..(353): n is a, c, g, or t
  misc_feature (362)..(362): n is a, c, g, or t
  misc_feature (382)..(382): n is a, c, g, or t
  misc_feature (389)..(389): n is a, c, g, or t
aaaaaaanatggcnccaacttcccctcccgggggacccttgaagggagggcaaaaaaaactcctggtagggcaaagagggtcacccaggnttgttttaaccccaccttgaggaaaacccctttgggcacaaccagggcctttgtcctanccttgaatcccctgggcctganncaagggagctggactctntccccaaccaccccctcaggacagcccagctattggccatagctggtgttaacagtaccctcccttaaccccttaacacaccatcctgttgtccaaccaacccagggtactgtgtgtgggtggggaagtggtgtgtggatctgctgtccaaggacacagggancagatcctnctggagaaggctggaggttnctctgancctagtatttggggaagggtcctgctctgctcaccctgccacctccatgtgacaagtttgacacctgtctacccagagccagtgactgtccctcccagcagcctccaaagggtccaaagtccaagctagctctggcctgtgtggcccccacataaataaattagtggggagggggcagacctgggggcccttgggtgccagagtgagacacagcaggacccttccccaaatactaggctcagagcaacctccagccttctccagcaggatctgctccctgtgtccttggacagcagatccacacaccacttccccacccacacacagtaccctgggctggttggacaacaggatggtgtgttaaggggttaagggagggtactgttgacaccagctatggccaatagctgggctgtcctgaggggtggctggggacagagtccagctcccttggatcagcccagaggattcaggataggacaaaggccctggctgtgcccaaaagggtctacctcaggtggggttacaagcaaacctgggtgaccctcttgtccctaccagcagcttctcttgccccttccattcagggttccctggcaggggaagctgagagccatggctgaactatcagggacaaaggcccatgtccccacatccctgctccctccttcctcatccagcaccaaatctttgcttatgttccacagccagggcctgtgctgcagtcggggacaaggagcttccgtctggcaaggccggggcacaatttgcactcccctcagctagacgcacagactcagcaataaacctttgcatcaggctccagctg

SEQ ID NO: 311691 - DNA, 785 bp, Homo sapiens
  misc_feature (714)..(714): n is a, c, g, or t
  misc_feature (748)..(748): n is a, c, g, or t
  misc_feature (766)..(766): n is a, c, g, or t
gagagccagttgattgcaggtcctcctggggccagaagggtgcctgggaggccaggttctggggatcccctccatccagaagaaccacctgctcactctgtcccttcgcctgctgctgggaccatgggggctggggccagtgctgaggagaagcactccagggagctggaaaagaagctgaaagaggacgctgagaaggatgctcgaaccgtgaagctgctgcttctgggtgccggtgagtccgggaagagcaccatcgtcaagcagatgaagattatccaccaggacgggtactcgctggaagagtgcctcgagtttatcgccatcatctacggcaacacgttgcagtccatcctggccatcgtacgcgccatgaccacactcaacatccagtacggagactctgcacgccaggacgacgcccggaagctgatgcacatggcagacactatcgaggagggcacgatgcccaaggagatgtcggacatcatccagcggctgtggaaggactccggtatccaggcctgttttgagcgcgcctcggagtaccagctcaacgactcggcgggctactacctctccgacctggagcgcctggtaaccccgggctacgtgcccaccgagcaggacgtgctgcgctcgcgagtcaagaccactggcatcatcgagacgcagttctccttcaaggatctcaacttccggttgttcgatgtngggggcagcctcggagcgaagaagtggtccactnttcgagggtactgatatntcacggggggtgggcttca

SEQ ID NO: 311692 - DNA, 1385 bp, Homo sapiens
caaaagagctaattccctctgagcctcctggagacacctgcaccccttcaggtgaaatgcaaggggtttacccgcctcaaataacccagtgcttgcggtaccagaggctcccacgaggtggcgatgacgctccgggatttcttcattgcagtctcacagcataataaaggctgcctgtgccggggtcttggggactcccctgtcccagaacagttgaggtcgttgagtcccctcgttggcttcctttcttcactttcctggcatttgcaaaccttgtgacttcaggatgtcaggacttaatttggatgggggggtgccggtgagtccgggaagagcaccatcgtcaagcagatgaagattatccaccaggacgggtactcgctggaagagtgcctcgagtttatcgccatcatctacggcaacacgttgcagtccatcctggccatcgtacgcgccatgaccacactcaacatccagtacggagactctgcacgccaggacgacgcccggaagctgatgcacatggcagacactatcgaggagggcacgatgcccaaggagatgtcggacatcatccagcggctgtggaaggactccggtatccaggcctgttttgagcgcgcctcggagtaccagctcaacgactcggcgggctactacctctccgacctggagcgcctggtaaccccgggctacgtgcccaccgagcaggacgtgctgcgctcgcgagtcaagaccactggcatcatcgagacgcagttctccttcaaggatctcaacttccggatgttcgatgtgggcgggcagcgctcggagcccaagaagtggatccactgcttcgagggcgtgacctgcatcatcttcatcgcggcgctgaccgcgtacgacatggtgctagtggaggacgacgaagtgaaccgcatgcacgagagcctgcacctgttcaacagcatctgcaaccaccgctacttcgccacgacgtccatcgtgctcttccttaacaagaaggacgtcttcttcgagaaggtcaagaaggcgcacctcagcatctgtttcccggactacgatggacccaacacctacgaggacgccggcaactacatcaaggtgcagttcctcgagctcaacatgcggcgcgacgtgaaggagatctattcccacatgacgtgcgccaccgacacgcagaacgtcaaattctgtcttcgacgctgtcaccgacatcatcatcaaggagaacctcaaagactgtggcctcttctgaggccagggcctgtgctgcagtcggggacaaggagcttccgtctggcaaggccggggcacaatttgcactcccctcagctagacgcacagactcagcaataaacctttgcatcaggctccagctg

SEQ ID NO: 311693 - DNA, 1301 bp, Homo sapiens
gagagccagttgattgcaggtcctcctggggccagaagggtgcctgggaggccaggttctggggatcccctccatccagaagaaccacctgctcactctgtcccttcgcctgctgctgggaccatgggggctggggccagtgctgaggagaagcactccagggagctggaaaagaagctgaaagaggacgctgagaaggatgctcgaaccgtgaagctgctgcttctgggtgccggtgagtccgggaagagcaccatcgtcaagcagatgaagattatccaccaggacgggtactcgctggaagagtgcctcgagtttatcgccatcatctacggcaacacgttgcagtccatcctggccatcgtacgcgccatgaccacactcaacatccagtacggagactctgcacgccaggacgacgcccggaagctgatgcacatggcagacactatcgaggagggcacgatgcccaaggagatgtcggacatcatccagcggctgtggaaggactccggtatccaggcctgttttgagcgcgcctcggagtaccagctcaacgactcggcgggctactacctctccgacctggagcgcctggtaaccccgggctacgtgcccaccgagcaggacgtgctgcgctcgcgagtcaagaccactggcatcatcgagacgcagttctccttcaaggatctcaacttccggatgttcgatgtgggcgggcagcgctcggagcccaagaagtggatccactgcttcgagggcgtgacctgcatcatcttcatcgcggcgctgaccgcgtacgacatggtgctagtggaggacgacgaagtgaaccgcatgcacgagagcctgcacctgttcaacagcatctgcaaccaccgctacttcgccacgacgtccatcgtgctcttccttaacaagaaggacgtcttcttcgagaaggtcaagaaggcgcacctcagcatctgtttcccggactacgatggacccaacacctacgaggacgccggcaactacatcaaggtgcagttcctcgagctcaacatgcggcgcgacgtgaaggagatctattcccacatgacgtgcgccaccgacacgcagaacgtcaaattctgtcttcgacgctgtcaccgacatcatcatcaaggagaacctcaaagactgtggcctcttctgaggccagggcctgtgctgcagtcggggacaaggagcttccgtctggcaaggccggggcacaatttgcactcccctcagctagacgcacagactcagcaataaacctttgcatcaggctccagctg

SEQ ID NO: 311694 - DNA, 1123 bp, Homo sapiens
caaaagagctaattccctctgagcctcctggagacacctgcaccccttcaggtgccggtgagtccgggaagagcaccatcgtcaagcagatgaagattatccaccaggacgggtactcgctggaagagtgcctcgagtttatcgccatcatctacggcaacacgttgcagtccatcctggccatcgtacgcgccatgaccacactcaacatccagtacggagactctgcacgccaggacgacgcccggaagctgatgcacatggcagacactatcgaggagggcacgatgcccaaggagatgtcggacatcatccagcggctgtggaaggactccggtatccaggcctgttttgagcgcgcctcggagtaccagctcaacgactcggcgggctactacctctccgacctggagcgcctggtaaccccgggctacgtgcccaccgagcaggacgtgctgcgctcgcgagtcaagaccactggcatcatcgagacgcagttctccttcaaggatctcaacttccggatgttcgatgtgggcgggcagcgctcggagcccaagaagtggatccactgcttcgagggcgtgacctgcatcatcttcatcgcggcgctgaccgcgtacgacatggtgctagtggaggacgacgaagtgaaccgcatgcacgagagcctgcacctgttcaacagcatctgcaaccaccgctacttcgccacgacgtccatcgtgctcttccttaacaagaaggacgtcttcttcgagaaggtcaagaaggcgcacctcagcatctgtttcccggactacgatggacccaacacctacgaggacgccggcaactacatcaaggtgcagttcctcgagctcaacatgcggcgcgacgtgaaggagatctattcccacatgacgtgcgccaccgacacgcagaacgtcaaattctgtcttcgacgctgtcaccgacatcatcatcaaggagaacctcaaagactgtggcctcttctgaggccagggcctgtgctgcagtcggggacaaggagcttccgtctggcaaggccggggcacaatttgcactcccctcagctagacgcacagactcagcaataaacctttgcatcaggctccagctg

SEQ ID NO: 311695 - DNA, 2425 bp, Homo sapiens
  misc_feature (1)..(1): n is a, c, g, or t
  misc_feature (5)..(5): n is a, c, g, or t
ngagngggcggcggcggcagcagacccctctccagggagtccaggacctgccagcgctggggattcttcccgaacaggcgcttgccctctcttttatggagcttgggcccctgccgcagcccggtagaggctgtggaggtctaccgtccggaagcctggttcccagccccgtggcccattcctggctacggggagtggaggctcccacgaggtagcggtggcctgcagcggcctcctccccgcagtgaagcatgggccagaagctctcggggagcctcaagtcagtggaggtgcgagagccggcgctgcggccggccaagcgggagctgcggggtgcagagcccgggcggccggcgcggctggaccagctgttggacatgccagcggcggggctggctgtgcagctgcggcacgcgtggaaccccgaggaccgctcgctcaacgtcttcgtcaaggacgacgaccggctcaccttccaccggcaccccgtggcccagagcaccgacggcatccgcggcaaggtgggccacgcccgcggcctgcacgcctggcagatcaactggccggctcggcagcgcggcacccacgctgtagttggtgtggccacggcccgtgctcccctgcactccgtgggctacacggcgctggtaggcagtgacgccgagtcgtggggctgggacctgggccgcagccgcctctaccacgacggcaagaaccagcccggcgtggcctacccggcctttctggggcccgacgaggcctttgcgctgcccgactcgctgctcgtggtgctggacatggatgagggcacactcagcttcatcgtggatggccagtacctgggcgtggccttccgaggtctcaagggcaagaagctgtacccggtggtgagtgccgtgtggggccactgtgaagtcaccatgcgctacatcaacggccttgaccccgagcccctgccactgatggacctgtgccggagatccatccgctcggccctgggccgccagcgcctgcaggacatcagctccctgcccctgcctcagtctctcaaaaactatctgcagtaccagtgagccaagcctgatgggcagcacagacacagacacacaccgcagggcccgaccctcctgtcattcacagtcccatggcacataggggaaaggatctacccttctcctggctccccaggacactcagttctttcaaagaccaggatgtggtaccaactttggaaacgaaaggtctcttgccaacagtatctactgccctcgaggcagccctcccaagtcagacacctccttcggagccacagagagcctggagtctgcacctcctggaaatcctgccaccaaccaggacacagcagccaccgtattgatcagagagcctgtttccttattcaagagaatgaataaaacatttaggcaggagactttctattgtgtgccccgttgcagacagggccagggagaaattagccagtgcagggggaaaattgcctctgaataatgaatgatgaaagcctgacgccgtgcccctcctggcccatacgccttgccagggcggcaggattgtcacaccgttttaggactctgtgccactttgagagactgttcccaggaggcccaaccgcagacctggcaagtggacagtgcagtgtggagacaccttccggcttacctctttgaacgttgtttacctacccctttccacgtgctccccttcccagccactgactcacagttctctggatgcccagacacctctcttcagggaagatgagtctgactggtttgccccagggaagagcgtatccttaccattattttaagtagcatttgcattttaaaagaggaatgcggagaggacagtacttagtccaaaggtgctaacgggggaactgggggcattgtgacacccaagtctgatgtgtcctgggttggggggccttcctggagtgtcagggtctctgggcaacgtccattcagggtgcggcatggctgtcacaaagctttatttgagcaaattattttttcactttaggagacttctacaagtttgtttcctgtttcaaatgtgtgtgtgatgtgctgtttatttatcagcttgaggtccatgggggcagccttgtgactggaagggtggatatgggagacacattctctacctgctccgagcctggtcctctcgcaggaatgctgctgctgcctccgccgccactgctgctgccacctcttatatgtttcagacactctctgcccagactcatttttaactggaaatcatcacagcagtgggatatcagagccccagacagcactgcctcttcctccccaccccactgcccccaccttaatgtgaatttgactgatgaatgaagagcgtttctaataaagtttgtcattcagtccttcaaaaaaaaaaa

SEQ ID NO: 311696 - DNA, 3202 bp, Homo sapiens
tgtcaaaagcctgcacacgagacccccgtgggccaggactgacttcctccccacacagggctgggcggggcaagcaggaaggagcctgttacagtcaaggtgacgcatccttgccgggccagcccgaacagcagctgggtcggcaagcgacaggagcacgggtcatcttttccccagaggcgtcggaatggacctgtgccacccagagcccgcggagctgagcagcggggagacggaagagttacagaggatcaagtggcaccgaaagcagctcctggaggacatccagaagctgaaggatgagattgcagatgtgtttgcccaaatcgactgcttcgagagtgcggaggagagccggatggcccagaaggagaaggagctgtgtattgggcgcaagaagttcaacatggaccccgccaagggtatccagtatttcattgagcacaagctgctgacccctgacgtccaggacattgcacggttcctgtataaaggcgagggcctcaacaagacagccattggtacctacctgggggagagggatcccatcaacctgcaggtcctccaggccttcgtggactgccacgagttcgccaacctcaacctcgtccaggccctcaggcagttcctgtggagcttccggctgccgggcgaggcccagaagatagaccggatgatggaggcctttgccactcgatactgcctctgcaacccaggcgtcttccagtccacagacacctgctacgtgttgtccttctccatcatcatgctcaacaccagcctccacaatcccaacgtccgggacaggccgcctttcgagcgctttgtgtccatgaaccgcggcatcaacaatggtagcgacctgcccgaggaccagctgcggaacctcttcgacagcatcaagagtgagccattctccatccctgaggacgacggcaatgacctcactcacaccttcttcaatccagaccgggagggttggctgctcaagctagggggccgcgtgaagacgtggaaacggcgctggttcatcctgaccgacaactgcctctactacttcgagttcaccactgacaaggagccacggggaattatacctcttgagaacctctcggtgcagaaggtggatgaccccaagaagccattctgcctggagctctacaaccctagctgccgaggccagaaaatcaaggcctgcaagaccgatggcgacggcagggtggtggagggcaagcacgaatcgtaccgcatctcagccaccagtgccgaggaacgtgaccagtggatcgagtccatccgagccagcatcacccgtgtccccttctacgacctggtctctactcggaagaagaagattgccagcaagcagtgagattcctggaggtggcactgggggctggtcaccctgagagtcccatcgcctgcagcacctggagacccacctcccaccccagtgcactcttttgggccacagacatcattgctgttccccgttacctcgagctgactctagaggggaaggcagagctcaggagggtgggtgggagctgcagtgggctcagagtccagcaatgaggccccctggcctgggcacccagctgcaggcccctgccctacgtgcactacaggaaggggtgaggagagcagccagaggaaaaccagccccagaatgctgcaacttctcttctctctggacttcggtgtcctcggctctgaaggcgctctctgcacttagatgctgtcagccctcaacgtaggaggggccgtggggtccctaagtgattcttctccctggcaaggctcttccttttcagggatatctctgccaacccctcccctgtcctcgggttgggcttggccctctctgcctgagagagctcagcacacacacagctcagacccacggacaggaccccgggacagaaccccgggagcactgccctaggagcccggaccccacgagctcagtcccagctctgcctctgactcgctgtgtaccctctgccaagtcatgcccattctctagttcttgcaaaactgcagtgtttggactagaaacgtattggcccctgctagccctgtgctccagcttccagctggagatggcagccgttatttgcggagcccaggctgactccggattcaacgttgctggggagagaaaagcagtatagactccaccttccaggatgtccatttcggggagaggagcaggtgggaccctcaagaaaatgacggagaacatcccagacagatgggactcaagcaggatgggtgctatatccaagaagccaagaagggagagtttcgtgcactgtggttaacaggagggccgcctggaggcagtggctgagccagaaagtaacacagagctcatgcttggagagatagagtcttggccatggctttcctgcaagaccactgacgagcagtcccatggtgataaagggcagcccggcgggtcccagcatctcgagaccctctgcagaagtattatcagagtagagctgacttccagtacccgggcagccagctctgtctccagggaggcctggcctggaggaggagtccactaacaggaaacacttctcaccccctcacacaggcccaggggagcccctggagggaaattccttggcaggggaacaggaaatgtggtcgcctctgccccactgccagcctgagtgggcaaggaagcaggtggatcccccagaaggaaccgcagctcgcgaggcacctctcctcgtccccacccacccccacatttgcacaccttccacagggtcaggatggagtagctgccttgcgaggtggtgagactcctgtctctggaggtctgcaagcactggtagtgatattgcagcagacaaggtctgggttgggcgtctgcaggaggagaccttgtgggacatctgaggacatccgcagattcttgtcagcctgtgaactaggccctgcctctgtcacctcattggtccatgaaggagcagccaggggtggtggaaggagcactgggctaggggtcaggggtcagagattctgtcctgctcctgggatgcactggctactcccttagtctactcccttcccctctctggtcctcagcttcctccatcatggaggagatgggatcatggattttctgggcataagtggctgttctgggagtcattccaaagagagaataaaactcctgatccaa

SEQ ID NO: 311697 - DNA, 1248 bp, Homo sapiens
tgtcaaaagcctgcacacgagacccccgtgggccaggactgacttcctccccacacagggctgggcggggcaagcaggaaggagcctgttacagtcaaggtgacgcatccttgccgggccagcccgaacagcagctgggtcggcaagcgacaggagcacgggtcatcttttccccagaggcgtcggaatggacctgtgccacccagagcccgcggagctgagcagcggggagacggaagagttacagaggatcaagtggcaccgaaagcagctcctggaggacatccagaagctgaaggatgagattgcagatgtgtttgcccaaatcgactgcttcgagagtgcggaggagagccggatggcccagaaggagaaggagctgtgtattgggcgcaagaagttcaacatggaccccgccaagggtatccagtatttcattgagcacaagctgctgacccctgacgtccaggacattgcacggttcctgtataaaggcgagggcctcaacaagacagccattggtacctacctgggggagaggtaagaacgagtggagccttagcgaggcaggaaatgaaggtgtgcaggtgtgtacaggtgtgtggatgtgcaggtgagaggatgaattatgttagcaaagtcatcactcctagtgcttgaggggctcacggatcatcccctccagattctgagtcaaagcctgactgccttcattcatttagtcatttattcaacaaataaatgttgctcagggtctactgtgttccaggcaccatcctaagccctgggtgtacaccagtgaataagacagacaaaactcttgtcctcaggaagtccatgctagtgggagagacaggtctcaatagttgtaaaatatgttagagaatgataagctctgtggaatacaaatcgagcagggaagggaagtcagaaatgctggggaccggccaggctcggggctcatgcctgtaatcccagcactttgggaggccgaggcaggcagatcgcgaggtcaggagttccagatcagcctagccaacgtggtgaaaccccgtctctactaaaaatacaaaaattagccggatgtggtggcaggtgcctgtagtcccagttactcaggaggctgaagcaggggaatcgcttgagcctgggagtcggaggttgtagtgagccaagatcacgccattgcactccagcctgggcaacagattgagaacgagactccgtctcaaaaaaaaaaagaaaaga

SEQ ID NO: 311698 - DNA, 3709 bp, Homo sapiens
tgtcaaaagcctgcacacgagacccccgtgggccaggactgacttcctccccacacagggctgggcggggcaagcaggaaggagcctgttacagtcaaggtgacgcatccttgccgggccagcccgaacagcagctgggtcggcaagcgacaggagcacgggtcatcttttccccagaggcgtcggaatggacctgtgccacccagagcccgcggagctgagcagcggggagacggaagagttacagaggatcaagtggcaccgaaagcagctcctggaggacatccagaagctgaaggatgagattgcagatgtgtttgcccaaatcgactgcttcgagagtgcggaggagagccggatggcccagaaggagaaggagctgtgtattgggcgcaagaagttcaacatggaccccgccaagggtatccagtatttcattgagcacaagctgctgacccctgacgtccaggacattgcacggttcctgtataaaggcgagggcctcaacaagacagccattggtacctacctgggggagagggatcccatcaacctgcaggtcctccaggccttcgtggactgccacgagttcgccaacctcaacctcgtccaggccctcaggcagttcctgtggagcttccggctgccgggcgaggcccagaagatagaccggatgatggaggcctttgccactcgatactgcctctgcaacccaggcgtcttccagtccacagacacctgctacgtgttgtccttctccatcatcatgctcaacaccagcctccacaatcccaacgtccgggacaggccgcctttcgagcgctttgtgtccatgaaccgcggcatcaacaatggtagcgacctgcccgaggaccagctgcggaacctcttcgacagcatcaagagtgagccattctccatccctgaggacgacggcaatgacctcactcacaccttcttcaatccagaccgggagggttggctgctcaagctagggggccgcgtgaagacgtggaaacggcgctggttcatcctgaccgacaactgcctctactacttcgagttcaccactgacaaggagccacggggaattatacctcttgagaacctctcggtgcagaaggtggatgaccccaagaagccattctgcctggagctctacaaccctagctgccgaggccagaaaatcaaggcctgcaagaccgatggcgacggcagggtggtggagggcaagcacgaatcgtaccgcatctcagccaccagtgccgaggaacgtgaccagtggatcgagtccatccgagccagcatcacccgtgtccccttctacgacctggtctctactcggaagaagaagattgccagcaagcagtgagattcctggaggtggcacccagtgcactcttttgggccacagacatcattgctgttccccgttacctcgagctgactctagaggggaaggcagagctcaggagggtgggtgggagctgcagtgggctcagagtccagcaatgaggccccctggcctgggcacccagctgcaggcccctgccctacgtgcactacaggaaggggtgaggagagcagccagaggaaaaccagccccagaatgctgcaacttctcttctctctggacttcggtgtcctcggctctgaaggcgctctctgcacttagatgctgtcagccctcaacgtaggaggggccgtggggtccctaagtgattcttctccctggcaaggctcttccttttcagggatatctctgccaacccctcccctgtcctcgggttgggcttggccctctctgcctgagagagctcagcacacacacagctcagacccacggacaggaccccgggacagaaccccgggagcactgccctaggagcccggaccccacgagctcagtcccagctctgcctctgactcgctgtgtaccctctgccaagtcatgcccattctctagttcttgcaaaactgcagtgtttggactagaaacgtattggcccctgctagccctgtgctccagcttccagctggagatggcagccgttatttgcggagcccaggctgactccggattcaacgttgctggggagagaaaagcagtatagactccaccttccaggatgtccatttcggggagaggagcaggtgggaccctcaagaaaatgacggagaacatcccagacagatgggactcaagcaggatgggtgctatatccaagaagccaagaagggagagtttcgtgcactgtggttaacaggagggccgcctggaggcagtggctgagccagaaagtaacacagagctcatgcttggagagatagagtcttggccatggctttcctgcaagaccactgacgagcagtcccatggtgataaagggcagcccggcgggtcccagcatctcgagaccctctgcagaagtattatcagagtagagctgacttccagtacccgggcagccagctctgtctccagggaggcctggcctggaggaggagtccactaacaggaaacacttctcaccccctcacacaggcccaggggagcccctggagggaaattccttggcaggggaacaggaaatgtggtcgcctctgccccactgccagcctgagtgggcaaggaagcaggtggatcccccagaaggaaccgcagctcgcgaggcacctctcctcgtccccacccacccccacatttgcacaccttccacagggtcaggatggagtagctgccttgcgaggtggtgagactcctgtctctggaggtctgcaagcactggtagtgatattgcagcagacaaggtctgggttgggcgtctgcaggaggagaccttgtgggacatctgaggacatccgcagattcttgtcagcctgtgaactaggccctgcctctgtcacctcattggtccatgaaggagcagccaggggtggtggaaggagcactgggctaggggtcaggggtcagagattctgtcctgctcctgggatgcactggctactcccttagtctactcccttcccctctctggtcctcagcttcctccatcatggaggagatgggatcatggattttctgggcataagtggctgttctgggagtcattccaaagagagaataaaactcctgatccaaaaaaaaaaaaaagaaagaaaaaagcaaaaaaaaaaacaacaaaaaaaaacaaagagaagcaacaaaataacatacaaaaaaagaaaaggaggggggcgggggcggcactataaataaccgccgccgcgggaggggcccagaatgttgagcagctgcaccgcacgattttcgttgagcgagggggcccccatagtggagggggtgcattatattatcagggcgagaggcgcgcggcggcgcgtgtaaaaaaaacgagtgcttggtggtggagaaaacaacgcttgcattggttgggggtactcattggtgtggagaaagagaccaccatctatctgcggggggggggcaaaccaatgggtggagcacacaccaccccacgagaggaaatttagagaggctgctgccccgagggggggagataattatcaaaaacatgtgtacggagggtttactaagtggtgtgttaaaccaccacagcgtcatatattagtgcgtggcgcacggaaaaaaaagtttgtgcccaccaggggaattattagtttgagaaagaaattctttaccggcggg

SEQ ID NO: 311699 - DNA, 2144 bp, Homo sapiens
tagcgtctgggcttctctgagcctcctggagggcccacccagcctccctctcttcccacccttgcctggccacctccccacagttcttctgcctggagctctacaaccctagctgccgaggccagaaaatcaaggcctgcaagaccgatggcgacggcagggtggtggagggcaagcacgaatcgtaccgcatctcagccaccagtgccgaggaacgtgaccagtggatcgagtccatccgagccagcatcacccgtgtccccttctacgacctggtctctactcggaagaagaagattgccagcaagcagtgagattcctggaggtggcactgggggctggtcaccctgagagtcccatcgcctgcagcacctggagacccacctcccaccccagtgcactcttttgggccacagacatcattgctgttccccgttacctcgagctgactctagaggggaaggcagagctcaggagggtgggtgggagctgcagtgggctcagagtccagcaatgaggccccctggcctgggcacccagctgcaggcccctgccctacgtgcactacaggaaggggtgaggagagcagccagaggaaaaccagccccagaatgctgcaacttctcttctctctggacttcggtgtcctcggctctgaaggcgctctctgcacttagatgctgtcagccctcaacgtaggaggggccgtggggtccctaagtgattcttctccctggcaaggctcttccttttcagggatatctctgccaacccctcccctgtcctcgggttgggcttggccctctctgcctgagagagctcagcacacacacagctcagacccacggacaggaccccgggacagaaccccgggagcactgccctaggagcccggaccccacgagctcagtcccagctctgcctctgactcgctgtgtaccctctgccaagtcatgcccattctctagttcttgcaaaactgcagtgtttggactagaaacgtattggcccctgctagccctgtgctccagcttccagctggagatggcagccgttatttgcggagcccaggctgactccggattcaacgttgctggggagagaaaagcagtatagactccaccttccaggatgtccatttcggggagaggagcaggtgggaccctcaagaaaatgacggagaacatcccagacagatgggactcaagcaggatgggtgctatatccaagaagccaagaagggagagtttcgtgcactgtggttaacaggagggccgcctggaggcagtggctgagccagaaagtaacacagagctcatgcttggagagatagagtcttggccatggctttcctgcaagaccactgacgagcagtcccatggtgataaagggcagcccggcgggtcccagcatctcgagaccctctgcagaagtattatcagagtagagctgacttccagtacccgggcagccagctctgtctccagggaggcctggcctggaggaggagtccactaacaggaaacacttctcaccccctcacacaggcccaggggagcccctggagggaaattccttggcaggggaacaggaaatgtggtcgcctctgccccactgccagcctgagtgggcaaggaagcaggtggatcccccagaaggaaccgcagctcgcgaggcacctctcctcgtccccacccacccccacatttgcacaccttccacagggtcaggatggagtagctgccttgcgaggtggtgagactcctgtctctggaggtctgcaagcactggtagtgatattgcagcagacaaggtctgggttgggcgtctgcaggaggagaccttgtgggacatctgaggacatccgcagattcttgtcagcctgtgaactaggccctgcctctgtcacctcattggtccatgaaggagcagccaggggtggtggaaggagcactgggctaggggtcaggggtcagagattctgtcctgctcctgggatgcactggctactcccttagtctactcccttcccctctctggtcctcagcttcctccatcatggaggagatgggatcatggattttctgggcataagtggctgttctgggagtcattccaaagagagaataaaactcctgatccaa

SEQ ID NO: 311700 - DNA, 2126 bp, Homo sapiens
tgtcaaaagcctgcacacgagacccccgtgggccaggactgacttcctccccacacagggctgggcggggcaagcaggaaggagcctgttacagtcaaggtgacgcatccttgccgggccagcccgaacagcagctgggtcggcaagcgacaggagcacgggtcatcttttccccagaggcgtcggaatggacctgtgccacccagagcccgcggagctgagcagcggggagacggaagagttacagaggatcaagtggcaccgaaagcagctcctggaggacatccagaagctgaaggatgagattgcagatgtgtttgcccaaatcgactgcttcgagagtgcggaggagagccggatggcccagaaggagaaggagctgtgtattgggcgcaagaagttcaacatggaccccgccaagggtatccagtatttcattgagcacaagctgctgacccctgacgtccaggacattgcacggttcctgtataaaggcgagggcctcaacaagacagccattggtacctacctgggggagagggatcccatcaacctgcaggtcctccaggccttcgtggactgccacgagttcgccaacctcaacctcgtccaggccctcaggcagttcctgtggagcttccggctgccgggcgaggcccagaagatagaccggatgatggaggcctttgccactcgatactgcctctgcaacccaggcgtcttccagtccacagacacctgctacgtgttgtccttctccatcatcatgctcaacaccagcctccacaatcccaacgtccgggacaggccgcctttcgagcgctttgtgtccatgaaccgcggcatcaacaatggtagcgacctgcccgaggaccagctgcggaacctcttcgacagcatcaagagtgagccattctccatccctgaggacgacggcaatgacctcactcacaccttcttcaatccagaccgggagggttggctgctcaagctagggggccgcgtgaagacgtggaaacggcgctggttcatcctgaccgacaactgcctctactacttcgagttcaccactgacaaggagccacggggaattatacctcttgagaacctctcggtgcagaaggtggatgaccccaagaagccattctgcctggagctctacaaccctagctgccgaggccagaaaatcaaggcctgcaagaccgatggcgacggcagggtggtggagggcaagcacgaatcgtaccgcatctcagccaccagtgccgaggaacgtgaccagtggatcgagtccatccgagccagcatcacccgtgtccccttctacgacctggtctctactcggaagaagaagattgccagcaagcagtgagattcctggaggtggcactgggggctggtcaccctgagagtcccatcgcctgcagcacctggagacccacctcccaccccagtgcactcttttgggccacagacatcattgctgttccccgttacctcgagctgactctagaggggaaggcagagctcaggagggtgggtgggagctgcagtgggctcagagtccagcaatgaggccccctggcctgggcacccagctgcaggcccctgccctacgtgcactacaggaaggggtgaggagagcagccagaggaaaaccagccccagaatgctgcaacttctcttctctctggacttcggtgtcctcggctctgaaggcgctctctgcacttagatgctgtcagccctcaacgtaggaggggccgtggggtccctaagtgattcttctccctggcaaggctcttccttttcagggatatctctgccaacccctcccctgtcctcgggttgggcttggccctctctgcctgagagagctcagcacacacacagctcagacccacggacaggaccccgggacagaaccccgggagcactgcctaggggtcaggggtcagagattctgtcctgctcctgggatgcactggctactcccttagtctactcccttcccctctctggtcctcagcttcctccatcatggaggagatgggatcatggattttctgggcataagtggctgttctgggagtcattccaaagagagaataaaactcctgatccaa

SEQ ID NO: 311701 - DNA, 351 bp, Homo sapiens
  misc_feature (40)..(40): n is a, c, g, or t
attaccgaattcgagcgtcggtatccccagaggcaccaanggaggagaccttgtgggacatctgaggacatccgcagattcttgtcagcctgtgaactaggccctgcctctgtcacctcattggtccatgaaggagcagccaggggtggtggaaggagcactgggctaggggtcaggggtcagagattctgtcctgctcctgggatgcactggctactcccttagtctactcccttcccctctctggtcctcagcttcctccatcatggaggagatgggatcatggattttctgggcataagtggctgttctgggagtcattccaaagagagaataaaactcctgatccaa

SEQ ID NO: 311702 - DNA, 983 bp, Homo sapiens
tgtcaaaagcctgcacacgagacccccgtgggccaggactgacttcctccccacacagggctgggcggggcaagcaggaaggagcctgttacagtcaaggtgacgcatccttgccgggccagcccgaacagcagctgggtcggcaagcgacaggagcacgggtcatcttttccccagaggcgtcggaatggacctgtgccacccagagcccgcggagctgagcagcggggagacggaagagttacagaggatcaagtggcaccgaaagcagctcctggaggacatccagaagctgaaggatgagattgcagatgtgtttgcccaaatcgactgcttcgagagtgcggaggagagccggatggcccagaaggagaaggagctgtgtattgggcgcaagaagttcaacatggaccccgccaagggtatccagtatttcattgagcacaagctgctgacccctgacgtccaggacattgcacggttcctgtataaaggcgagggcctcaacaagacagccattggtacctacctgggggagagggatcccatcaacctgcaggtcctccaggccttcgtggactgccacgagttcgccaacctcaacctcgtccaggccctcagattccgagaaggagcatctgatctgggctttggagggtgagtaggagttcacaatacagagaaggaagaagccaccaccatccagtgttctctaactcccagctctttaagggagaggggtagccaggactgtgtgaagcccaggaggagaagtgagagatacaggcccagttctcaccttcagagaacttagcttgaagctgtcgaaaccaccaacttccagagctagagggaagtcgaggttccaagaaagggagccctagcaaggcaaaacccctgccccacctcttccccaactaggtcccacagccagatctcagggcccaaaggccaggtgcggggagccacagaccccggggcag

SEQ ID NO: 311703 - DNA, 417 bp, Homo sapiens
acactagcgtctgggcttctctgagcctcctggagggcccacccagcctccctctcttcccacccttgcctggccacctccccacagttcttctgcctggagctctacaaccctagctgccgaggccagaaaatcaaggcctgcaagaccgatggcgacggcagggtggtggagggcaagcacgaatcgtaccgcatctcagccaccagtgccgaggaacgtgaccagtggatcgagtccatccggtaaggggtgcccaggtctggggacggcttcccgtcaccttccagaaggccctgcttcttttgggtcttgcttccttatctgtaaaggggctaactccagtctctccctcctgtttctggctggcaaaccccttccacccgtattccatgggtactttctgtgtgcctggca

SEQ ID NO: 311704 - DNA, 454 bp, Homo sapiens
aggcagctcctatgaaagaggggtcaaaacttcccagaacagactgtgccaacaccagaatgccaggctccaggattctggccatggaagctccttcctcccttccccctcccaggcctgcttccatgcagcagctgctcacggcttctgtgtaccccctccagggtatccagtatttcattgagcacaagctgctgacccctgacgtccaggacattgcacggttcctgtataaaggcgagggcctcaacaagacagccattggtacctacctgggggagaggtaagaacgagtggagccttagcgaggcaggaaatgaaggtgtgcaggtgtgtacaggtgtgtggatgtgcaggtgagaggatgaattatgttagcaaagtcatcactcctagtgcttgaggggctcacggatcatcccctccagattctgagtcaaagcctgactgcctt

SEQ ID NO: 311705 - DNA, 4619 bp, Homo sapiens
tgtcaaaagcctgcacacgagacccccgtgggccaggactgacttcctccccacacagggctgggcggggcaagcaggaaggagcctgttacagtcaaggtgacgcatccttgccgggccagcccgaacagcagctgggtcggcaagcgacaggagcacgggtcatcttttccccagaggcgtcggaatggacctgtgccacccagagcccgcggagctgagcagcggggagacggaagagttacagaggatcaagtggcaccgaaagcagctcctggaggacatccagaagctgaaggatgagattgcagatgtgtttgcccaaatcgactgcttcgagagtgcggaggagagccggatggcccagaaggagaaggagctgtgtattgggcgcaagaagttcaacatggaccccgccaagggtatccagtatttcattgagcacaagctgctgacccctgacgtccaggacattgcacggttcctgtataaaggcgagggcctcaacaagacagccattggtacctacctgggggagagggatcccatcaacctgcaggtcctccaggccttcgtggactgccacgagttcgccaacctcaacctcgtccaggccctcaggcagttcctgtggagcttccggctgccgggcgaggcccagaagatagaccggatgatggaggcctttgccactcgatactgcctctgcaacccaggcgtcttccagtccacagacacctgctacgtgttgtccttctccatcatcatgctcaacaccagcctccacaatcccaacgtccgggacaggccgcctttcgagcgctttgtgtccatgaaccgcggcatcaacaatggtagcgacctgcccgaggaccagctgcgggttacatgggagtgctcccagaggagaagccgggaaaggacatttcaaaaagaagaagtggccagaacggaggcgtgtcctgattgggaaaggagaggtgtccagtgtggccgagaacctcttcgacagcatcaagagtgagccattctccatccctgaggacgacggcaatgacctcactcacaccttcttcaatccagaccgggagggttggctgctcaagctaggtgagagaccgacagacacacgtcgtcgcacacacactcatgcacgcgcgggcacacatcgttgcatgcacactcctggacgcacaggcccccagctgacacgaggctcacatgcatcctgggggatggagttggacagccccaggtctcctggcccccagtgcagccgtctgcctgccccatccatccacctgtcccgagaaggaagggagccagtggtgggggctgagctgtaagccgggcgagaggcagacagacccactgacaaatgcttcagctgcggttctgtttctctctccccagcggaatggggagggaagtcatagcaggaagtaccatttgttcagaacctactgagctcaggcaaggtgctggtccaccctacagccgaacagtaaagtcagggatctgcctgaggccacacagccagccaggggcagatttgagggcacagagggttaggtgtccctaaaggaggggaggaaggatgacaggatgtggcttagggggaggctcccttcaagctgactgggggcagggagggcctgcaccctgcagagagcagctggggtgggagctgcagtaatagtggctgtagagtccagcagggcaaccccagtgcccggccgtctgcccctgcctcccacacacacttccggaagcctctccagcagggacagccaagccggggacagcgcctccagggcaggtgaggacagatgcctcatgttgaagcaggggtctcaacctggctcacctccagcaacattgagcctccagcacctcctgtctaccaagccccgtgccagtcctgcccagaacccccaggagcccatgagccctctgactctccacaccacaccccagtccatcctcctccagagcactcggccgcctgtcctgccccagccacgtgctgtccgcccccgagaagctctatgtcataaatcttaactcagatgggagagggagcctcagagtcacatagccctgggcccaaaccccagctcctccacccaagtactgatggtcaggttcttcagcctcagtttctgtagctgtaagatggggagaatgatctctgggagggttaaatgtgcggcaaaatggccaagagttgggctctgggactaggacattggggttcgaatcccagctctgctgctgaaccgtgggcaggcgattttacctctccatgactgtttcctcatctgtaaaatggggttaacaatggtctcctcttcatacgtggttgtgaggattaataagtaatattttttgaaacctctagagcagtgtctggcaaatgaaggacgaaatgcttagcattgtgccaggcagggaccaagctaaggaatgaagcaatggatggcggtagccaggaagagcaggaactggccattcctaggaccattcctaggacctgatcacggaggccacccaaacgccagttctgcctggagctctacaaccctagctgccgaggccagaaaatcaaggcctgcaagaccgatggcgacggcagggtggtggagggcaagcacgaatcgtaccgcatctcagccaccagtgccgaggaacgtgaccagtggatcgagtccatccgagccagcatcacccgtgtccccttctacgacctggtctctactcggaagaagaagattgccagcaagcagtgagattcctggaggtggcactgggggctggtcaccctgagagtcccatcgcctgcagcacctggagacccacctcccaccccagtgcactcttttgggccacagacatcattgctgttccccgttacctcgagctgactctagaggggaaggcagagctcaggagggtgggtgggagctgcagtgggctcagagtccagcaatgaggccccctggcctgggcacccagctgcaggcccctgccctacgtgcactacaggaaggggtgaggagagcagccagaggaaaaccagccccagaatgctgcaacttctcttctctctggacttcggtgtcctcggctctgaaggcgctctctgcacttagatgctgtcagccctcaacgtaggaggggccgtggggtccctaagtgattcttctccctggcaaggctcttccttttcagggatatctctgccaacccctcccctgtcctcgggttgggcttggccctctctgcctgagagagctcagcacacacacagctcagacccacggacaggaccccgggacagaaccccgggagcactgccctaggagcccggaccccacgagctcagtcccagctctgcctctgactcgctgtgtaccctctgccaagtcatgcccattctctagttcttgcaaaactgcagtgtttggactagaaacgtattggcccctgctagccctgtgctccagcttccagctggagatggcagccgttatttgcggagcccaggctgactccggattcaacgttgctggggagagaaaagcagtatagactccaccttccaggatgtccatttcggggagaggagcaggtgggaccctcaagaaaatgacggagaacatcccagacagatgggactcaagcaggatgggtgctatatccaagaagccaagaagggagagtttcgtgcactgtggttaacaggagggccgcctggaggcagtggctgagccagaaagtaacacagagctcatgcttggagagatagagtcttggccatggctttcctgcaagaccactgacgagcagtcccatggtgataaagggcagcccggcgggtcccagcatctcgagaccctctgcagaagtattatcagagtagagctgacttccagtacccgggcagccagctctgtctccagggaggcctggcctggaggaggagtccactaacaggaaacacttctcaccccctcacacaggcccaggggagcccctggagggaaattccttggcaggggaacaggaaatgtggtcgcctctgccccactgccagcctgagtgggcaaggaagcaggtggatcccccagaaggaaccgcagctcgcgaggcacctctcctcgtccccacccacccccacatttgcacaccttccacagggtcaggatggagtagctgccttgcgaggtggtgagactcctgtctctggaggtctgcaagcactggtagtgatattgcagcagacaaggtctgggttgggcgtctgcaggaggagaccttgtgggacatctgaggacatccgcagattcttgtcagcctgtgaactaggccctgcctctgtcacctcattggtccatgaaggagcagccaggggtggtggaaggagcactgggctaggggtcaggggtcagagattctgtcctgctcctgggatgcactggctactcccttagtctactcccttcccctctctggtcctcagcttcctccatcatggaggagatgggatcatggattttctgggcataagtggctgttctgggagtcattccaaagagagaataaaactcctgatccaa

SEQ ID NO: 311706 - DNA, 3142 bp, Homo sapiens
tgtcaaaagcctgcacacgagacccccgtgggccaggactgacttcctccccacacagggctgggcggggcaagcaggaaggagcctgttacagtcaaggtgacgcatccttgccgggccagcccgaacagcagctgggtcggcaagcgacaggagcacgggtcatcttttccccagaggcgtcggaatggacctgtgccacccagagcccgcggagctgagcagcggggagacggaagagttacagaggatcaagtggcaccgaaagcagctcctggaggacatccagaagctgaaggatgagattgcagatgtgtttgcccaaatcgactgcttcgagagtgcggaggagagccggatggcccagaaggagaaggagctgtgtattgggcgcaagaagttcaacatggaccccgccaagggtatccagtatttcattgagcacaagctgctgacccctgacgtccaggacattgcacggttcctgtataaaggcgagggcctcaacaagacagccattggtacctacctgggggagagggatcccatcaacctgcaggtcctccaggccttcgtggactgccacgagttcgccaacctcaacctcgtccaggccctcaggcagttcctgtggagcttccggctgccgggcgaggcccagaagatagaccggatgatggaggcctttgccactcgatactgcctctgcaacccaggcgtcttccagtccacagacacctgctacgtgttgtccttctccatcatcatgctcaacaccagcctccacaatcccaacgtccgggacaggccgcctttcgagcgctttgtgtccatgaaccgcggcatcaacaatggtagcgacctgcccgaggaccagctgcggaacctcttcgacagcatcaagagtgagccattctccatccctgaggacgacggcaatgacctcactcacaccttcttcaatccagaccgggagggttggctgctcaagctagggggccgcgtgaagacgtggaaacggcgctggttcatcctgaccgacaactgcctctactacttcgagttcaccactgacaaggagccacggggaattatacctcttgagaacctctcggtgcagaaggtggatgaccccaagaagccattctgcctggagctctacaaccctagctgccgaggccagaaaatcaaggcctgcaagaccgatggcgacggcagggtggtggagggcaagcacgaatcgtaccgcatctcagccaccagtgccgaggaacgtgaccagtggatcgagtccatccgagccagcatcacccgtgtccccttctacgacctggtctctactcggaagaagaagattgccagcaagcagtgagattcctggaggtggcacccagtgcactcttttgggccacagacatcattgctgttccccgttacctcgagctgactctagaggggaaggcagagctcaggagggtgggtgggagctgcagtgggctcagagtccagcaatgaggccccctggcctgggcacccagctgcaggcccctgccctacgtgcactacaggaaggggtgaggagagcagccagaggaaaaccagccccagaatgctgcaacttctcttctctctggacttcggtgtcctcggctctgaaggcgctctctgcacttagatgctgtcagccctcaacgtaggaggggccgtggggtccctaagtgattcttctccctggcaaggctcttccttttcagggatatctctgccaacccctcccctgtcctcgggttgggcttggccctctctgcctgagagagctcagcacacacacagctcagacccacggacaggaccccgggacagaaccccgggagcactgccctaggagcccggaccccacgagctcagtcccagctctgcctctgactcgctgtgtaccctctgccaagtcatgcccattctctagttcttgcaaaactgcagtgtttggactagaaacgtattggcccctgctagccctgtgctccagcttccagctggagatggcagccgttatttgcggagcccaggctgactccggattcaacgttgctggggagagaaaagcagtatagactccaccttccaggatgtccatttcggggagaggagcaggtgggaccctcaagaaaatgacggagaacatcccagacagatgggactcaagcaggatgggtgctatatccaagaagccaagaagggagagtttcgtgcactgtggttaacaggagggccgcctggaggcagtggctgagccagaaagtaacacagagctcatgcttggagagatagagtcttggccatggctttcctgcaagaccactgacgagcagtcccatggtgataaagggcagcccggcgggtcccagcatctcgagaccctctgcagaagtattatcagagtagagctgacttccagtacccgggcagccagctctgtctccagggaggcctggcctggaggaggagtccactaacaggaaacacttctcaccccctcacacaggcccaggggagcccctggagggaaattccttggcaggggaacaggaaatgtggtcgcctctgccccactgccagcctgagtgggcaaggaagcaggtggatcccccagaaggaaccgcagctcgcgaggcacctctcctcgtccccacccacccccacatttgcacaccttccacagggtcaggatggagtagctgccttgcgaggtggtgagactcctgtctctggaggtctgcaagcactggtagtgatattgcagcagacaaggtctgggttgggcgtctgcaggaggagaccttgtgggacatctgaggacatccgcagattcttgtcagcctgtgaactaggccctgcctctgtcacctcattggtccatgaaggagcagccaggggtggtggaaggagcactgggctaggggtcaggggtcagagattctgtcctgctcctgggatgcactggctactcccttagtctactcccttcccctctctggtcctcagcttcctccatcatggaggagatgggatcatggattttctgggcataagtggctgttctgggagtcattccaaagagagaataaaactcctgatccaa

SEQ ID NO: 311707 - DNA, 4716 bp, Homo sapiens
tgtcaaaagcctgcacacgagacccccgtgggccaggactgacttcctccccacacagggctgggcggggcaagcaggaaggagcctgttacagtcaaggtgacgcatccttgccgggccagcccgaacagcagctgggtcggcaagcgacaggagcacgggtcatcttttccccagaggcgtcggaatggacctgtgccacccagagcccgcggagctgagcagcggggagacggaagagttacagaggatcaagtggcaccgaaagcagctcctggaggacatccagaagctgaaggatgagattgcagatgtgtttgcccaaatcgactgcttcgagagtgcggaggagagccggatggcccagaaggagaaggagctgtgtattgggcgcaagaagttcaacatggaccccgccaagggtatccagtatttcattgagcacaagctgctgacccctgacgtccaggacattgcacggttcctgtataaaggcgagggcctcaacaagacagccattggtacctacctgggggagagggatcccatcaacctgcaggtcctccaggccttcgtggactgccacgagttcgccaacctcaacctcgtccaggccctcaggcagttcctgtggagcttccggctgccgggcgaggcccagaagatagaccggatgatggaggcctttgccactcgatactgcctctgcaacccaggcgtcttccagtccacaggtgatccgcccgcctcgacctcccacagtgctgagattacaggcgtgagccaccatgccaagccaaagttactcaatccatacatcaaccgtttgagacacctgctacgtgttgtccttctccatcatcatgctcaacaccagcctccacaatcccaacgtccgggacaggccgcctttcgagcgctttgtgtccatgaaccgcggcatcaacaatggtagcgacctgcccgaggaccagctgcgggttacatgggagtgctcccagaggagaagccgggaaaggacatttcaaaaagaagaagtggccagaacggaggcgtgtcctgattgggaaaggagaggtgtccagtgtggccgagaacctcttcgacagcatcaagagtgagccattctccatccctgaggacgacggcaatgacctcactcacaccttcttcaatccagaccgggagggttggctgctcaagctaggtgagagaccgacagacacacgtcgtcgcacacacactcatgcacgcgcgggcacacatcgttgcatgcacactcctggacgcacaggcccccagctgacacgaggctcacatgcatcctgggggatggagttggacagccccaggtctcctggcccccagtgcagccgtctgcctgccccatccatccacctgtcccgagaaggaagggagccagtggtgggggctgagctgtaagccgggcgagaggcagacagacccactgacaaatgcttcagctgcggttctgtttctctctccccagcggaatggggagggaagtcatagcaggaagtaccatttgttcagaacctactgagctcaggcaaggtgctggtccaccctacagccgaacagtaaagtcagggatctgcctgaggccacacagccagccaggggcagatttgagggcacagagggttaggtgtccctaaaggaggggaggaaggatgacaggatgtggcttagggggaggctcccttcaagctgactgggggcagggagggcctgcaccctgcagagagcagctggggtgggagctgcagtaatagtggctgtagagtccagcagggcaaccccagtgcccggccgtctgcccctgcctcccacacacacttccggaagcctctccagcagggacagccaagccggggacagcgcctccagggcaggtgaggacagatgcctcatgttgaagcaggggtctcaacctggctcacctccagcaacattgagcctccagcacctcctgtctaccaagccccgtgccagtcctgcccagaacccccaggagcccatgagccctctgactctccacaccacaccccagtccatcctcctccagagcactcggccgcctgtcctgccccagccacgtgctgtccgcccccgagaagctctatgtcataaatcttaactcagatgggagagggagcctcagagtcacatagccctgggcccaaaccccagctcctccacccaagtactgatggtcaggttcttcagcctcagtttctgtagctgtaagatggggagaatgatctctgggagggttaaatgtgcggcaaaatggccaagagttgggctctgggactaggacattggggttcgaatcccagctctgctgctgaaccgtgggcaggcgattttacctctccatgactgtttcctcatctgtaaaatggggttaacaatggtctcctcttcatacgtggttgtgaggattaataagtaatattttttgaaacctctagagcagtgtctggcaaatgaaggacgaaatgcttagcattgtgccaggcagggaccaagctaaggaatgaagcaatggatggcggtagccaggaagagcaggaactggccattcctaggaccattcctaggacctgatcacggaggccacccaaacgccagttctgcctggagctctacaaccctagctgccgaggccagaaaatcaaggcctgcaagaccgatggcgacggcagggtggtggagggcaagcacgaatcgtaccgcatctcagccaccagtgccgaggaacgtgaccagtggatcgagtccatccgagccagcatcacccgtgtccccttctacgacctggtctctactcggaagaagaagattgccagcaagcagtgagattcctggaggtggcactgggggctggtcaccctgagagtcccatcgcctgcagcacctggagacccacctcccaccccagtgcactcttttgggccacagacatcattgctgttccccgttacctcgagctgactctagaggggaaggcagagctcaggagggtgggtgggagctgcagtgggctcagagtccagcaatgaggccccctggcctgggcacccagctgcaggcccctgccctacgtgcactacaggaaggggtgaggagagcagccagaggaaaaccagccccagaatgctgcaacttctcttctctctggacttcggtgtcctcggctctgaaggcgctctctgcacttagatgctgtcagccctcaacgtaggaggggccgtggggtccctaagtgattcttctccctggcaaggctcttccttttcagggatatctctgccaacccctcccctgtcctcgggttgggcttggccctctctgcctgagagagctcagcacacacacagctcagacccacggacaggaccccgggacagaaccccgggagcactgccctaggagcccggaccccacgagctcagtcccagctctgcctctgactcgctgtgtaccctctgccaagtcatgcccattctctagttcttgcaaaactgcagtgtttggactagaaacgtattggcccctgctagccctgtgctccagcttccagctggagatggcagccgttatttgcggagcccaggctgactccggattcaacgttgctggggagagaaaagcagtatagactccaccttccaggatgtccatttcggggagaggagcaggtgggaccctcaagaaaatgacggagaacatcccagacagatgggactcaagcaggatgggtgctatatccaagaagccaagaagggagagtttcgtgcactgtggttaacaggagggccgcctggaggcagtggctgagccagaaagtaacacagagctcatgcttggagagatagagtcttggccatggctttcctgcaagaccactgacgagcagtcccatggtgataaagggcagcccggcgggtcccagcatctcgagaccctctgcagaagtattatcagagtagagctgacttccagtacccgggcagccagctctgtctccagggaggcctggcctggaggaggagtccactaacaggaaacacttctcaccccctcacacaggcccaggggagcccctggagggaaattccttggcaggggaacaggaaatgtggtcgcctctgccccactgccagcctgagtgggcaaggaagcaggtggatcccccagaaggaaccgcagctcgcgaggcacctctcctcgtccccacccacccccacatttgcacaccttccacagggtcaggatggagtagctgccttgcgaggtggtgagactcctgtctctggaggtctgcaagcactggtagtgatattgcagcagacaaggtctgggttgggcgtctgcaggaggagaccttgtgggacatctgaggacatccgcagattcttgtcagcctgtgaactaggccctgcctctgtcacctcattggtccatgaaggagcagccaggggtggtggaaggagcactgggctaggggtcaggggtcagagattctgtcctgctcctgggatgcactggctactcccttagtctactcccttcccctctctggtcctcagcttcctccatcatggaggagatgggatcatggattttctgggcataagtggctgttctgggagtcattccaaagagagaataaaactcctgatccaa

SEQ ID NO: 311708 - DNA, 1345 bp, Homo sapiens
tgtcaaaagcctgcacacgagacccccgtgggccaggactgacttcctccccacacagggctgggcggggcaagcaggaaggagcctgttacagtcaaggtgacgcatccttgccgggccagcccgaacagcagctgggtcggcaagcgacaggagcacgggtcatcttttccccagaggcgtcggaatggacctgtgccacccagagcccgcggagctgagcagcggggagacggaagagttacagaggatcaagtggcaccgaaagcagctcctggaggacatccagaagctgaaggatgagattgcagatgtgtttgcccaaatcgactgcttcgagagtgcggaggagagccggatggcccagaaggagaaggagctgtgtattgggcgcaagaagttcaacatggaccccgccaagggtatccagtatttcattgagcacaagctgctgacccctgacgtccaggacattgcacggttcctgtataaaggcgagggcctcaacaagacagccattggtacctacctgggggagagggatcccatcaacctgcaggtcctccaggccttcgtggactgccacgagttcgccaacctcaacctcgtccaggccctcaggcagttcctgtggagcttccggctgccgggcgaggcccagaagatagaccggatgatggaggcctttgccactcgatactgcctctgcaacccaggcgtcttccagtccacagacacctgctacgtgttgtccttctccatcatcatgctcaacaccagcctccacaatcccaacgtccgggacaggccgcctttcgagcgctttgtgtccatgaaccgcggcatcaacaatggtagcgacctgcccgaggaccagctgcggaacctcttcgacagcatcaagagtgagccattctccatccctgaggacgacggcaatgacctcactcacaccttcttcaatccagaccgggagggttggctgctcaagctagggggccgcgtgaagacgtggaaacggcgctggttcatcctgaccgacaactgcctctactacttcgagttcaccactgacaaggagccacggggaattatacctcttgagaacctctcggtgcagaaggtggatgaccccaagaagccattctgcctggagctctacaaccctagctgccgaggccagaaaatcaaggcctgcaagaccgatggcgacggcagggtggtggagggcaagcacgaatcgtaccgcatctcagccaccagtgccgaggaacgtgaccagtggatcgagtccatccgagccagcatcacccgtggtcccacctctccccgtggtcccacctct

SEQ ID NO: 311709 - DNA, 420 bp, Homo sapiens
caccagcctccacaatcccaacgtccgggacaggccgcctttcgagcgctttgtgtccatgaaccgcggcatcaacaatggtagcgacctgcccgaggaccagctgcgggtgagagaggcgcagcccacccagcctggccccggggaatccaggagggacctgtccttagatggatggcccgggaggggctcctctgagatagacagcccccagtggggactctgctgatatggcccacccaggctgtgactgtcttgagaggcaccgtcacaaagcgcattggtcctgaaacccgcctgcccaaaagaggcccccatcttgagaaggatgtccgagatagaccacccaggaggtccacccagatttaagcctttgggggactctaggcagccatctttcacatcttccaaaaagggtac

SEQ ID NO: 311710 - DNA, 671 bp, Homo sapiens
tctggcgagcttggcgttccctgtgcgccggaagtgatcccctgcgtggctgggctgctcgggttagatcgtcagaaaagcctaaagattagactgtaagaaaagaaaatagaagccatgtttcgaagacctgtattacaggtacttcgtcagtttgtaagacatgagtccgaaacaactaccagtttggttcttgaaagatccctgaatcgtgtgcacttacttgggcgagtgggtcaggaccctgtcttgagacaggtggaaggaaaaaatccagtcacaatattttctctagcaactaatgagatgtggcgatcaggggatagtgaagtttaccaactgggtgatgtcagtcaaaagacaacatggcacagaatatcagtattccggccaggcctcagagacgtggcatatcaatatgtgaaaaaggggtctcgaatttatttggaagggaaaatagactatggtgaatacatggataaaaataatgtgaggcgacaagcaacaacaatcatagctgataatattatatttctgagtgaccagacgaaagagaaggagtagaaaggatgattcttctttggccatcatttggtacagtctcatttccaagtcatgtataatctttatggcttccaaggacaagaattaaaatactcttttacgtaaaa

SEQ ID NO: 311711 - DNA, 765 bp, Homo sapiens
tctggcgagcttggcgttccctgtgcgccggaagtgatcccctgcgtggctgggctgctcgggttagatcgtcaggtgagggaggaagggatagccagcgcgaaggaagtgctggagtcgtgtgttttggctgcgcgtgatcctgcgtgggtcgggaggtgtttctgtgaaaagcctaaagattagactgtaagaaaagaaaatagaagccatgtttcgaagacctgtattacaggtacttcgtcagtttgtaagacatgagtccgaaacaactaccagtttggttcttgaaagatccctgaatcgtgtgcacttacttgggcgagtgggtcaggaccctgtcttgagacaggtggaaggaaaaaatccagtcacaatattttctctagcaactaatgagatgtggcgatcaggggatagtgaagtttaccaactgggtgatgtcagtcaaaagacaacatggcacagaatatcagtattccggccaggcctcagagacgtggcatatcaatatgtgaaaaaggggtctcgaatttatttggaagggaaaatagactatggtgaatacatggataaaaataatgtgaggcgacaagcaacaacaatcatagctgataatattatatttctgagtgaccagacgaaagagaaggagtagaaaggatgattcttctttggccatcatttggtacagtctcatttccaagtcatgtataatctttatggcttccaaggacaagaattaaaatactcttttacgtaaaa

SEQ ID NO: 311712 - DNA, 833 bp, Homo sapiens
gttgcctcgccggccccggttccccaggaccgcctccctcgtttctgcggcgaacattaccgaccttcctgctttaggccacagaacagttgccaaacgctgtccgtcgatcccgaatctcacccaccctcggctctcgttaggtgagggaggaagggatagccagcgcgaaggaagtgctggagtcgtgtgttttggctgcgcgtgatcctgcgtgggtcgggaggtgtttctgtgaaaagcctaaagattagactgtaagaaaagaaaatagaagccatgtttcgaagacctgtattacaggtacttcgtcagtttgtaagacatgagtccgaaacaactaccagtttggttcttgaaagatccctgaatcgtgtgcacttacttgggcgagtgggtcaggaccctgtcttgagacaggtggaaggaaaaaatccagtcacaatattttctctagcaactaatgagatgtggcgatcaggggatagtgaagtttaccaactgggtgatgtcagtcaaaagacaacatggcacagaatatcagtattccggccaggcctcagagacgtggcatatcaatatgtgaaaaaggggtctcgaatttatttggaagggaaaatagactatggtgaatacatggataaaaataatgtgaggcgacaagcaacaacaatcatagctgataatattatatttctgagtgaccagacgaaagagaaggagtagaaaggatgattcttctttggccatcatttggtacagtctcatttccaagtcatgtataatctttatggcttccaaggacaagaattaaaatactcttttacgtaaaa

SEQ ID NO: 311713 - DNA, 643 bp, Homo sapiens
gcctactactactaaattcgcggccgcgtcgacgttagatcgtcaggaaaagcctaaagattagactgtaagaaaagaaaatagaagccatgtttcgaagacctgtattacaggtacttcgtcagtttgtaagacatgagtccgaaacaactaccagtttggttcttgaaagatccctgaatcgtgtgcacttacttgggcgagtgggtcaggaccctgtcttgagacaggtggaaggaaaaaatccagtcacaatattttctctagcaactaatgagatgtggcgatcaggggatagtgaagtttaccaactgggtgatgtcagtcaaaagacaacatggcacagaatatcagtattccggccaggcctcagagacgtggcatatcaatatgtgaaaaaggggtctcgaatttatttggaagggaaaatagactatggtgaatacatggataaaaataatgtgaggcgacaagcaacaacaatcatagctgataatattatatttctgagtgaccagacgaaagagaaggagtagaaaggatgattcttctttggccatcatttggtacagtctcatttccaagtcatgtataatctttatggcttccaaggacaagaattaaaatactcttttacgtaaaa

SEQ ID NO: 311714 - DNA, 668 bp, Homo sapiens
tattttgtttttttccgtcaggaaaagcctaaagattagactgtaagaaaagaaaatagaagccatgtttcgaagacctgtattacagctaatgaaagctggattttgaaaatacttggcagcaactcttcggtacaggtacttcgtcagtttgtaagacatgagtccgaaacaactaccagtttggttcttgaaagatccctgaatcgtgtgcacttacttgggcgagtgggtcaggaccctgtcttgagacaggtggaaggaaaaaatccagtcacaatattttctctagcaactaatgagatgtggcgatcaggggatagtgaagtttaccaactgggtgatgtcagtcaaaagacaacatggcacagaatatcagtattccggccaggcctcagagacgtggcatatcaatatgtgaaaaaggggtctcgaatttatttggaagggaaaatagactatggtgaatacatggataaaaataatgtgaggcgacaagcaacaacaatcatagctgataatattatatttctgagtgaccagacgaaagagaaggagtagaaaggatgattcttctttggccatcatttggtacagtctcatttccaagtcatgtataatctttatggcttccaaggacaagaattaaaatactcttttacgtaaaa

SEQ ID NO: 311715 - DNA, 604 bp, Homo sapiens
tggatcccccggggttgcagaaattcgggcccaaggaaaaataaaacgccatgtttaaaagacctgtattacaggtacttcgtcagtttgtaagacatgagtccgaaacaactaccagtttggttcttgaaagatccctgaatcgtgtgcacttacttgggcgagtgggtcaggaccctgtcttgagacaggtggaaggaaaaaatccagtcacaatattttctctagcaactaatgagatgtggcgatcaggggatagtgaagtttaccaactgggtgatgtcagtcaaaagacaacatggcacagaatatcagtattccggccaggcctcagagacgtggcatatcaatatgtgaaaaaggggtctcgaatttatttggaagggaaaatagactatggtgaatacatggataaaaataatgtgaggcgacaagcaacaacaatcatagctgataatattatatttctgagtgaccagacgaaagagaaggagtagaaaggatgattcttctttggccatcatttggtacagtctcatttccaagtcatgtataatctttatggcttccaaggacaagaattaaaatactcttttacgtaaaa

SEQ ID NO: 311716 - DNA, 724 bp, Homo sapiens
  misc_feature (683)..(683): n is a, c, g, or t
tctggcgagcttggcgttccctgtgcgccggaagtgatcccctgcgtggctgggctgctcgggttagatcgtcagaaaagcctaaagattagactgtaagaaaagaaaatagaagccatgtttcgaagacctgtattacaggtacttcgtcagtttgtaagacatgagtccgaaacaactaccagtttggttcttgaaagatccctgaatcgtgtgcacttacttgggcgagtgggtcaggaccctgtcttgagacaggtggaaggaaaaaatccagtcacaatattttctctagcaactaatgagatgtggcgatcaggggatagtgaagtttaccaactgggtgatgtcagtcaaaagacaacatggcacagaatatcagtattccggccaggcctcagagacgtggcatatcaatatgtgaaaaaggggtctcgaatttatttggaagggaaaatagactatggtgaatacatggataaaaataatgtgaggcgacaagcaacaacaatcatagctgataatattatatttctgagtgaccagacgaaagagaaggagtagaaaggatgattcttctttggccatcatttggtacagtctcatttccaagtcatgtataatctttatggcttccaaggacaagaattaaaatactcttttacgtaaaacaccacaacacnaccaacaaaaaacctgtgcccgctcgcccccaaaacccacc

SEQ ID NO: 311717 - DNA, 721 bp, Homo sapiens
tctggcgagcttggcgttccctgtgcgccggaagtgatcccctgcgtggctgggctgctcgggttagatcgtcagaaaagcctaaagattagactgtaagaaaagaaaatagaagccatgtttcgaagacctgtattacaggtacttcgtcagtttgtaagacatgagtccgaaacaactaccagtttggttcttgaaagatccctgaatcgtgtgcacttacttgggcgagtgggtcaggaccctgtcttgagacaggtggaaggaaaaaatccagtcacaatattttctctagcaactaatgagatgtggcgatcaggggatagtgaagtttaccaactgggtgatgtcagtcaaaagacaacatggcacagaatatcagtattccggccaggcctcagagacgtggcatatcaatatgtgaaaaaggggtctcgaatttatttggaagggaaaatagactatggtgaatacatggataaaaataatgtgaggcgacaagcaacaacaatcatagctgataatattatatttctgagtgaccagacgaaagagaaggagtagaaaggatgattcttctttggccatcgacaaaactcaggctggagtgatggttttgcccaggatcatgaacttgtaaataatgcagatgggagcagacccaaattttttgactccgagtcttgtgcctctttcccagcaaatcctaagtatctcattg

SEQ ID NO: 311718 - DNA, 2640 bp, Homo sapiens
tctggcgagcttggcgttccctgtgcgccggaagtgatcccctgcgtggctgggctgctcgggttagatcgtcagaaaagcctaaagattagactgtaagaaaagaaaatagaagccatgtttcgaagacctgtattacaggtagtcacttgtctgtattaatactgagatgtattactatcagccacagtgatcagaagacttctttaggcttttaactacaggggcaaaagacctttgagctcacccacccacctctatactcatttgatatggaggattggggacgattttgccagtgtaaattatgttcactaaaacaaaaaaaaagttcaggtttattcacacgtaataggaatcattaatttttaaaatgtgtgtgtgttgcttgaatttaaccagtgagaggacattaaaggtctttagtgacctaaagactgtaggaatcattgttccaacttttttcttaaggcatgtagttgcttttttgaccatctacctcctgtgttgctaaacgttcctcttcccccatctttccacactgaagagagcatctcaagtctcagtggtcaccagagatttcactatgtagaaaatgccttctcattccacttagtatgggtcctcacttttccagacactagcccaccttgagccagcttagactaccatttttcctcacttaccacattcgggcaccagctcctgtagattcttctttggctctcctactccccatcctcctgtgaagaccaatgaagaaccagttcctccatgactctgtcattttccccaccttaatcctatattcttggatccccactttaacctgtatgtatctttaatctatttttttctgtattgaaatgtgaaacatgaaaaagttattgcttcttaacactaacgttacagtattaaaatgtctttaaataagagttaaaagtttaatttaaaaaattatccaagttaaataatcctttcctaatcttctccagtagatttttgtgtgccccaaatgagacattgttattataaatctctgtgtaagatttatgaggtctagcttgtctgagcactcaaatgacatttccagaatcatgacacaggttctcattagcagtttgattctatagtatgttgtactcatatctttattttcttatctgccctctgctcctaagtttagtgataggattagatagccaacagcaccctggggattggtgtttatttgattggtggacttctgctttttatattaacagtactgccacttcaaaaatgtttctctgatagaatggctagctctctgagctctgaattcagtgatgtgtactcccatctttacaggagctcttgaaattaaggaggcagcagagggcttcgggaaagcagtagcattggtgtcaagggccctgggtccttgagatcacttgccacatacttcctgcaggagcttgggcaggtgatgcagtctctctgaggtgttttctcagccctaaatgggaataattttacataacttgtagatttagttttagaattgataatagataaatcccttagctgatattcagtaatgattgctgctattatgtggtagtgactacctttgctgacagtgatgtgactttgacttggacagtcgagtctttgtgtttaatcaaagaaccaaatttattagaccttttttgatgcactaaaaacaggaaatttcctatgaaatatttataaaaactgtattaggctaagctcactactgaagctgtttaatttttgcaatagccttgtgaagtaggtattatgtatcataatttttgcttattttaaaatgaaacactttagattagtcatattaggtatcctaattccttttaaggtctgaaggagcaaccaggggaaggcagtttcatagacacagggaatctgactttggaatatgttcctgttgctgtgtcagaaagtcattcatgtgattagttttagaatgtattgttttgttggaatgtaacctatctctcgttctctaaaccagcagaccccaacctttttggcactgataactggtttcatggaagacaatttttccatggaggaggggggtgccgtggggatggtttcaagatgaaactgttccacctcagatcatcaggcattagttagattctcataaggagtgcacaccctagatccctcgcatgagcggtttataatggggttctgctcctgtgagaatctaatgccactgctgatctgacaggaggcggatcttggtcagtaatgcttgctcgctgcttgctgctcacctcctgctgtgcagccaggttcctaacaggccacagaactctactagtcctcagccctggaggttggggactctcctctaactggctgttcgttatgcctgagagtaaggctttgcatttattccacacctcctgacacttgtttgatcattgcatatgttattaatgaatctacttattaaattattaattataaagcatctcttttaactctcctttggtctaatgatggattaaatcagtacccatgttggatctaaatttcttaatttctaaagtctactgtaaccaaaatacagtagtaatataccagttgtttatactaaaaaaaaaa

SEQ ID NO: 311719 - DNA, 855 bp, Homo sapiens
tctggcgagcttggcgttccctgtgcgccggaagtgatcccctgcgtggctgggctgctcgggttagatcgtcaggtgagggaggaagggatagccagcgcgaaggaagtgctggagtcgtgtgttttggctgcgcgtgatcctgcgtgggtcgggaggtgtttctgtgtaggtgtctggccctttcatcagtcgtgcggaggaccgcgtgatttccttccagttctcctcggttttcaggtggtggcgccatcttcggaaaagcctaaagattagactgtaagaaaagaaaatagaagccatgtttcgaagacctgtattacaggtacttcgtcagtttgtaagacatgagtccgaaacaactaccagtttggttcttgaaagatccctgaatcgtgtgcacttacttgggcgagtgggtcaggaccctgtcttgagacaggtggaaggaaaaaatccagtcacaatattttctctagcaactaatgagatgtggcgatcaggggatagtgaagtttaccaactgggtgatgtcagtcaaaagacaacatggcacagaatatcagtattccggccaggcctcagagacgtggcatatcaatatgtgaaaaaggggtctcgaatttatttggaagggaaaatagactatggtgaatacatggataaaaataatgtgaggcgacaagcaacaacaatcatagctgataatattatatttctgagtgaccagacgaaagagaaggagtagaaaggatgattcttctttggccatcatttggtacagtctcatttccaagtcatgtataatctttatggcttccaaggacaagaattaaaatactcttttacgtaaaa

SEQ ID NO: 311720 - DNA, 654 bp, Homo sapiens
gaattcggcacgaggtgatcccctgcgtggctgggctgctcacccccagatcgtcaggaaaagcctaaagattagactgtaagaaaagaaaatagaagccatgtttcgaagacctgtattacaggtacttcgtcagtttgtaagacatgagtccgaaacaactaccagtttggttcttgaaagatccctgaatcgtgtgcacttacttgggcgagtgggtcaggaccctgtcttgagacaggtggaaggaaaaaatccagtcacaatattttctctagcaactaatgagatgtggcgatcaggggatagtgaagtttaccaactgggtgatgtcagtcaaaagacaacatggcacagaatatcagtattccggccaggcctcagagacgtggcatatcaatatgtgaaaaaggggtctcgaatttatttggaagggaaaatagactatggtgaatacatggataaaaataatgtgaggcgacaagcaacaacaatcatagctgataatattatatttctgagtgaccagacgaaagagaaggagtagaaaggatgattcttctttggccatcatttggtacagtctcatttccaagtcatgtataatctttatggcttccaaggacaagaattaaaatactcttttacgtaaaa

SEQ ID NO: 311721 - DNA, 957 bp, Homo sapiens
tctggcgagcttggcgttccctgtgcgccggaagtgatcccctgcgtggctgggctgctcgggttagatcgtcaggtgagggaggaagggatagccagcgcgaaggaagtgctggagtcgtgtgttttggctgcgcgtgatcctgcgtgggtcgggaggtgtttctgtgaaaagcctaaagattagactgtaagaaaagaaaatagaagccatgtttcgaagacctgtattacaggtacttcgtcagtttgtaagacatgagtccgaaacaactaccagtttggttcttgaaagatccctgaatcgtgtgcacttacttgggcgagtgggtcaggaccctgtcttgagacaggtggaaggaaaaaatccagtcacaatattttctctagcaactaatgagatgtggcgatcaggggatagtgaagtttaccaactgggtgatgtcagtcaaaagacaacatggcacagaatatcagtattccggccaggcctcagagacgtggcatatcaatatgtgaaaaaggggtctcgaatttatttggaagggaaaatagactatggtgaatacatggataaaaataatgtgaggcgacaagcaacaacaatcatagctgataatattatatttctgagtgaccagacgaaagagaaggagtagaaaggatgattcttctttggccatcatttggtacagtctcatttccaagtcatgtataatctttatggcttccaaggacaagaattaaaatactcttttacgtaaaaaaaaaaaggggggctagaaattctcgggggcagttgcggtccggtttggtaaggcccaagggggttatgagagcgggttaagctggtggaacgtgtggattggagcactggggggatggagccgaaagcggaaaaggtggaacgtggggggtggtaatcgaagtaggaaggagcggttatggaagagtaccc

SEQ ID NO: 311722 - DNA, 1029 bp, Homo sapiens
tctggcgagcttggcgttccctgtgcgccggaagtgatcccctgcgtggctgggctgctcgggttagatcgtcaggtgagggaggaagggatagccagcgcgaaggaagtgctggagtcgtgtgttttggctgcgcgtgatcctgcgtgggtcgggaggtgtttctgtgaaaagcctaaagattagactgtaagaaaagaaaatagaagccatgtttcgaagacctgtattacaggtacttcgtcagtttgtaagacatgagtccgaaacaactaccagtttggttcttgaaagatccctgaatcgtgtgcacttacttgggcgagtgggtcaggaccctgtcttgagacaggtggaaggaaaaaatccagtcacaatattttctctagcaactaatgagatgtggcgatcaggggatagtgaagtttaccaactgggtgatgtcagtcaaaagacaacatggcacagaatatcagtattccggccaggcctcagagacgtggcatatcaatatgtgaaaaaggggtctcgaatttatttggaagggaaaatagactatggtgaatacatggataaaaataatgtgaggcgacaagcaacaacaatcatagctgataatattatatttctgagtgaccagacgaaagagaaggagtagaaaggatgattcttctttggccatcatttggtacagtctcatttccaagtcatgtataatctttatggcttccaaggacaagaattaaaatactcttttacgtaaaaaaaaaaaaaaaaaaaaaaaaaaaaaaaaaaaaaaaaaaaaaaaaaaaaaaaaaaaaaaaaaaaaaaaaaaaaaaaaaaaaaaaaaaaaaaaaaaaaaaaaaaaaaaaaaaaaaatcaatctacaatataatcatcatttaataatctatatatcttatccattccactaattctcttctattctcctcatctctccatatttctccttttccactctttctcccctcttccttcctcttctctctccctttcttctcttttccc

SEQ ID NO: 311723 - DNA, 996 bp, Homo sapiens
  misc_feature (833)..(833): n is a, c, g, or t
  misc_feature (857)..(857): n is a, c, g, or t
  misc_feature (863)..(863): n is a, c, g, or t
  misc_feature (878)..(878): n is a, c, g, or t
tctggcgagcttggcgttccctgtgcgccggaagtgatcccctgcgtggctgggctgctcgggttagatcgtcaggtgagggaggaagggatagccagcgcgaaggaagtgctggagtcgtgtgttttggctgcgcgtgatcctgcgtgggtcgggaggtgtttctgtgaaaagcctaaagattagactgtaagaaaagaaaatagaagccatgtttcgaagacctgtattacaggtacttcgtcagtttgtaagacatgagtccgaaacaactaccagtttggttcttgaaagatccctgaatcgtgtgcacttacttgggcgagtgggtcaggaccctgtcttgagacaggtggaaggaaaaaatccagtcacaatattttctctagcaactaatgagatgtggcgatcaggggatagtgaagtttaccaactgggtgatgtcagtcaaaagacaacatggcacagaatatcagtattccggccaggcctcagagacgtggcatatcaatatgtgaaaaaggggtctcgaatttatttggaagggaaaatagactatggtgaatacatggataaaaataatgtgaggcgacaagcaacaacaatcatagctgataatattatatttctgagtgaccagacgaaagagaaggagtagaaaggatgattcttctttggccatcatttggtacagtctcatttccaagtcatgtataatctttatggcttccaaggacaagaattaaaatactcttttacgtaaaaaaaaaaaaaaaaaaaaaaaaaaaaaaaaaaaaaaaaaaaaaaaaaaaaaaaaaaaaaaaaaaaaaaanaaaaaaaaaaaaaaaaaaaaaaanaaaaantaaaataactattcntcttacactaattttctcctcctccaccacctctctatctcctctttctcttcatttctttactctctctcttctatttccatctatacctcatcccactatctattcttactattcc

SEQ ID NO: 311724 - DNA, 802 bp, Homo sapiens
  misc_feature (731)..(731): n is a, c, g, or t
  misc_feature (733)..(733): n is a, c, g, or t
tctggcgagcttggcgttccctgtgcgccggaagtgatcccctgcgtggctgggctgctcgggttagatcgtcaggtgagggaggaagggatagccagcgcgaaggaagtgctggagtcgtgtgttttggctgcgcgtgatcctgcgtgggtcgggaggtgtttctgtgaaaagcctaaagattagactgtaagaaaagaaaatagaagccatgtttcgaagacctgtattacaggtacttcgtcagtttgtaagacatgagtccgaaacaactaccagtttggttcttgaaagatccctgaatcgtgtgcacttacttgggcgagtgggtcaggaccctgtcttgagacaggtggaaggaaaaaatccagtcacaatattttctctagcaactaatgagatgtggcgatcaggggatagtgaagtttaccaactgggtgatgtcagtcaaaagacaacatggcacagaatatcagtattccggccaggcctcagagacgtggcatatcaatatgtgaaaaaggggtctcgaatttatttggaagggaaaatagactatggtgaatacatggataaaaataatgtgaggcgacaagcaacaacaatcatagctgataatattatatttctgagtgaccagacgaaagagaaggagtagaaaggatgattcttctttggccatcatttggtacagtctcatttccaagtcatgtataatctttatggcatancnctccagacagatatactctcttgtgttgctgtgtttggtcgtctggtgtgtgtgtgtgtctgagtttgt

SEQ ID NO: 311725 - DNA, 1970 bp, Homo sapiens
  misc_feature (1842)..(1842): n is a, c, g, or t
  misc_feature (1866)..(1866): n is a, c, g, or t
  misc_feature (1872)..(1872): n is a, c, g, or t
  misc_feature (1887)..(1887): n is a, c, g, or t
tctggcgagcttggcgttccctgtgcgccggaagtgatcccctgcgtggctgggctgctcgggttagatcgtcagaaaagcctaaagattagactgtaagaaaagaaaatagaagccatgtttcgaagacctgtattacaggtacttcgtcagtttgtaagacatgagtccgaaacaactaccagtttggttcttgaaagatccctgaatcgtgtgcacttacttgggcgagtgggtcaggaccctgtcttgagacaggtggaaggaaaaaatccagtcacaatattttctctagcaactaatgagatgtggcgatcaggggatagtgaagtttaccaactgggtgatgtcagtcaaaagacaacatggcacagaatatcagtattccggccaggcctcagagacgtggcatatcaatatgtgaaaaaggggtctcgaatttatttggaagggaaaatagactatggtgaatacatggataaaaataatgtgaggcgacaagcaacaacaatcatagctggtaagaagcttgtgaaaatagctgtttttttctttttctccttttcttttttaaaagcttggctacactgtaactaactagggttaagagtaccagtacttatgagttaaggcaactcactagaagatgtccataactcttatttctctacttgctaagagtttgtacatttatcccttcctttaaaaaattatttttatacttacagttttagtcacaagtaacttttgaataaagcctaaaactgaattatccatcccagtacttattgttgagaattacaaaaactctgaatgtattgtcttttggaaggatctagccctaaccaggaagaagcgtatgccaagataagaattacactaattgtgagtgtgcagatttattcggaacctctttggtacttagtatgtgaaatttctattgtgaaacttaagatttttttaatttctattttttcgagcctgggtgacagagactccatctccaaaggaaaaacaaaaagttattctgtattgtaatttaaaaataaaatttcttctatttgaatttttaaagttaaaaacgtaagtaaatcctgtcattgctaacagggccacatatggactcttactctttcctctagacccccagagtgtagaatgtgatacacttttgtccttttctctgaggatgtgctgcctagtgtcgtggaatctgcctgaccattgcaagcatccaattttgtgaccagttcttttgcaggaaattgtttctgagaagactggaagacaagaaatatcccacctcttctaacaagatctgaattgttcgaaaagcagccagtgcctaacttgtagctccacttatgccaactgtatatatacctctcgtgagcatagcaagtgatttaatattttgaaaagatggctaaaatccttttaatgaacagcactaaagttatatgtattagaggagaattattgaatgagatggagaaagagttctgaaattaatatttacattttggcttttttacagataatattatatttctgagtgaccagacgaaagagaaggagtagaaaggatgattcttctttggccatcatttggtacagtctcatttccaagtcatgtataatctttatggcttccaaggacaagaattaaaatactcttttacgtaaaaaaaaaaaaaaaaaaaaaaaaaaaaaaaaaaaaaaaaaaaaaaaaaaaaaaaaaaaaaaaaaaaaaaaaaaaaaaaaaaaaaaaaaaaaaaaaaaaaaaaaaaaaaaaaaaaaaaaaaaaaaaaaaaaaaaaaaaataaaaaaaaaaaaaaaaanaaaaaaaaaaaaaaaaaaaaaaanaaaaantaaaataactattcntcttttatctcttaccccccttcccattcttcttctcctctcttttatccctctattctccactcctcccctccctcctctcc

SEQ ID NO: 311726 - DNA, 1671 bp, Homo sapiens
gaattcggcacgaggtgatcccctgcgtggctgggctgctcacccccagatcgtcaggaaaagcctaaagattagactgtaagaaaagaaaatagaagccatgtttcgaagacctgtattacaggtacttcgtcagtttgtaagacatgagtccgaaacaactaccagtttggttcttgaaagatccctgaatcgtgtgcacttacttgggcgagtgggtcaggaccctgtcttgagacaggtggaaggaaaaaatccagtcacaatattttctctagcaactaatgagatgtggcgatcaggggatagtgaagtttaccaactgggtgatgtcagtcaaaagacaacatggcacagaatatcagtattccggccaggcctcagagacgtggcatatcaatatgtgaaaaaggggtctcgaatttatttggaagggaaaatagactatggtgaatacatggataaaaataatgtgaggcgacaagcaacaacaatcatagctggtaagaagcttgtgaaaatagctgtttttttctttttctccttttcttttttaaaagcttggctacactgtaactaactagggttaagagtaccagtacttatgagttaaggcaactcactagaagatgtccataactcttatttctctacttgctaagagtttgtacatttatcccttcctttaaaaaattatttttatacttacagttttagtcacaagtaacttttgaataaagcctaaaactgaattatccatcccagtacttattgttgagaattacaaaaactctgaatgtattgtcttttggaaggatctagccctaaccaggaagaagcgtatgccaagataagaattacactaattgtgagtgtgcagatttattcggaacctctttggtacttagtatgtgaaatttctattgtgaaacttaagatttttttaatttctattttttcgagcctgggtgacagagactccatctccaaaggaaaaacaaaaagttattctgtattgtaatttaaaaataaaatttcttctatttgaatttttaaagttaaaaacgtaagtaaatcctgtcattgctaacagggccacatatggactcttactctttcctctagacccccagagtgtagaatgtgatacacttttgtccttttctctgaggatgtgctgcctagtgtcgtggaatctgcctgaccattgcaagcatccaattttgtgaccagttcttttgcaggaaattgtttctgagaagactggaagacaagaaatatcccacctcttctaacaagatctgaattgttcgaaaagcagccagtgcctaacttgtagctccacttatgccaactgtatatatacctctcgtgagcatagcaagtgatttaatattttgaaaagatggctaaaatccttttaatgaacagcactaaagttatatgtattagaggagaattattgaatgagatggagaaagagttctgaaattaatatttacattttggcttttttacagataatattatatttctgagtgaccagacgaaagagaaggagtagaaaggatgattcttctttggccatcatttggtacagtctcatttccaagtcatgtataatctttatggcttccaaggacaagaattaaaatactcttttacgtaaaa

SEQ ID NO: 311727 - DNA, 1783 bp, Homo sapiens
gttgcctcgccggccccggttccccaggaccgcctccctcgtttctgcggcgaacattaccgaccttcctgctttaggccacagaacagttgccaaacgctgtccgtcgatcccgaatctcacccaccctcggctctcgttaggtgagggaggaagggatagccagcgcgaaggaagtgctggagtcgtgtgttttggctgcgcgtgatcctgcgtgggtcgggaggtgtttctgtgaaaagcctaaagattagactgtaagaaaagaaaatagaagccatgtttcgaagacctgtattacaggtacttcgtcagtttgtaagacatgagtccgaaacaactaccagtttggttcttgaaagatccctgaatcgtgtgcacttacttgggcgagtgggtcaggaccctgtcttgagacaggtggaaggaaaaaatccagtcacaatattttctctagcaaatggcacagaatatcagtattccggccaggcctcagagacgtggcatatcaatatgtgaaaaaggggtctcgaatttatttggaagggaaaatagactatggtgaatacatggataaaaataatgtgaggcgacaagcaacaacaatcatagctggtaagaagcttgtgaaaatagctgtttttttctttttctccttttcttttttaaaagcttggctacactgtaactaactagggttaagagtaccagtacttatgagttaaggcaactcactagaagatgtccataactcttatttctctacttgctaagagtttgtacatttatcccttcctttaaaaaattatttttatacttacagttttagtcacaagtaacttttgaataaagcctaaaactgaattatccatcccagtacttattgttgagaattacaaaaactctgaatgtattgtcttttggaaggatctagccctaaccaggaagaagcgtatgccaagataagaattacactaattgtgagtgtgcagatttattcggaacctctttggtacttagtatgtgaaatttctattgtgaaacttaagatttttttaatttctattttttcgagcctgggtgacagagactccatctccaaaggaaaaacaaaaagttattctgtattgtaatttaaaaataaaatttcttctatttgaatttttaaagttaaaaacgtaagtaaatcctgtcattgctaacagggccacatatggactcttactctttcctctagacccccagagtgtagaatgtgatacacttttgtccttttctctgaggatgtgctgcctagtgtcgtggaatctgcctgaccattgcaagcatccaattttgtgaccagttcttttgcaggaaattgtttctgagaagactggaagacaagaaatatcccacctcttctaacaagatctgaattgttcgaaaagcagccagtgcctaacttgtagctccacttatgccaactgtatatatacctctcgtgagcatagcaagtgatttaatattttgaaaagatggctaaaatccttttaatgaacagcactaaagttatatgtattagaggagaattattgaatgagatggagaaagagttctgaaattaatatttacattttggcttttttacagataatattatatttctgagtgaccagacgaaagagaaggagtagaaaggatgattcttctttggccatcatttggtacagtctcatttccaagtcatgtataatctttatggcttccaaggacaagaattaaaatactcttttacgtaaaa

SEQ ID NO: 311728 - DNA, 884 bp, Homo sapiens
gttgcctcgccggccccggttccccaggaccgcctccctcgtttctgcggcgaacattaccgaccttcctgctttaggccacagaacagttgccaaacgctgtccgtcgatcccgaatctcacccaccctcggctctcgttaggtgagggaggaagggatagccagcgcgaaggaagtgctggagtcgtgtgttttggctgcgcgtgatcctgcgtgggtcgggaggtgtttctgtgtaggtgtctggccctttcatcagtcgtgcggaggaccgcgtgatttccttccagttctcctcggttttcaggtggtggcgccatcttcggaaaagcctaaagattagactgtaagaaaagaaaatagaagccatgtttcgaagacctgtattacaggtacttcgtcagtttgtaagacatgagtccgaaacaactaccagtttggttcttgaaagatccctgaatcgtgtgcacttacttgggcgagtgggtcaggaccctgtcttgagacaggtggaaggaaaaaatccagtcacaatattttctctagcaactaatgagatgtggcgatcaggggatagtgaagtttaccaactgggtgatgtcagtcaaaagacaacatggcacagaatatcagtattccggccaggcctcagagacgtggcatatcaatatgtgaaaaaggggtctcgaatttatttggaagggaaaatagactatggtgaatacatggataataatattatatttctgagtgaccagacgaaagagaaggagtagaaaggatgattcttctttggccatcatttggtacagtctcatttccaagtcatgtataatctttatggcttccaaggacaagaattaaaatactcttttacgtaaaa

SEQ ID NO: 311729 - DNA, 517 bp, Homo sapiens
  misc_feature (354)..(354): n is a, c, g, or t
  misc_feature (378)..(378): n is a, c, g, or t
  misc_feature (384)..(384): n is a, c, g, or t
  misc_feature (399)..(399): n is a, c, g, or t
gcctactactactaaattcgcggccgcgtcgacgttagatcgtcagcactaaagttatatgtattagaggagaattattgaatgagatggagaaagagttctgaaattaatatttacattttggcttttttacagataatattatatttctgagtgaccagacgaaagagaaggagtagaaaggatgattcttctttggccatcatttggtacagtctcatttccaagtcatgtataatctttatggcttccaaggacaagaattaaaatactcttttacgtaaaaaaaaaaaaaaaaaaaaaaaaaaaaaaaaaaaaaaaaaaaaaaaaaaaaaaaaaaaaaaaaaaaaaaanaaaaaaaaaaaaaaaaaaaaaaanaaaaantaaaataactattcntcttacactaattttctcctcctccaccacctctctatctcctctttctcttcatttctttactctctctcttctatttccatctatacctcatcccactatctattcttactattcc

SEQ ID NO: 311730 - DNA, 989 bp, Homo sapiens
acctctccctatggtgtggctggctagcccgggggtctctacgctgcttggtctttgttaacggagatgaaggcagtaatttttcagtaacaggtttcagatataagtcccttggtgatgctaatatttatggaggccttactatgcattaagaacttttttagaagtttagaaaatggcagtgaataaagcagatacaaatctctgctctaagggagcttgcatagtaatgaaatttgagaagacagtggattggaagtgggattaactcagaatcaaaattttgtcgatgggttggaggaagaggaagttatttgggaccaaaaagacatacaggtgtgagtttatttgggagggaggaaggaatcctcatcagatgtgcaggaatgttggaaaagcctaaagattagactgtaagaaaagaaaatagaagccatgtttcgaagacctgtattacaggtacttcgtcagtttgtaagacatgagtccgaaacaactaccagtttggttcttgaaagatccctgaatcgtgtgcacttacttgggcgagtgggtcaggaccctgtcttgagacaggtggaaggaaaaaatccagtcacaatattttctctagcaactaatgagatgtggcgatcaggggatagtgaagtttaccaactgggtgatgtcagtcaaaagacaacatggcacagaatatcagtattccggccaggcctcagagacgtggcatatcaatatgtgaaaaaggggtctcgaatttatttggaagggaaaatagactatggtgaatacatggataaaaataatgtgaggcgacaagcaacaacaatcatagctgataatattatatttctgagtgaccagacgaaagagaaggagtagaaaggatgattcttctttggccatcatttggtacagtctcatttccaagtcatgtataatctttatggcttccaaggacaagaattaaaatactcttttacgtaaaa

SEQ ID NO: 311731 - DNA, 899 bp, Homo sapiens
  misc_feature (800)..(800): n is a, c, g, or t
tctggcgagcttggcgttccctgtgcgccggaagtgatcccctgcgtggctgggctgctcgggttagatcgtcaggtgagggaggaagggatagccagcgcgaaggaagtgctggagtcgtgtgttttggctgcgcgtgatcctgcgtgggtcgggaggtgtttctgtgaaaagcctaaagattagactgtaagaaaagaaaatagaagccatgtttcgaagacctgtattacaggtacttcgtcagtttgtaagacatgagtccgaaacaactaccagtttggttcttgaaagatccctgaatcgtgtgcacttacttgggcgagtgggtcaggaccctgtcttgagacaggtggaaggaaaaaatccagtcacaatattttctctagcaactaatgagatgtggcgatcaggggatagtgaagtttaccaactgggtgatgtcagtcaaaagacaacatggcacagaatatcagtattccggccaggcctcagagacgtggcatatcaatatgtgaaaaaggggtctcgaatttatttggaagggaaaatagactatggtgaatacatggataaaaataatgtgaggcgacaagcaacaacaatcatagctgataatattatatttctgagtgaccagacgaaagagaaggagtagaaaggatgattcttctttggccatcatttggtacagtctcatttccaagtcatgtataatctttatggcttccaaggacaagaattaaaatactcttttacgtaaaaaaaaaaaaaaaaaaaaaaaaaaaatgtgggggcgnccgaaatttaaaatttggggggggcagaaaaggtgagcaaaaacgggagggggttccaaaaaggggggggtgaaaggttgttggttaggaaccgcgggg

SEQ ID NO: 311732 - DNA, 827 bp, Homo sapiens
  misc_feature (740)..(740): n is a, c, g, or t
tctggcgagcttggcgttccctgtgcgccggaagtgatcccctgcgtggctgggctgctcgggttagatcgtcagaaaagcctaaagattagactgtaagaaaagaaaatagaagccatgtttcgaagacctgtattacaggtacttcgtcagtttgtaagacatgagtccgaaacaactaccagtttggttcttgaaagatccctgaatcgtgtgcacttacttgggcgagtgggtcaggaccctgtcttgagacaggtggaaggaaaaaatccagtcacaatattttctctagcaactaatgagatgtggcgatcaggggatagtgaagtttaccaactgggtgatgtcagtcaaaagacaacatggcacagaatatcagtattccggccaggcctcagagacgtggcatatcaatatgtgaaaaaggggtctcgaatttatttggaagggaaaatagactatggtgaatacatggataaaaataatgtgaggcgacaagcaacaacaatcatagctgataatattatatttctgagtgaccagacgaaagagaaggagtagaaaggatgattcttctttggccatcatttggtacagtctcatttccaagtcatgtataatctttatggcttccaaggacaagaattaaaatactcttttacgtaaaaaaaaaaaacaacaaaaaaacactttttggggcgctgggccccgaaaaatttttaaaccttcgttgggcncggggccccattgggtttagggacacgtggggcaaggggtcccaaggaaacccggggccggacctggggtgggtttccccattagag

SEQ ID NO: 311733 - DNA, 465 bp, Homo sapiens
tctggcgagcttggcgttccctgtgcgccggaagtgatcccctgcgtggctgggctgctcgggttagatcgtcagaaaagcctaaagattagactgtaagaaaagaaaatagaagccatgtttcgaagacctgtattacaggtacttcgtcagtttgtaagacatgagtccgaaacaactaccagtttggttcttgaaagatccctgaatcgtgtgcacttcgtgggcagcgctgcccacgaagtggctgcccacaagtggaaaaaaagcagtagacaaggaacagcaaataaatttatcttgcatgccactttcagtcaacaggatgtggctctctagatagctgtgtttagaaggaatctgaggcttcagcctcacacaggggaaagactactgcgattgatagcaatatccaacatctcactcaacccagaagaaaccaatggcacttcgtgggcagcgggt

SEQ ID NO: 311734 - DNA, 905 bp, Homo sapiens
gttgcctcgccggccccggttccccaggaccgcctccctcgtttctgcggcgaacattaccgaccttcctgctttaggccacagaacagttgccaaacgctgtccgtcgatcccgaatctcacccaccctcggctctcgttaggtgagggaggaagggatagccagcgcgaaggaagtgctggagtcgtgtgttttggctgcgcgtgatcctgcgtgggtcgggaggtgtttctgtgtaggtgtctggccctttcatcagtcgtgcggaggaccgcgtgatttccttccagttctcctcggttttcaggaaaagcctaaagattagactgtaagaaaagaaaatagaagccatgtttcgaagacctgtattacaggtacttcgtcagtttgtaagacatgagtccgaaacaactaccagtttggttcttgaaagatccctgaatcgtgtgcacttacttgggcgagtgggtcaggaccctgtcttgagacaggtggaaggaaaaaatccagtcacaatattttctctagcaactaatgagatgtggcgatcaggggatagtgaagtttaccaactgggtgatgtcagtcaaaagacaacatggcacagaatatcagtattccggccaggcctcagagacgtggcatatcaatatgtgaaaaaggggtctcgaatttatttggaagggaaaatagactatggtgaatacatggataaaaataatgtgaggcgacaagcaacaacaatcatagctgataatattatatttctgagtgaccagacgaaagagaaggagtagaaaggatgattcttctttggccatcatttggtacagtctcatttccaagtcatgtataatctttatggcttccaaggacaagaattaaaatactcttttacgtaaaa

SEQ ID NO: 311735 - DNA, 1047 bp, Homo sapiens
  misc_feature (919)..(919): n is a, c, g, or t
  misc_feature (943)..(943): n is a, c, g, or t
  misc_feature (949)..(949): n is a, c, g, or t
  misc_feature (964)..(964): n is a, c, g, or t
tctggcgagcttggcgttccctgtgcgccggaagtgatcccctgcgtggctgggctgctcgggttagatcgtcaggtgagggaggaagggatagccagcgcgaaggaagtgctggagtcgtgtgttttggctgcgcgtgatcctgcgtgggtcgggaggtgtttctgtgaaaagcctaaagattagactgtaagaaaagaaaatagaagccatgtttcgaagacctgtattacaggtacttcgtcagtttgtaagacatgagtccgaaacaactaccagtttggttcttgaaagatccctgaatcgtgtgcacttacttgggcgagtgggtcaggaccctgtcttgagacaggtggaaggaaaaaatccagtcacaatattttctctagcaactaatgagatgtggcgatcaggggatagtgaagtttaccaactgggtgatgtcagtcaaaagacaacatggcacagaatatcagtattccggccaggcctcagagacgtggcatatcaatatgtgaaaaaggggtctcgaatttatttggaagggaaaatagactatggtgaatacatggataaaaataatgtgaggcgacaagcaacaacaatcatagctgataatattatatttctgagtgaccagacgaaagagaaggagtagaaaggatgattcttctttggccatcatttggtacagtctcatttccaagtcatgtataatctttatggcttccaaggacaagaattaaaatactcttttacgtaaaaaaaaaaaaaaaaaaaaaaaaaaaaaaaaaaaaaaaaaaaaaaaaaaaaaaaaaaaaaaaaaaaaaaaaaaaaaaaaaaaaaaaaaaaaaaaaaaaaaaaaaaaaaaaaaaaaaaaaaaaaaaaaaaaaaaaaaaataaaaaaaaaaaaaaaaanaaaaaaaaaaaaaaaaaaaaaaanaaaaantaaaataactattcntcttttatctcttaccccccttcccattcttcttctcctctcttttatccctctattctccactcctcccctccctcctctcc

SEQ ID NO: 311736 - DNA, 1006 bp, Homo sapiens
tctggcgagcttggcgttccctgtgcgccggaagtgatcccctgcgtggctgggctgctcgggttagatcgtcaggtgagggaggaagggatagccagcgcgaaggaagtgctggagtcgtgtgttttggctgcgcgtgatcctgcgtgggtcgggaggtgtttctgtgaaaagcctaaagattagactgtaagaaaagaaaatagaagccatgtttcgaagacctgtattacaggtacttcgtcagtttgtaagacatgagtccgaaacaactaccagtttggttcttgaaagatccctgaatcgtgtgcacttacttgggcgagtgggtcaggaccctgtcttgagacaggtggaaggaaaaaatccagtcacaatattttctctagcaactaatgagatgtggcgatcaggggatagtgaagtttaccaactgggtgatgtcagtcaaaagacaacatggcacagaatatcagtattccggccaggcctcagagacgtggcatatcaatatgtgaaaaaggggtctcgaatttatttggaagggaaaatagactatggtgaatacatggataaaaataatgtgaggcgacaagcaacaacaatcatagctgataatattatatttctgagtgaccagacgaaagagaaggagtagaaaggatgattcttctttggccatcatttggtacagtctcatttccaagtcatgtataatctttatggcttccaaggacaagaattaaaatactcttttacgtaaaaaaaaaaaaaaaaaaaaaaaaaaaaaaaaaaaaaaaaaaaaaaaaaaaaaaaaaaaaaaaaaaaaaatataaataaatatccttcttatacttctcttttctactttattatctactcctcttttcttatttttactctaaccctacaacttcttcttcattctcttccacttatcttccatcttctcttctcttctaccttatatcactatttctcctccacattttctctccaccttccc

SEQ ID NO: 311737 - DNA, 1688 bp, Homo sapiens
tctggcgagcttggcgttccctgtgcgccggaagtgatcccctgcgtggctgggctgctcgggttagatcgtcagaaaagcctaaagattagactgtaagaaaagaaaatagaagccatgtttcgaagacctgtattacaggtacttcgtcagtttgtaagacatgagtccgaaacaactaccagtttggttcttgaaagatccctgaatcgtgtgcacttacttgggcgagtgggtcaggaccctgtcttgagacaggtggaaggaaaaaatccagtcacaatattttctctagcaactaatgagatgtggcgatcaggggatagtgaagtttaccaactgggtgatgtcagtcaaaagacaacatggcacagaatatcagtattccggccaggcctcagagacgtggcatatcaatatgtgaaaaaggggtctcgaatttatttggaagggaaaatagactatggtgaatacatggataaaaataatgtgaggcgacaagcaacaacaatcatagctggtaagaagcttgtgaaaatagctgtttttttctttttctccttttcttttttaaaagcttggctacactgtaactaactagggttaagagtaccagtacttatgagttaaggcaactcactagaagatgtccataactcttatttctctacttgctaagagtttgtacatttatcccttcctttaaaaaattatttttatacttacagttttagtcacaagtaacttttgaataaagcctaaaactgaattatccatcccagtacttattgttgagaattacaaaaactctgaatgtattgtcttttggaaggatctagccctaaccaggaagaagcgtatgccaagataagaattacactaattgtgagtgtgcagatttattcggaacctctttggtacttagtatgtgaaatttctattgtgaaacttaagatttttttaatttctattttttcgagcctgggtgacagagactccatctccaaaggaaaaacaaaaagttattctgtattgtaatttaaaaataaaatttcttctatttgaatttttaaagttaaaaacgtaagtaaatcctgtcattgctaacagggccacatatggactcttactctttcctctagacccccagagtgtagaatgtgatacacttttgtccttttctctgaggatgtgctgcctagtgtcgtggaatctgcctgaccattgcaagcatccaattttgtgaccagttcttttgcaggaaattgtttctgagaagactggaagacaagaaatatcccacctcttctaacaagatctgaattgttcgaaaagcagccagtgcctaacttgtagctccacttatgccaactgtatatatacctctcgtgagcatagcaagtgatttaatattttgaaaagatggctaaaatccttttaatgaacagcactaaagttatatgtattagaggagaattattgaatgagatggagaaagagttctgaaattaatatttacattttggcttttttacagataatattatatttctgagtgaccagacgaaagagaaggagtagaaaggatgattcttctttggccatcatttggtacagtctcatttccaagtcatgtataatctttatggcttccaaggacaagaattaaaatactcttttacgtaaaa

SEQ ID NO: 311738 - DNA, 871 bp, Homo sapiens
tctggcgagcttggcgttccctgtgcgccggaagtgatcccctgcgtggctgggctgctcgggttagatcgtcaggtgagggaggaagggatagccagcgcgaaggaagtgctggagtcgtgtgttttggctgcgcgtgatcctgcgtgggtcgggaggtgtttctgtgaaaagcctaaagattagactgtaagaaaagaaaatagaagccatgtttcgaagacctgtattacaggtacttcgtcagtttgtaagacatgagtccgaaacaactaccagtttggttcttgaaagatccctgaatcgtgtgcacttacttgggcgagtgggtcaggaccctgtcttgagacaggtggaaggaaaaaatccagtcacaatattttctctagcaactaatgagatgtggcgatcaggggatagtgaagtttaccaactgggtgatgtcagtcaaaagacaacatggcacagaatatcagtattccggccaggcctcagagacgtggcatatcaatatgtgaaaaaggggtctcgaatttatttggaagggaaaatagactatggtgaatacatggataaaaataatgtgaggcgacaagcaacaacaatcatagctgataatattatatttctgagtgaccagacgaaagagaaggagtagaaaggatgattcttctttggccatcggattctgacacagccagcagcagtacgtgttcatcagcactgaagcagggcacctcctgattcagcagagagaccctcccctccccagccatgttggcggctgccctaggattgctgatgcccattgcaggggctgaatttctcattggcctggttggaaatggagtccctgtggtctgcagtttta

SEQ ID NO: 311739 - DNA, 689 bp, Homo sapiens
  misc_feature (523)..(523): n is a, c, g, or t
  misc_feature (543)..(543): n is a, c, g, or t
  misc_feature (581)..(581): n is a, c, g, or t
  misc_feature (616)..(616): n is a, c, g, or t
  misc_feature (674)..(675): n is a, c, g, or t
tctggcgagcttggcgttccctgtgcgccggaagtgatcccctgcgtggctgggctgctcgggttagatcgtcagaaaagcctaaagattagactgtaagaaaagaaaatagaagccatgtttcgaagacctgtattacaggtacttcgtcagtttgtaagacatgagtccgaaacaactaccagtttggttcttgaaagatccctgaatcgtgtgcacttacttgggcgagtgggtcaggaccctgtcttgagacaggtggaaggaaaaaatccagtcacaatattttctctagcaactaatgagatgtggcgatcaggggatagtgaagtttaccaactgggtgatgtcagtcaaaagacaacatggcacagaatatcagtattccggccaggcctcagagacgtggcatatcaatatgtgaaaaaggggtctcgaatttatttggaagggaaaatagactatggtgaatacatggataaaaataatgtgaggcgacaagcaacaacaatcatagctgatnaatattattatttcttgagntggaccccagacgacaaagaagaaaggggagttagaanagggaaatgattctttctttttggcccaatcaatnttgggttgacacgttcctctcatttctctccaaagttccgttgtcaatataattcctnnttatcccgcctctc

SEQ ID NO: 311740 - DNA, 766 bp, Homo sapiens
gttgcctcgccggccccggttccccaggaccgcctccctcgtttctgcggcgaacattaccgaccttcctgctttaggccacagaacagttgccaaacgctgtccgtcgatcccgaatctcacccaccctcggctctcgttaggtgagggaggaagggatagccagcgcgaaggaagtgctggagtcgtgtgttttggctgcgcgtgatcctgcgtgggtcgggaggtgtttctgtgaaaagcctaaagattagactgtaagaaaagaaaatagaagccatgtttcgaagacctgtattacaggtacttcgtcagtttgtaagacatgagtccgaaacaactaccagtttggttcttgaaagatccctgaatcgtgtgcacttacttgggcgagtgggtcaggaccctgtcttgagacaggtggaaggaaaaaatccagtcacaatattttctctagcaaatggcacagaatatcagtattccggccaggcctcagagacgtggcatatcaatatgtgaaaaaggggtctcgaatttatttggaagggaaaatagactatggtgaatacatggataaaaataatgtgaggcgacaagcaacaacaatcatagctgataatattatatttctgagtgaccagacgaaagagaaggagtagaaaggatgattcttctttggccatcatttggtacagtctcatttccaagtcatgtataatctttatggcttccaaggacaagaattaaaatactcttttacgtaaaa

SEQ ID NO: 311741 - DNA, 329 bp, Homo sapiens
gtaggcagggctggactgtaagtctaggcagacagtatctgaagtccgagatgcccaagggttagcccaaatagcagaattgatctttgcccctaagagagtctttttggtctctactcagtgttatattttgttctgggtgacagccctgagcccacaggaatagaacaaaaagagagaggaagaaaagaggctgaccagtgaatgttatttatgagggctggtaagcaacattgcttaacttaatgtcagatgtttttgacattgctctaagttgtgcatgaaagaaattacaaggcctcagaattatttgcccaagtgtattcttt

SEQ ID NO: 311742 - DNA, 16379 bp, Homo sapiens
cgcgcggccccctccagcccccggctcccggcagcagaagcagaaggcagcgccaggggccgccgccgccgccgagctccgcggggctcgggagccggccccggcgaggaggcgcggaaccatggccgatgggggcgagggcgaagacgagatccagttcctgcgaactgatgatgaagtggttctgcagtgcaccgcaaccatccacaaagaacaacagaagctatgcttggcagcagaaggatttggcaacagactttgtttcttggagtccacttccaattccaagaatgtgcccccagacctctccatctgcacctttgtgctggagcagtccctctctgtccgggcgctgcaggagatgctggctaacaccgtggagaaatcagaagggcaagttgatgtggaaaaatggaaattcatgatgaagactgctcaaggtggtggtcatcgaacactcctctacggacatgccatattgctgcgccattcctatagtggcatgtatctgtgctgcctgtccacctcccggtcttcaactgataagctggcttttgatgttggcttgcaagaggacaccacaggggaggcttgttggtggaccatacaccctgcctctaagcagcgatcagaaggagaaaaagtacgagttggagatgacctcatcttagttagcgtgtcctctgaaaggtacttgcacttgtcttatggcaacggcagcttacacgtggatgccgctttccagcagactctctggagcgtggccccaatcagctcaggaagtgaggcagcccaagggtatctcattggtggtgatgtcctcaggttgctgcatggacacatggacgagtgtctcactgtcccttcaggagaacatggtgaagagcagcggagaactgttcattatgaaggtggcgctgtgtctgttcatgcacgttccctttggagactagagacgctaagagttgcgtggagtggaagccacataagatggggacagccattccgactacgccatgtcacaacaggaaaatacttgagtctcatggaagacaaaaaccttctactcatggacaaagagaaagctgatgtaaaatcaacagcatttaccttccggtcttccaaggaaaaattggatgtaggggtgagaaaagaagtagatggcatgggaacatctgaaataaaatacggtgactcagtatgctatatacaacatgtagacacaggcctatggcttacttaccagtctgtggacgtgaaatccgtgagaatgggatctatacaacgtaaggctattatgcatcatgaaggccacatggatgatggcataagtttgtcgagatcccagcatgaagaatcacgcacagcccgagttatccggagcacagtcttccttttcaatagatttataaggggccttgatgctctcagcaagaaagcgaaggcttccacagtcgatttgcctatagagtccgtaagcctaagtctgcaggatctcattggctacttccaccccccagatgagcatttagagcatgaagacaaacagaacagactacgagccctgaagaatcggcaaaatctcttccaggaagagggaatgatcaacctcgtgcttgagtgcatagaccgtttgcacgtctacagcagtgcagcacactttgctgatgttgctgggcgagaagcaggagagtcttggaaatccattctgaattctctgtatgagttgctggcggctctaattagaggaaatcgtaaaaactgtgctcaattttctggctccctcgactggttgatcagcagattggaaagactggaagcttcttcaggcattctggaagttttacactgtgttttagtagaaagtccagaagctctaaatattattaaagaaggacatattaaatctattatctcacttttagacaaacatggaagaaatcacaaggttctggatgtcttgtgctcactctgtgtttgccacggggttgcagtccgttctaaccagcatctcatctgtgacaatctcctaccaggaagagacttgttattgcagacacgtcttgtgaaccatgtcagcagcatgagacccaatatttttctgggcgtcagtgaaggttctgctcagtataagaaatggtactatgaattgatggtggaccacacagagccctttgtgacagctgaagcaactcacctgcgagtgggctgggcttccactgaaggatattctccctaccctggagggggcgaagagtggggtggaaatggtgttggagatgatctcttctcctatggatttgatggccttcatctctggtcaggttgtattgctcgtactgtaagctcaccaaaccaacatctgttaagaactgatgatgtcatcagttgctgtttagatctgagtgccccaagcatctcgttccgaattaatggacaacctgttcaaggaatgtttgagaatttcaacatcgatggcctcttctttccagtcgttagtttctctgcaggaataaaagtacgctttctgcttggagggcgacatggagaattcaaatttcttcctccacctgggtatgctccttgttatgaagctgttctgccaaaagaaaagttgaaagtggaacacagccgagagtacaagcaagaaagaacttacacacgcgacctgctgggccccacagtttccctgacgcaagctgccttcacacccatccctgtggataccagccagatcgtgttgcctcctcatctagaaagaataagagaaaaactggcagagaatatccatgaactctgggttatgaataaaattgagcttggctggcagtatggtccggttagagatgacaacaagagacaacacccatgcctggtggagttctccaagctgcctgaacaggagcgcaattacaacttacaaatgtcgcttgagaccctgaagactttgttggcattaggatgtcatgtgggtatatcagatgaacatgctgaagacaaggtgaaaaaaatgaagctacccaagaattaccagctgacaagtggatacaagcctgcccctatggacctgagctttatcaaactcaccccatcgcaagaagcaatggtggacaagttggcagaaaatgcacataatgtgtgggcgcgggatcgaatccggcagggctggacttatggcatccaacaggacgtaaagaacagaagaaatcctcgccttgttccctacactcctctggatgaccgaaccaagaaatccaacaaggacagcctccgcgaggctgtgcgcacgctgctggggtacggctacaacttggaagcaccagatcaagatcatgcagccagagccgaagtgtgcagcggcaccggggaaaggttccgaatcttccgtgccgagaagacctatgcagtgaaggccggacggtggtattttgaatttgagacggtcactgctggagacatgagggttggttggagtcgtcctggttgtcaaccggatcaggagcttggctcagatgaacgtgcctttgcctttgatggcttcaaggcccagcggtggcatcagggcaatgaacactatgggcgctcttggcaagcaggcgatgtcgtggggtgtatggttgacatgaacgaacacaccatgatgttcacactgaatggtgaaatccttcttgatgattcaggctcagaactggctttcaaggactttgatgttggcgatggattcatacctgtgtgtagccttggagtggctcaagtgggtaggatgaactttggaaaggatgtcagcaccttgaaatatttcaccatctgtggcttacaagagggctatgaaccatttgccgttaatacaaacagggatattaccatgtggctgagcaagaggcttcctcagtttcttcaagttccatcaaaccatgaacatatagaggtgaccagaatagacggcaccatagacagttccccatgtttaaaggtcactcagaagtcttttggttctcagaacagcaacactgatatcatgttttatcgcctgagcatgccgatcgagtgcgcggaggtcttctccaagacggtggctggagggctccctggggctggcctttttgggcccaagaatgacttggaagattatgatgctgattctgactttgaggttctgatgaagacagctcatggccatctagtgcccgatcgtgttgacaaagacaaagaagctactaaaccagagtttaacaaccacaaagattatgcccaggaaaagccctctcgtctgaaacaaagatttttgcttagaagaacaaagccagattacagcacaagccattctgcaagactcaccgaagatgtccttgctgatgatcgggatgactatgatttcttgatgcaaacgtccacgtactattactcagtgagaatctttcctggacaagaacctgctaatgtctgggtgggctggattacatcagatttccatcagtatgacacaggctttgacttggacagagttcgcacagtaacagttactctaggagatgaaaaaggaaaagtgcatgaaagcatcaaacgcagcaactgctatatggtatgtgcgggtgagagcatgagccccgggcaaggacgcaacaataatggactggagattggctgtgtggtggatgctgccagcgggctgctcacattcattgccaatggcaaggaactgagcacatactatcaggtggaaccgagtacaaaattatttcctgcggtttttgcacaagctacaagtcccaatgttttccagtttgagttgggaagaataaagaatgtgatgcctctctcggcgggattattcaagagtgagcacaagaaccccgtgccgcagtgccccccgcgcctccacgtgcagttcctgtcacacgtcctgtggagcagaatgcccaaccagtttttgaaggtagatgtgtctcgaataagtgaacgccaaggctggttggtgcagtgtttggatcctctgcagttcatgtctcttcatatccctgaggaaaacagatctgttgacatcttagagttgacagagcaggaggaattgctgaaatttcactatcacactctccggctctactcagccgtctgtgctcttgggaaccaccgggtggcccatgccctgtgcagccatgtggatgaacctcagctcctctatgccattgagaacaagtacatgcctggtttgctgcgtgctggctactatgacctgctgattgacatccacctgagctcctatgccactgccaggctcatgatgaacaacgagtacattgtccccatgacggaggagacgaagagcatcaccctgttccctgatgagaacaaaaaacacggccttccagggatcggcctcagcacctccctcaggccacggatgcagttttcctcccccagttttgtaagcattagtaatgaatgttaccagtacagtccagagttcccactggacatcctcaagtccaaaaccatacagatgctgacagaagctgttaaagagggcagtcttcatgcccgggacccagttggagggactactgaattcctctttgtacctctcatcaagcttttctataccctgctgatcatgggcatctttcacaacgaggacttgaagcacatcttgcagttgattgagcccagtgtgtttaaagaagctgccactccggaggaggagagtgacacgctggagaaagagctcagtgtggacgatgcaaagctgcaaggagctggtgaggaagaagccaaggggggcaagcggcccaaggaaggcctgctccaaatgaaactgccagagccagttaaattgcagatgtgcctactgcttcagtacctctgtgactgccaggtccggcaccggatagaagccattgtagccttttcagatgattttgtggctaagctccaagacaatcaacgtttccgatacaacgaagtcatgcaagccttaaacatgtcagctgcactcacagccaggaagacaaaggaatttagatcaccacctcaagaacagatcaatatgcttctcaattttaaggatgacaaaagtgaatgtccatgtccagaagaaattcgtgaccaactattggatttccatgaagatttgatgacacattgtggaattgagctggatgaagatgggtctctggatggaaacagtgatttaacaattagagggcgtctgctatccctggtagaaaaggtgacatatctgaagaagaagcaagcagaaaaaccagttgagagtgactccaaaaagtcctccactctgcagcagctgatttctgagaccatggtccgatgggctcaggagtctgtcattgaagaccccgagctggtgagggccatgtttgtgttgctccatcggcagtatgacggcattgggggtcttgttcgggccctgccaaagacctacacgataaatggtgtgtccgtggaggacaccatcaacctgctggcatcccttggtcagattcggtccctgctgagtgtgagaatgggcaaagaagaagagaagctcatgattcgtggattaggggatattatgaataacaaagtgttttaccagcaccctaatctcatgagggcactggggatgcacgagactgtgatggaggtcatggtgaacgtccttggaggtggagagtccaaggaaatcacctttcccaagatggtggccaactgttgccgttttctctgttacttctgtcgtataagtaggcagaatcaaaaagctatgtttgatcatctcagttatttactggaaaacagcagtgttggtcttgcctccccagctatgagaggttcaacaccactggatgtggctgcagcttcggtgatggataataatgaactagcattagctctgcgtgagccggatctagaaaaggtagttcgttatttggctggttgtggactgcaaagttgccagatgctggtgtctaagggctatccagacattgggtggaacccagttgaaggagagagatatcttgactttctcagatttgctgtcttctgtaatggggagagtgtggaggaaaatgcaaatgtcgtggtgagattgctcattcggaggcctgagtgttttggtcctgctttgagaggagaaggtgggaatgggcttcttgcagcaatggaagaagccatcaaaatcgccgaggatccttcccgagatggtccctcaccaaatagcggatccagtaaaacacttgacacagaggaggaggaagatgacactatccacatggggaacgcgatcatgaccttctattcagctttgattgacctcttgggacgctgtgctcctgagatgcatttgattcatgccgggaagggagaagccatcagaattaggtccattttgagatccctcattcccctgggagatttggtgggcgttatcagcatcgcttttcagatgccaacaatagccaaagatgggaatgtggtggaacctgacatgtctgcggggttttgcccagatcacaaggcagccatggttttattccttgacagggtctatgggattgaggttcaagacttcctcctccatcttcttgaggttggctttctgccagatctccgggcggctgcttctttagatacggcagctttgagtgctacagacatggccttggccctcaatcggtacctttgcacagccgtcttgccattgttaacaagatgtgctcctctctttgctggcacagagcaccacgcttctctcattgactcattacttcatactgtgtatagactttctaagggctgttcacttaccaaagctcagcgggattccatagaagtttgtttactctctatttgtggacaactgagaccttctatgatgcagcacttactcagaagattagtatttgatgtcccattattaaatgaacacgcaaagatgcctcttaaactgctgacaaatcattatgaaagatgctggaaatattactgcctgcctggagggtggggaaactttggtgctgcctcagaagaagaacttcatttatcaagaaagttgttctggggcatttttgatgccctgtctcaaaagaaatatgaacaagaacttttcaaactggcactgccttgcctgagtgcagttgcgggagctttgcctccagactacatggagtcaaattatgtcagtatgatggaaaaacagtcatcaatggattctgaagggaactttaacccacaacctgttgatacctcaaatattacaattcctgagaaattggaatacttcattaacaaatatgcagaacactcccatgacaaatggtcaatggacaagttggcaaatggatggatttatggagaaatatattcagactcttctaaggttcagccattaatgaagccatataagctattgtctgaaaaggaaaaagaaatttatcgctggccaatcaaagaatctttaaaaactatgctggctaggactatgagaactgaaagaactcgggagggagacagcatggccctttacaaccggactcgtcgtatttctcagacaagccaggtttctgtggacgctgcccatggttacagtccccgggccattgacatgagcaatgttacactatctagagacctgcatgctatggcagaaatgatggctgaaaactaccataatatatgggcaaagaaaaagaaaatggagttggagtccaaaggaggaggaaaccatcctctgctggtgccctatgatacactgacagccaaagagaaagccaaggatagagaaaaagcacaggacatcctcaagttcttgcagatcaatggatatgctgtatccagaggatttaaggacctggaactggacacgccttctattgagaaacgatttgcctatagtttcctccaacaactcattcgctatgtggatgaagcccatcagtatatcctggagtttgatggtggcagcagaggcaaaggagaacatttcccttatgaacaagaaatcaagttctttgcaaaagtcgttcttcctttaattgatcagtatttcaaaaaccatcgtttatacttcttatctgcagcaagcagacctctctgctctggaggacatgcttccaacaaagagaaagaaatggtgactagcctattctgcaaacttggagttcttgtcaggcataggatttcactatttggcaatgatgcaacatcaattgtcaactgtcttcatattttgggtcagactttggatgcaaggacagtgatgaagactggcctggagagtgttaaaagtgcactcagagcttttctggacaacgctgcagaggatctggagaagaccatggaaaacctcaagcagggccagttcactcacacccgaaaccagcccaaaggggttactcagattatcaattacaccacagtggccctgctgccaatgctgtcgtcattatttgaacatattggccagcatcagttcggagaagacctaatattggaagatgtccaggtgtcttgttatagaattctgactagcttatatgctttgggaaccagcaagagtatttacgtggagaggcaacgttctgcattaggagaatgtctagctgcctttgctggtgcttttcctgtagcatttttggaaactcatctggacaaacataatatttactccatctacaataccaagtcttcacgagaaagagcagctctcagtttgccaactaatgtggaagatgtttgtccaaacattccgtctttggagaaactcatggaagaaatcgtggaattagccgagtccggcattcgctacactcaaatgccacatgtcatggaagtcatactgcccatgctttgcagctacatgtctcgttggtgggagcatggacctgagaacaatccagaacgggccgagatgtgctgcacagccctgaactcagagcacatgaacacacttctagggaacatattgaaaatcatatataataacttggggattgatgagggagcctggatgaagaggctagcagtgttttcccagcctataataaataaagtgaaacctcagctcttgaaaactcatttcttgccgttaatggagaaactcaagaaaaaggcagctacggtggtgtctgaggaagaccacctgaaagctgaggccaggggggacatgtcggaggcagaactcctcatcctagatgagttcaccacactggccagagatctctatgccttctaccctctcttgattagatttgtggactataacagggcaaagtggctaaaggagcctaacccagaagcagaggagctcttccgcatggtggctgaagtgtttatctactggtcgaagtcccataatttcaaaagagaagagcagaacttcgttgtacagaatgaaatcaacaatatgtctttccttattactgataccaagtcaaagatgtcaaaggcagctgtttctgatcaggaaaggaagaaaatgaagcgcaaaggagatcggtattccatgcagacctctctgattgtagcagctctgaagcggttactgcccattgggttgaacatctgtgcccctggggaccaggagctcattgctctggccaaaaatcgatttagcctgaaagatactgaggatgaagtacgagatataatccgcagcaatattcatttacaaggcaagttggaggatcctgctattagatggcaaatggctctttacaaagacttaccaaacaggactgatgatacctcagatccagagaagacggtagaaagagtattggatatagcaaatgtgctttttcatcttgaacagaagtctaaacgtgtgggtcgaagacattactgtctggtggaacatcctcagagatctaaaaaggctgtatggcataaactactgtctaagcagaggaaaagggctgttgtagcctgcttccggatggcccccttatataatctgccaaggcatcgggctgtcaatctctttcttcagggatatgaaaagtcttggattgaaacagaagaacattactttgaagataaactgatagaagatttagcaaaacctggggctgaacctccagaagaagatgaaggcactaagagagttgatcctctacatcagctgatccttctgtttagtcggacagctttaacagagaaatgcaaactggaggaagattttttatatatggcctatgcagatattatggcaaagagttgtcatgatgaggaagatgacgatggtgaagaggaagtgaagagttttgaagaaaaagaaatggaaaagcaaaagcttctataccagcaagcccgactccacgatcgtggcgcggctgagatggtgctacagacaatcagtgccagcaaaggtgaaactggaccaatggtagcagctactctgaaacttggaattgctattttaaatggtgggaactccacagtacagcagaaaatgcttgactacctcaaggagaaaaaggatgtgggcttctttcagagcctggccggcctgatgcagtcatgtagtgtccttgacctaaatgcatttgagcgacaaaacaaagctgaaggtcttgggatggtgacagaggaaggatcaggagaaaaggttctgcaggacgatgagttcacctgtgacctcttccgattcctgcaactactctgtgagggacacaactcagattttcagaattatctgagaactcagactggcaataatacaactgtcaacataattatctccactgtagactacctactgagagttcaggaatcaattagtgacttttattggtattactctgggaaagatgttattgatgaacaaggacaacggaatttctccaaagctatccaagtggcaaaacaagtctttaacactcttacagagtatattcagggtccttgcactgggaatcaacagagtttggcacacagcaggctgtgggatgctgtggtcggctttcttcatgtgtttgcccatatgcagatgaagctgtcgcaggattccagtcaaattgagctattaaaagaattaatggatctgcagaaggatatggtggtcatgttgctgtccatgttagaaggtaatgttgttaatggaacgattggcaaacagatggtggatatgcttgtggaatcttccaacaacgtggagatgattctcaaattttttgacatgttcttaaaactaaaggatttgacgtcgtctgatacttttaaagaatatgaccccgatggcaagggagtcatttccaagagggacttccacaaagcgatggagagccataagcactacacgcagtcagaaacggaatttcttttgtcttgtgcggagacggatgagaatgaaaccctcgactacgaagagttcgtcaaacgcttccacgaacctgcgaaggacatcggcttcaacgtcgccgtccttctgacaaacctctctgagcacatgcccaacgatacccgacttcagacttttctggaattagcagagagcgtcctgaattatttccagccctttctgggccgcatcgaaatcatgggaagcgccaaacgcatcgagagggtctattttgaaatcagtgagtccagccgaacccagtgggagaagccccaggtcaaggagtccaaaagacagttcatatttgacgtggtcaacgaaggcggagagaaagagaagatggaactctttgtgaacttctgcgaggacaccatctttgaaatgcagctggcggctcagatctcggagtcggacttgaacgagaggtcagcgaataaggaagaaagcgagaaggagaggccggaagagcaggggccgaggatggctttcttctccattctgacggtcaggtcggccctgtttgcgctcaggtacaatatcttgacccttatgcgaatgctcagtctgaagagcctgaagaagcagatgaaaaaagtaaaaaagatgaccgtgaaggacatggtcacggccttcttttcatcctactggagtattttcatgaccctcttgcacttcgtggccagcgttttcagaggctttttccgcatcatttgcagcctgctgcttgggggaagcctcgtcgaaggtgctaaaaagatcaaagttgcagaactgttagccaacatgccagaccccactcaggatgaggttagaggagatggggaggagggagagaggaaacccctggaagccgccctgccctccgaggatctgaccgacttaaaggagctgacagaggaaagtgaccttctttcggacatctttggcctggatctgaagagagaaggaggacagtacaaactgattcctcataatccaaatgctgggctcagtgacctcatgagcaacccagtccccatgcctgaggtgcaggaaaaatttcaggaacagaaggcaaaagaagaagaaaaggaagaaaaagaagaaaccaaatctgaacctgaaaaagccgagggagaagatggagaaaaagaagagaaagccaaggaagacaagggcaaacaaaagttgaggcagcttcacacacacagatacggagaaccagaagtgccagagtcagcattctggaagaaaatcatagcatatcaacagaaacttctaaactattttgctcgcaacttttacaacatgagaatgttagccttatttgtcgcatttgctatcaatttcatcttgctcttttataaggtctccacttcttctgtggttgaaggaaaggagctccccacgagaagttcaagtgaaaatgccaaagtgacaagcctggacagcagctcccatagaatcatcgcagttcactatgtactagaggagagcagcggctacatggagcccacgttgcgtatcttagctattctgcacacggtcatttctttcttctgcatcattggatactactgcttgaaagtcccattggttatttttaagcgagaaaaggaagtggcacggaaattggaatttgatgggctttatattacagaacagccttcagaagatgatattaaaggccagtgggatagactcgtaatcaacacacagtcatttcccaacaactactgggacaaatttgttaaaagaaaggttatggataaatatggagagttctacggccgagacagaatcagtgaattacttggcatggacaaggcagctctggacttcagtgatgccagagaaaagaagaagccaaagaaagacagctccttatcagctgtactgaactccattgatgtgaagtatcagatgtggaaactaggagtcgttttcactgacaactccttcctctacctagcctggtatatgactatgtctgttcttggacactataacaactttttttttgccgctcaccttctcgacattgctatgggattcaagacattaagaaccatcttgtcctcagtaactcacaatggcaaacagctcgtattaaccgttggcttattagctgttgttgtatacctatacactgtggtggcattcaattttttccgaaaattctacaataaaagtgaagatggtgatacaccagatatgaaatgtgacgatatgctaacatgctatatgttccacatgtatgttggagttcgtgctggaggagggatcggggatgaaatcgaagacccagcaggagatgaatatgagatctatcgaatcatctttgacatcactttcttcttctttgttattgtcattctcttggccataatacaaggtctaattattgatgcttttggagaactaagagaccaacaggaacaagtcaaagaagacatggagaccaaatgcttcatctgtgggataggcaatgattacttcgacacagtgccacatggctttgaaacccacactttacaggagcacaacttggctaattacttgttttttctgatgtatcttataaacaaagatgaaacagaacacacaggacaggaatcttatgtctggaagatgtatcaagaaaggtgttgggaatttttcccagcaggggattgcttccggaaacagtatgaagaccagctaaattaaactcagacccaatcacctctaaaaaccaaaaccctacccctctctctccctctctcaatttctctgctctcttggaaacattttgctgattttgtgaattgccagcgttgtgtgttttctgggagcatcgaagctctgtttcggaagagctgtttcctccccccaccttttgtatttactttgagactaaagactgaagaataatctaaattcatactcagacaaaaaaaggaattctggaaagaaaaccattctggacactgtcataacacacatagatagattttcttctgagactcccggagtcttctcgagctacgagaccttcacagagacacgtggcagccacactcacccagcctctttatttcaccatcctggaaggaaactgtctgtctaatggtcacagagcactgtagcacttaacagattgccatggacaccagttgcgaagggaaatagtgccttactatatgtgggttgagctatgcagaagatacgtgcatgaaaaaacatctttattttctttatgtcgacctttcttttcttagattgattttgtgaggttttttttttttcctttagtcttttctttagtgggggagggtaagaaaagcagtttgcacttaaaaagaaaaaaaaaaaaacgggtggtgtgtctcaggacaaaaggaggctcttctcattcagctaaattcacatttgcccccccccgcctgcccccgcccccatatgctcctgctattattttggtaatgctctgatgcaacattgcaactttatgaaatatttgtatgaaaacaaaaagactgcaaaaaatacactttcaaaagaaaccattcattgcatgtttattatgcaagtttaaatgaacaaagaaaaccttcagaaacaagttgatcaacgtgagagaaatttcatgataattattcatagtaataaagtgtcgtgggcttaattgtatatctggagccagtgtcatccaccaacaatgtgatacaatatgaacttgacagtagttttgggttttgcctcattctttcagccacctgtgatcagttttgttgattaaggacttcttgtcaggccattttttaatatcaaagctgaagcaatatccattcagggatttcatcagttgcgtcacaaaacacggatgataatatacatcactccattttttccattttgagtccttttaaatgtaatgctaacctttacaattaaaaagtcagattcagaatggaaacaaggtcattttgcaaacattggagctcttttattacaagtctgcttgttaattttagaactgtaaaaccgctctgattaaactatttaactaacaaaaaaaaac

SEQ ID NO: 311743 - DNA, 2101 bp, Homo sapiens
aactgtagatgggatgtctcatagcttggtatttgatttggccttttctaaaggaaagtaatctgtacctattcccccttggtcgtccgactttgtttgggtgggtactaagtttgtagtttcagttgaagacacagttaatcctgcttagataactttagtcaatgtcatgaacaagagttgatcactaagcctggacattttcacctaggctagagaaaggaagagacgttgcttttcagccatcatcatcatcatcttgttccctgtctgcgtctgctacttcttgctgctggtacctgtgtcatttaagccaacaccaagatatagttacagcgacagttccatttatattcgtgggcttggcacagcctccatgtgatgatctttgacgtgtattgagtgaaccaaataatagctgcccctacatggcgagttgtgttttccttttgttttgctttctgaactctgacgttaatatttccctttgttttctagaccaaatgcttcatctgtgggataggcaatgattacttcgacacagtgccacatggctttgaaacccacactttacaggagcacaacttggctaattacttgttttttctgatgtatcttataaacaaagatgaaacagaacacacaggacaggaatcttatgtctggaagatgtatcaagaaaggtgttgggaatttttcccagcaggggattgcttccggaaacagtatgaagaccagctaaattaaactcagacccaatcacctctaaaaaccaaaaccctacccctctctctccctctctcaatttctctgctctcttggaaacattttgctgattttgtgaattgccagcgttgtgtgttttctgggagcatcgaagctctgtttcggaagagctgtttcctccccccaccttttgtatttactttgagactaaagactgaagaataatctaaattcatactcagacaaaaaaaggaattctggaaagaaaaccattctggacactgtcataacacacatagatagattttcttctgagactcccggagtcttctcgagctacgagaccttcacagagacacgtggcagccacactcacccagcctctttatttcaccatcctggaaggaaactgtctgtctaatggtcacagagcactgtagcacttaacagattgccatggacaccagttgcgaagggaaatagtgccttactatatgtgggttgagctatgcagaagatacgtgcatgaaaaaacatctttattttctttatgtcgacctttcttttcttagattgattttgtgaggttttttttttttcctttagtcttttctttagtgggggagggtaagaaaagcagtttgcacttaaaaagaaaaaaaaaaaaacgggtggtgtgtctcaggacaaaaggaggctcttctcattcagctaaattcacatttgcccccccccgcctgcccccgcccccatatgctcctgctattattttggtaatgctctgatgcaacattgcaactttatgaaatatttgtatgaaaacaaaaagactgcaaaaaatacactttcaaaagaaaccattcattgcatgtttattatgcaagtttaaatgaacaaagaaaaccttcagaaacaagttgatcaacgtgagagaaatttcatgataattattcatagtaataaagtgtcgtgggcttaattgtatatctggagccagtgtcatccaccaacaatgtgatacaatatgaacttgacagtagttttgggttttgcctcattctttcagccacctgtgatcagttttgttgattaaggacttcttgtcaggccattttttaatatcaaagctgaagcaatatccattcagggatttcatcagttgcgtcacaaaacacggatgataatatacatcactccattttttccattttgagtccttttaaatgtaatgctaacctttacaattaaaaagtcagattcagaatggaaacaaggtcattttgcaaacattggagctcttttattacaagtctgcttgttaattttagaactgtaaaaccgctctgattaaactatttaactaacaaaaaaaaac

SEQ ID NO: 311744 - DNA, 471 bp, Homo sapiens
caactgagaccttctatgatgcagcacttactcagaagattagtatttgatgtcccattattaaatgaacacgcaaagatgcctcttaaagtaagtataggaaatgtttgtagatatttgattactggcttctctgactttattttctatgacaacatatacatttcttagatacatcatgcttgacgctgggaaatttctcccaattattgaaatgggcatagaagttataggaatgtatacatcaacttgaaataaacaacttctataagattatagaaatcttaacattgatttccatggaaacaatggaaatagaaatcaattgaaaaaaaaggaccacaggccgggcgcggtggctcacgcctgtaatcccagcactttgggaggccaaggtgggcggatcacgaggttaggagatcgagaccatcctagctaacacggtgaaaccccgtctctataaaaaataca

SEQ ID NO: 311745 - DNA, 546 bp, Homo sapiens
ggtgtaggcagggctggactgtaagtctaggcagacagtatctgaagtccgagatgcccaagggttagcccaaatagcagaattgatctttgcccctaagagagtctttttggtctctactcagtgttatattttgttctgggtgacagccctgagcccacaggaatagaacaaaaagagagaggaagaaaagaggctgaccagtgaatgttatttatgagggctggtaagcaacattgcttaacttaatgtcagatgtttttgacattgctctaagttgtgcatgaaagaaattacaaggcctcagaattatttgcccaagtgtattctttaaatatttttttctgcctctctgtttttttatactaggaattgagctggatgaagatgggtctctggatggaaacagtgatttaacaattagagggcgtctgctatccctggtagaaaaggtgacatatctgaagaagaagcaagcagaaaaaccagttgagagtgactccaaaaagtcctgtaagcagtatgagagtgcactggcagaatgac

SEQ ID NO: 311746 - DNA, 15812 bp, Homo sapiens
cgcgcggccccctccagcccccggctcccggcagcagaagcagaaggcagcgccaggggccgccgccgccgccgagctccgcggggctcgggagccggccccggcgaggaggcgcggaaccatggccgatgggggcgagggcgaagacgagatccagttcctgcgaactgatgatgaagtggttctgcagtgcaccgcaaccatccacaaagaacaacagaagctatgcttggcagcagaaggatttggcaacagactttgtttcttggagtccacttccaattccaagaatgtgcccccagacctctccatctgcacctttgtgctggagcagtccctctctgtccgggcgctgcaggagatgctggctaacaccgtggagaaatcagaagggcaagttgatgtggaaaaatggaaattcatgatgaagactgctcaaggtggtggtcatcgaacactcctctacggacatgccatattgctgcgccattcctatagtggcatgtatctgtgctgcctgtccacctcccggtcttcaactgataagctggcttttgatgttggcttgcaagaggacaccacaggggaggcttgttggtggaccatacaccctgcctctaagcagcgatcagaaggagaaaaagtacgagttggagatgacctcatcttagttagcgtgtcctctgaaaggtacttgcacttgtcttatggcaacggcagcttacacgtggatgccgctttccagcagactctctggagcgtggccccaatcagctcaggaagtgaggcagcccaagggtatctcattggtggtgatgtcctcaggttgctgcatggacacatggacgagtgtctcactgtcccttcaggagaacatggtgaagagcagcggagaactgttcattatgaaggtggcgctgtgtctgttcatgcacgttccctttggagactagagacgctaagagttgcgtggagtggaagccacataagatggggacagccattccgactacgccatgtcacaacaggaaaatacttgagtctcatggaagacaaaaaccttctactcatggacaaagagaaagctgatgtaaaatcaacagcatttaccttccggtcttccaaggaaaaattggatgtaggggtgagaaaagaagtagatggcatgggaacatctgaaataaaatacggtgactcagtatgctatatacaacatgtagacacaggcctatggcttacttaccagtctgtggacgtgaaatccgtgagaatgggatctatacaacgtaaggctattatgcatcatgaaggccacatggatgatggcataagtttgtcgagatcccagcatgaagaatcacgcacagcccgagttatccggagcacagtcttccttttcaatagatttataaggggccttgatgctctcagcaagaaagcgaaggcttccacagtcgatttgcctatagagtccgtaagcctaagtctgcaggatctcattggctacttccaccccccagatgagcatttagagcatgaagacaaacagaacagactacgagccctgaagaatcggcaaaatctcttccaggaagagggaatgatcaacctcgtgcttgagtgcatagaccgtttgcacgtctacagcagtgcagcacactttgctgatgttgctgggcgagaagcaggagagtcttggaaatccattctgaattctctgtatgagttgctggcggctctaattagaggaaatcgtaaaaactgtgctcaattttctggctccctcgactggttgatcagcagattggaaagactggaagcttcttcaggcattctggaagttttacactgtgttttagtagaaagtccagaagctctaaatattattaaagaaggacatattaaatctattatctcacttttagacaaacatggaagaaatcacaaggttctggatgtcttgtgctcactctgtgtttgccacggggttgcagtccgttctaaccagcatctcatctgtgacaatctcctaccaggaagagacttgttattgcagacacgtcttgtgaaccatgtcagcagcatgagacccaatatttttctgggcgtcagtgaaggttctgctcagtataagaaatggtactatgaattgatggtggaccacacagagccctttgtgacagctgaagcaactcacctgcgagtgggctgggcttccactgaaggatattctccctaccctggagggggcgaagagtggggtggaaatggtgttggagatgatctcttctcctatggatttgatggccttcatctctggtcaggttgtattgctcgtactgtaagctcaccaaaccaacatctgttaagaactgatgatgtcatcagttgctgtttagatctgagtgccccaagcatctcgttccgaattaatggacaacctgttcaaggaatgtttgagaatttcaacatcgatggcctcttctttccagtcgttagtttctctgcaggaataaaagtacgctttctgcttggagggcgacatggagaattcaaatttcttcctccacctgggtatgctccttgttatgaagctgttctgccaaaagaaaagttgaaagtggaacacagccgagagtacaagcaagaaagaacttacacacgcgacctgctgggccccacagtttccctgacgcaagctgccttcacacccatccctgtggataccagccagatcgtgttgcctcctcatctagaaagaataagagaaaaactggcagagaatatccatgaactctgggttatgaataaaattgagcttggctggcagtatggtccggttagagatgacaacaagagacaacacccatgcctggtggagttctccaagctgcctgaacaggagcgcaattacaacttacaaatgtcgcttgagaccctgaagactttgttggcattaggatgtcatgtgggtatatcagatgaacatgctgaagacaaggtgaaaaaaatgaagctacccaagaattaccagctgacaagtggatacaagcctgcccctatggacctgagctttatcaaactcaccccatcgcaagaagcaatggtggacaagttggcagaaaatgcacataatgtgtgggcgcgggatcgaatccggcagggctggacttatggcatccaacaggacgtaaagaacagaagaaatcctcgccttgttccctacactcctctggatgaccgaaccaagaaatccaacaaggacagcctccgcgaggctgtgcgcacgctgctggggtacggctacaacttggaagcaccagatcaagatcatgcagccagagccgaagtgtgcagcggcaccggggaaaggttccgaatcttccgtgccgagaagacctatgcagtgaaggccggacggtggtattttgaatttgagacggtcactgctggagacatgagggttggttggagtcgtcctggttgtcaaccggatcaggagcttggctcagatgaacgtgcctttgcctttgatggcttcaaggcccagcggtggcatcagggcaatgaacactatgggcgctcttggcaagcaggcgatgtcgtggggtgtatggttgacatgaacgaacacaccatgatgttcacactgaatggtgaaatccttcttgatgattcaggctcagaactggctttcaaggactttgatgttggcgatggattcatacctgtgtgtagccttggagtggctcaagtgggtaggatgaactttggaaaggatgtcagcaccttgaaatatttcaccatctgtggcttacaagagggctatgaaccatttgccgttaatacaaacagggatattaccatgtggctgagcaagaggcttcctcagtttcttcaagttccatcaaaccatgaacatatagaggtgaccagaatagacggcaccatagacagttccccatgtttaaaggtcactcagaagtcttttggttctcagaacagcaacactgatatcatgttttatcgcctgagcatgccgatcgagtgcgcggaggtcttctccaagacggtggctggagggctccctggggctggcctttttgggcccaagaatgacttggaagattatgatgctgattctgactttgaggttctgatgaagacagctcatggccatctagtgcccgatcgtgttgacaaagacaaagaagctactaaaccagagtttaacaaccacaaagattatgcccaggaaaagccctctcgtctgaaacaaagatttttgcttagaagaacaaagccagattacagcacaagccattctgcaagactcaccgaagatgtccttgctgatgatcgggatgactatgatttcttgatgcaaacgtccacgtactattactcagtgagaatctttcctggacaagaacctgctaatgtctgggtgggctggattacatcagatttccatcagtatgacacaggctttgacttggacagagttcgcacagtaacagttactctaggagatgaaaaaggaaaagtgcatgaaagcatcaaacgcagcaactgctatatggtatgtgcgggtgagagcatgagccccgggcaaggacgcaacaataatggactggagattggctgtgtggtggatgctgccagcgggctgctcacattcattgccaatggcaaggaactgagcacatactatcaggtggaaccgagtacaaaattatttcctgcggtttttgcacaagctacaagtcccaatgttttccagtttgagttgggaagaataaagaatgtgatgcctctctcggcgggattattcaagagtgagcacaagaaccccgtgccgcagtgccccccgcgcctccacgtgcagttcctgtcacacgtcctgtggagcagaatgcccaaccagtttttgaaggtagatgtgtctcgaataagtgaacgccaaggctggttggtgcagtgtttggatcctctgcagttcatgtctcttcatatccctgaggaaaacagatctgttgacatcttagagttgacagagcaggaggaattgctgaaatttcactatcacactctccggctctactcagccgtctgtgctcttgggaaccaccgggtggcccatgccctgtgcagccatgtggatgaacctcagctcctctatgccattgagaacaagtacatgcctggtttgctgcgtgctggctactatgacctgctgattgacatccacctgagctcctatgccactgccaggctcatgatgaacaacgagtacattgtccccatgacggaggagacgaagagcatcaccctgttccctgatgagaacaaaaaacacggccttccagggatcggcctcagcacctccctcaggccacggatgcagttttcctcccccagttttgtaagcattagtaatgaatgttaccagtacagtccagagttcccactggacatcctcaagtccaaaaccatacagatgctgacagaagctgttaaagagggcagtcttcatgcccgggacccagttggagggactactgaattcctctttgtacctctcatcaagcttttctataccctgctgatcatgggcatctttcacaacgaggacttgaagcacatcttgcagttgattgagcccagtgtgtttaaagaagctgccactccggaggaggagagtgacacgctggagaaagagctcagtgtggacgatgcaaagctgcaaggagctggtgaggaagaagccaaggggggcaagcggcccaaggaaggcctgctccaaatgaaactgccagagccagttaaattgcagatgtgcctactgcttcagtacctctgtgactgccaggtccggcaccggatagaagccattgtagccttttcagatgattttgtggctaagctccaagacaatcaacgtttccgatacaacgaagtcatgcaagccttaaacatgtcagctgcactcacagccaggaagacaaaggaatttagatcaccacctcaagaacagatcaatatgcttctcaattttaaggatgacaaaagtgaatgtccatgtccagaagaaattcgtgaccaactattggatttccatgaagatttgatgacacattgtggaattgagctggatgaagatgggtctctggatggaaacagtgatttaacaattagagggcgtctgctatccctggtagaaaaggtgacatatctgaagaagaagcaagcagaaaaaccagttgagagtgactccaaaaagtcctccactctgcagcagctgatttctgagaccatggtccgatgggctcaggagtctgtcattgaagaccccgagctggtgagggccatgtttgtgttgctccatcggcagtatgacggcattgggggtcttgttcgggccctgccaaagacctacacgataaatggtgtgtccgtggaggacaccatcaacctgctggcatcccttggtcagattcggtccctgctgagtgtgagaatgggcaaagaagaagagaagctcatgattcgtggattaggggatattatgaataacaaagtgttttaccagcaccctaatctcatgagggcactggggatgcacgagactgtgatggaggtcatggtgaacgtccttggaggtggagagtccaaggaaatcacctttcccaagatggtggccaactgttgccgttttctctgttacttctgtcgtataagtaggcagaatcaaaaagctatgtttgatcatctcagttatttactggaaaacagcagtgttggtcttgcctccccagctatgagaggttcaacaccactggatgtggctgcagcttcggtgatggataataatgaactagcattagctctgcgtgagccggatctagaaaaggtagttcgttatttggctggttgtggactgcaaagttgccagatgctggtgtctaagggctatccagacattgggtggaacccagttgaaggagagagatatcttgactttctcagatttgctgtcttctgtaatggggagagtgtggaggaaaatgcaaatgtcgtggtgagattgctcattcggaggcctgagtgttttggtcctgctttgagaggagaaggtgggaatgggcttcttgcagcaatggaagaagccatcaaaatcgccgaggatccttcccgagatggtccctcaccaaatagcggatccagtaaaacacttgacacagaggaggaggaagatgacactatccacatggggaacgcgatcatgaccttctattcagctttgattgacctcttgggacgctgtgctcctgagatgcatttgattcatgccgggaagggagaagccatcagaattaggtccattttgagatccctcattcccctgggagatttggtgggcgttatcagcatcgcttttcagatgccaacaatagccaaagatgggaatgtggtggaacctgacatgtctgcggggttttgcccagatcacaaggcagccatggttttattccttgacagggtctatgggattgaggttcaagacttcctcctccatcttcttgaggttggctttctgccagatctccgggcggctgcttctttagatacggcagctttgagtgctacagacatggccttggccctcaatcggtacctttgcacagccgtcttgccattgttaacaagatgtgctcctctctttgctggcacagagcaccacgcttctctcattgactcattacttcatactgtgtatagactttctaagggctgttcacttaccaaagctcagcgggattccatagaagtttgtttactctctatttgtggacaactgagaccttctatgatgcagcacttactcagaagattagtatttgatgtcccattattaaatgaacacgcaaagatgcctcttaaactgctgacaaatcattatgaaagatgctggaaatattactgcctgcctggagggtggggaaactttggtgctgcctcagaagaagaacttcatttatcaagaaagttgttctggggcatttttgatgccctgtctcaaaagaaatatgaacaagaacttttcaaactggcactgccttgcctgagtgcagttgcgggagctttgcctccagactacatggagtcaaattatgtcagtatgatggaaaaacagtcatcaatggattctgaagggaactttaacccacaacctgttgatacctcaaatattacaattcctgagaaattggaatacttcattaacaaatatgcagaacactcccatgacaaatggtcaatggacaagttggcaaatggatggatttatggagaaatatattcagactcttctaaggttcagccattaatgaagccatataagctattgtctgaaaaggaaaaagaaatttatcgctggccaatcaaagaatctttaaaaactatgctggctaggactatgagaactgaaagaactcgggagggagacagcatggccctttacaaccggactcgtcgtatttctcagacaagccaggtttctgtggacgctgcccatggttacagtccccgggccattgacatgagcaatgttacactatctagagacctgcatgctatggcagaaatgatggctgaaaactaccataatatatgggcaaagaaaaagaaaatggagttggagtccaaaggaggaggaaaccatcctctgctggtgccctatgatacactgacagccaaagagaaagccaaggatagagaaaaagcacaggacatcctcaagttcttgcagatcaatggatatgctgtatccagaggatttaaggacctggaactggacacgccttctattgagaaacgatttgcctatagtttcctccaacaactcattcgctatgtggatgaagcccatcagtatatcctggagtttgatggtggcagcagaggcaaaggagaacatttcccttatgaacaagaaatcaagttctttgcaaaagtcgttcttcctttaattgatcagtatttcaaaaaccatcgtttatacttcttatctgcagcaagcagacctctctgctctggaggacatgcttccaacaaagagaaagaaatggtgactagcctattctgcaaacttggagttcttgtcaggcataggatttcactatttggcaatgatgcaacatcaattgtcaactgtcttcatattttgggtcagactttggatgcaaggacagtgatgaagactggcctggagagtgttaaaagtgcactcagagcttttctggacaacgctgcagaggatctggagaagaccatggaaaacctcaagcagggccagttcactcacacccgaaaccagcccaaaggggttactcagattatcaattacaccacagtggccctgctgccaatgctgtcgtcattatttgaacatattggccagcatcagttcggagaagacctaatattggaagatgtccaggtgtcttgttatagaattctgactagcttatatgctttgggaaccagcaagagtatttacgtggagaggcaacgttctgcattaggagaatgtctagctgcctttgctggtgcttttcctgtagcatttttggaaactcatctggacaaacataatatttactccatctacaataccaagtcttcacgagaaagagcagctctcagtttgccaactaatgtggaagatgtttgtccaaacattccgtctttggagaaactcatggaagaaatcgtggaattagccgagtccggcattcgctacactcaaatgccacatgtcatggaagtcatactgcccatgctttgcagctacatgtctcgttggtgggagcatggacctgagaacaatccagaacgggccgagatgtgctgcacagccctgaactcagagcacatgaacacacttctagggaacatattgaaaatcatatataataacttggggattgatgagggagcctggatgaagaggctagcagtgttttcccagcctataataaataaagtgaaacctcagctcttgaaaactcatttcttgccgttaatggagaaactcaagaaaaaggcagctacggtggtgtctgaggaagaccacctgaaagctgaggccaggggggacatgtcggaggcagaactcctcatcctagatgagttcaccacactggccagagatctctatgccttctaccctctcttgattagatttgtggactataacagggcaaagtggctaaaggagcctaacccagaagcagaggagctcttccgcatggtggctgaagtgtttatctactggtcgaagtcccataatttcaaaagagaagagcagaacttcgttgtacagaatgaaatcaacaatatgtctttccttattactgataccaagtcaaagatgtcaaaggcagctgtttctgatcaggaaaggaagaaaatgaagcgcaaaggagatcggtattccatgcagacctctctgattgtagcagctctgaagcggttactgcccattgggttgaacatctgtgcccctggggaccaggagctcattgctctggccaaaaatcgatttagcctgaaagatactgaggatgaagtacgagatataatccgcagcaatattcatttacaaggcaagttggaggatcctgctattagatggcaaatggctctttacaaagacttaccaaacaggactgatgatacctcagatccagagaagacggtagaaagagtattggatatagcaaatgtgctttttcatcttgaacagaagtctaaacgtgtgggtcgaagacattactgtctggtggaacatcctcagagatctaaaaaggctgtatggcataaactactgtctaagcagaggaaaagggctgttgtagcctgcttccggatggcccccttatataatctgccaaggcatcgggctgtcaatctctttcttcagggatatgaaaagtcttggattgaaacagaagaacattactttgaagataaactgatagaagatttagcaaaacctggggctgaacctccagaagaagatgaaggcactaagagagttgatcctctacatcagctgatccttctgtttagtcggacagctttaacagagaaatgcaaactggaggaagattttttatatatggcctatgcagatattatggcaaagagttgtcatgatgaggaagatgacgatggtgaagaggaagtgaagagttttgaagaaaaagaaatggaaaagcaaaagcttctataccagcaagcccgactccacgatcgtggcgcggctgagatggtgctacagacaatcagtgccagcaaaggtgaaactggaccaatggtagcagctactctgaaacttggaattgctattttaaatggtgggaactccacagtacagcagaaaatgcttgactacctcaaggagaaaaaggatgtgggcttctttcagagcctggccggcctgatgcagtcatgtagtgtccttgacctaaatgcatttgagcgacaaaacaaagctgaaggtcttgggatggtgacagaggaaggatcaggagaaaaggttctgcaggacgatgagttcacctgtgacctcttccgattcctgcaactactctgtgagggacacaactcagattttcagaattatctgagaactcagactggcaataatacaactgtcaacataattatctccactgtagactacctactgagagttcaggaatcaattagtgacttttattggtattactctgggaaagatgttattgatgaacaaggacaacggaatttctccaaagctatccaagtggcaaaacaagtctttaacactcttacagagtatattcagggtccttgcactgggaatcaacagagtttggcacacagcaggctgtgggatgctgtggtcggctttcttcatgtgtttgcccatatgcagatgaagctgtcgcaggattccagtcaaattgagctattaaaagaattaatggatctgcagaaggatatggtggtcatgttgctgtccatgttagaaggtaatgttgttaatggaacgattggcaaacagatggtggatatgcttgtggaatcttccaacaacgtggagatgattctcaaattttttgacatgttcttaaaactaaaggatttgacgtcgtctgatacttttaaagaatatgaccccgatggcaagggagtcatttccaagagggacttccacaaagcgatggagagccataagcactacacgcagtcagaaacggaatttcttttgtcttgtgcggagacggatgagaatgaaaccctcgactacgaagagttcgtcaaacgcttccacgaacctgcgaaggacatcggcttcaacgtcgccgtccttctgacaaacctctctgagcacatgcccaacgatacccgacttcagacttttctggaattagcagagagcgtcctgaattatttccagccctttctgggccgcatcgaaatcatgggaagcgccaaacgcatcgagagggtctattttgaaatcagtgagtccagccgaacccagtgggagaagccccaggtcaaggagtccaaaagacagttcatatttgacgtggtcaacgaaggcggagagaaagagaagatggaactctttgtgaacttctgcgaggacaccatctttgaaatgcagctggcggctcagatctcggagtcggacttgaacgagaggtcagcgaataaggaagaaagcgagaaggagaggccggaagagcaggggccgaggatggctttcttctccattctgacggtcaggtcggccctgtttgcgctcaggtacaatatcttgacccttatgcgaatgctcagtctgaagagcctgaagaagcagatgaaaaaagtaaaaaagatgaccgtgaaggacatggtcacggccttcttttcatcctactggagtattttcatgaccctcttgcacttcgtggccagcgttttcagaggctttttccgcatcatttgcagcctgctgcttgggggaagcctcgtcgaaggtgctaaaaagatcaaagttgcagaactgttagccaacatgccagaccccactcaggatgaggttagaggagatggggaggagggagagaggaaacccctggaagccgccctgccctccgaggatctgaccgacttaaaggagctgacagaggaaagtgaccttctttcggacatctttggcctggatctgaagagagaaggaggacagtacaaactgattcctcataatccaaatgctgggctcagtgacctcatgagcaacccagtccccatgcctgaggtgcaggaaaaatttcaggaacagaaggcaaaagaagaagaaaaggaagaaaaagaagaaaccaaatctgaacctgaaaaagccgagggagaagatggagaaaaagaagagaaagccaaggaagacaagggcaaacaaaagttgaggcagcttcacacacacagatacggagaaccagaagtgccagagtcagcattctggaagaaaatcatagcatatcaacagaaacttctaaactattttgctcgcaacttttacaacatgagaatgttagccttatttgtcgcatttgctatcaatttcatcttgctcttttataaggtctccacttcttctgtggttgaaggaaaggagctccccacgagaagttcaagtgaaaatgccaaagtgacaagcctggacagcagctcccatagaatcatcgcagttcactatgtactagaggagagcagcggctacatggagcccacgttgcgtatcttagctattctgcacacggtcatttctttcttctgcatcattggatactactgcttgaaagtcccattggttatttttaagcgagaaaaggaagtggcacggaaattggaatttgatgggctttatattacagaacagccttcagaagatgatattaaaggccagtgggatagactcgtaatcaacacacagtcatttcccaacaactactgggacaaatttgttaaaagaaaggttatggataaatatggagagttctacggccgagacagaatcagtgaattacttggcatggacaaggcagctctggacttcagtgatgccagagaaaagaagaagccaaagaaagacagctccttatcagctgtactgaactccattgatgtgaagtatcagatgtggaaactaggagtcgttttcactgacaactccttcctctacctagcctggtatatgactatgtctgttcttggacactataacaactttttttttgccgctcaccttctcgacattgctatgggattcaagacattaagaaccatcttgtcctcagtaactcacaatggcaaacagctcgtattaaccgttggcttattagctgttgttgtatacctatacactgtggtggcattcaattttttccgaaaattctacaataaaagtgaagatggtgatacaccagatatgaaatgtgacgatatgctaacatgctatatgttccacatgtatgttggagttcgtgctggaggagggatcggggatgaaatcgaagacccagcaggagatgaatatgagatctatcgaatcatctttgacatcactttcttcttctttgttattgtcattctcttggccataatacaaggtctaattattgatgcttttggagaactaagagaccaacaggaacaagtcaaagaagacatggagaccaaatgcttcatctgtgggataggcaatgattacttcgacacagtgccacatggctttgaaacccacactttacaggagcacaacttggctaattacttgttttttctgatgtatcttataaacaaagatgaaacagaacacacaggacaggaatcttatgtctggaagatgtatcaagaaaggtgttgggaatttttcccagcaggggattgcttccggaaacagtatgaagaccagctaaattaaactcagacccaatcacctctaaaaaccaaaaccctacccctctctctccctctctcaatttctctgctctcttggaaacattttgctgattttgtgaattgccagcgttgtgtgttttctgggagcatcgaagctctgtttcggaagagctgtttcctcccccatatgctcctgctattattttggtaatgctctgatgcaacattgcaactttatgaaatatttgtatgaaaacaaaaagactgcaaaaaatacactttcaaaagaaaccattcattgcatgtttattatgcaagtttaaatgaacaaagaaaaccttcagaaacaagttgatcaacgtgagagaaatttcatgataattattcatagtaataaagtgtcgtgggcttaattgtatatctggagccagtgtcatccaccaacaatgtgatacaatatgaacttgacagtagttttgggttttgcctcattctttcagccacctgtgatcagttttgttgattaaggacttcttgtcaggccattttttaatatcaaagctgaagcaatatccattcagggatttcatcagttgcgtcacaaaacacggatgataatatacatcactccattttttccattttgagtccttttaaatgtaatgctaacctttacaattaaaaagtcagattcagaatggaaacaaggtcattttgcaaacattggagctcttttattacaagtctgcttgttaattttagaactgtaaaaccgctctgattaaactatttaactaacaaaaaaaaac

SEQ ID NO: 311747 - DNA, 2013 bp, Homo sapiens
aaaccctgaagagcccaagcaatgtggttgtaaaatttgcaaaataagattaaatcttaactgcaatctgttaacactgctgtctcctttcactctttctcctatatcacactttcccacatgttggatggccttggagtggtagccataagcatttttggaattcaactaaaaactgaaggatccttgaggacggcagtacctggcatacctacacagtcagcgttcaacaagtgtttgcaaaggtacattggggcactgggggcacgagtgatctgtgacaatatccctggtttggtgagccggcagcggcagctgtgccagcgttacccagacatcatgcgttcagtgggcgagggtgcccgagaatggatccgagagtgtcagcaccaattccgccaccaccgctggaactgtaccaccctggaccgggaccacaccgtctttggccgtgtcatgctcagaagtagccgagaggcagcttttgtatatgccatctcatcagcaggggtagtccacgctattactcgcgcctgtagccagggtgaactgagtgtgtgcagctgtgacccctacacccgtggccgacaccatgaccagcgtggggactttgactggggtggctgcagtgacaacatccactacggtgtccgttttgccaaggccttcgtggatgccaaggagaagaggcttaaggatgcccgggccctcatgaacttacataataaccgctgtggtcgcacggctgtgcggcggtttctgaagctggagtgtaagtgccatggcgtgagtggttcctgtactctgcgcacctgctggcgtgcactctcagatttccgccgcacaggtgattacctgcggcgacgctatgatggggctgtgcaggtgatggccacccaagatggtgccaacttcaccgcagcccgccaaggctatcgccgtgccacccggactgatcttgtctactttgacaactctccagattactgtgtcttggacaaggctgcaggttccctaggcactgcaggccgtgtctgcagcaagacatcaaaaggaacagacggttgtgaaatcatgtgctgtggccgagggtacgacacaactcgagtcacccgtgttacccagtgtgagtgcaaattccactggtgctgtgctgtacggtgcaaggaatgcagaaatactgtggacgtccatacttgcaaagcccccaagaaggcagagtggctggaccagacctgaacacacagatacctcactcatccctccaattcaagcctctcaactcaaaagcacaagatccttgcatgcacaccttcctccaccctccaccctgggctgctaccgcttctatttaaggatgtagagagtaatccatagggaccatggtgtcctggctggttccttagccctgggaaggagttgtcaggggatataagaaactgtgcaagctccctgatttcccgctctggagatttgaagggagagtagaagagatagggggtctttagagtgaaatgagttgcactaaagtacgtagttgaggctccttttttctttcctttgcaccagcttcccgatacttcttggtgtgcaagaggaagggtacctgtagagagcttctttttgtttctacctggccaaagttagatgggacaaagatgaatggcatgtcccttctctgaagtccgtttgagcagaactacctggtaccccgaaagaaaatcttaggctaccacattctattattgagagcctgagatgttagccatagtggacaaggttccattcacatgctcatatgtttataaactgtgttttgtagaagaaaaagaatcataacaatacaaacacacattcattctctctttttctctctaccattctcaacctgtattggacagcactgcctcttttgcttacttgctgcctgttcaaactgaggtggaatgcagtggttcccatgcttaacaaatcattaaaacaccctagaacactcctaggatagattaatgt

SEQ ID NO: 311748 - DNA, 2384 bp, Homo sapiens
aaacccactccaccttactaccagacaaccttagccaaaccatttacccaaataaagtataggcgatagaaattgaaacctggcgcaatagatatagtaccgcaagggaaagatgaaaaattataaccaagcataatatagcaaggactaacccctataccttctgcataatgaattaactagaaataactttgcaaggagagtcaaagctaaggcccccgaaaccaggcgagctacctaagaacagctaaaagagcacacccgtctatgtagcaaaatagtgggaagatttataggtagaggcgacaaacctaccgagcctggtgatagctggttgtccaagatagaatcttagttcaactttaaatttgcccacagaaccctctaaatccccttgtaaatttaactgttagtccaaagaggaacagctctttggacactaggaaaaaaccttgtagagagagtgtcagcccaattccacactttcccacatgttggatggccttggagtggtagccataagcatttttggaattcaactaaaaactgaaggatccttgaggacggcagtacctggcatacctacacagtcagcgttcaacaagtgtttgcaaaggtacattggggcactgggggcacgagtgatctgtgacaatatccctggtttggtgagccggcagcggcagctgtgccagcgttacccagacatcatgcgttcagtgggcgagggtgcccgagaatggatccgagagtgtcagcaccaattccgccaccaccgctggaactgtaccaccctggaccgggaccacaccgtctttggccgtgtcatgctcagaagtagccgagaggcagcttttgtatatgccatctcatcagcaggggtagtccacgctattactcgcgcctgtagccagggtgaactgagtgtgtgcagctgtgacccctacacccgtggccgacaccatgaccagcgtggggactttgactggggtggctgcagtgacaacatccactacggtgtccgttttgccaaggccttcgtggatgccaaggagaagaggcttaaggatgcccgggccctcatgaacttacataataaccgctgtggtcgcacggctgtgcggcggtttctgaagctggagtgtaagtgccatggcgtgagtggttcctgtactctgcgcacctgctggcgtgcactctcagatttccgccgcacaggtgattacctgcggcgacgctatgatggggctgtgcaggtgatggccacccaagatggtgccaacttcaccgcagcccgccaaggctatcgccgtgccacccggactgatcttgtctactttgacaactctccagattactgtgtcttggacaaggctgcaggttccctaggcactgcaggccgtgtctgcagcaagacatcaaaaggaacagacggttgtgaaatcatgtgctgtggccgagggtacgacacaactcgagtcacccgtgttacccagtgtgagtgcaaattccactggtgctgtgctgtacggtgcaaggaatgcagaaatactgtggacgtccatacttgcaaagcccccaagaaggcagagtggctggaccagacctgaacacacagatacctcactcatccctccaattcaagcctctcaactcaaaagcacaagatccttgcatgcacaccttcctccaccctccaccctgggctgctaccgcttctatttaaggatgtagagagtaatccatagggaccatggtgtcctggctggttccttagccctgggaaggagttgtcaggggatataagaaactgtgcaagctccctgatttcccgctctggagatttgaagggagagtagaagagatagggggtctttagagtgaaatgagttgcactaaagtacgtagttgaggctccttttttctttcctttgcaccagcttcccgatacttcttggtgtgcaagaggaagggtacctgtagagagcttctttttgtttctacctggccaaagttagatgggacaaagatgaatggcatgtcccttctctgaagtccgtttgagcagaactacctggtaccccgaaagaaaatcttaggctaccacattctattattgagagcctgagatgttagccatagtggacaaggttccattcacatgctcatatgtttataaactgtgttttgtagaagaaaaagaatcataacaatacaaacacacattcattctctctttttctctctaccattctcaacctgtattggacagcactgcctcttttgcttacttgctgcctgttcaaactgaggtggaatgcagtggttcccatgcttaacaaatcattaaaacaccctagaacactcctaggatagattaatgt

SEQ ID NO: 311749 - DNA, 1969 bp, Homo sapiens
cgggagtcttcggggagctatgctgagaccgggtggtgcggaggaagctgcgcagctcccgcttcggcgcgccagcgccccggtccctgtgccgtcgcccgcggcccccgacggctcccgggcttcggcccgcctaggtcttgcctgccttctgctcctgctgctgctgacgctgccggcccgcgtagacacgtcctggtggtacattggggcactgggggcacgagtgatctgtgacaatatccctggtttggtgagccggcagcggcagctgtgccagcgttacccagacatcatgcgttcagtgggcgagggtgcccgagaatggatccgagagtgtcagcaccaattccgccaccaccgctggaactgtaccaccctggaccgggaccacaccgtctttggccgtgtcatgctcagaagtagccgagaggcagcttttgtatatgccatctcatcagcaggggtagtccacgctattactcgcgcctgtagccagggtgaactgagtgtgtgcagctgtgacccctacacccgtggccgacaccatgaccagcgtggggactttgactggggtggctgcagtgacaacatccactacggtgtccgttttgccaaggccttcgtggatgccaaggagaagaggcttaaggatgcccgggccctcatgaacttacataataaccgctgtggtcgcacggctgtgcggcggtttctgaagctggagtgtaagtgccatggcgtgagtggttcctgtactctgcgcacctgctggcgtgcactctcagatttccgccgcacaggtgattacctgcggcgacgctatgatggggctgtgcaggtgatggccacccaagatggtgccaacttcaccgcagcccgccaaggctatcgccgtgccacccggactgatcttgtctactttgacaactctccagattactgtgtcttggacaaggctgcaggttccctaggcactgcaggccgtgtctgcagcaagacatcaaaaggaacagacggttgtgaaatcatgtgctgtggccgagggtacgacacaactcgagtcacccgtgttacccagtgtgagtgcaaattccactggtgctgtgctgtacggtgcaaggaatgcagaaatactgtggacgtccatacttgcaaagcccccaagaaggcagagtggctggaccagacctgaacacacagatacctcactcatccctccaattcaagcctctcaactcaaaagcacaagatccttgcatgcacaccttcctccaccctccaccctgggctgctaccgcttctatttaaggatgtagagagtaatccatagggaccatggtgtcctggctggttccttagccctgggaaggagttgtcaggggatataagaaactgtgcaagctccctgatttcccgctctggagatttgaagggagagtagaagagatagggggtctttagagtgaaatgagttgcactaaagtacgtagttgaggctccttttttctttcctttgcaccagcttcccgatacttcttggtgtgcaagaggaagggtacctgtagagagcttctttttgtttctacctggccaaagttagatgggacaaagatgaatggcatgtcccttctctgaagtccgtttgagcagaactacctggtaccccgaaagaaaatcttaggctaccacattctattattgagagcctgagatgttagccatagtggacaaggttccattcacatgctcatatgtttataaactgtgttttgtagaagaaaaagaatcataacaatacaaacacacattcattctctctttttctctctaccattctcaacctgtattggacagcactgcctcttttgcttacttgctgcctgttcaaactgaggtggaatgcagtggttcccatgcttaacaaatcattaaaacaccctagaacactcctaggatagattaatgt

SEQ ID NO: 311750 - DNA, 1863 bp, Homo sapiens
aaaccctgaagagcccaagcaatgtggttgtaaaatttgcaaaataagattaaatcttaactgcaatctgttaacactgctgtctcctttcactctttctcctatatcacactttcccacatgttggatggccttggagtggtagccataagcatttttggaattcaactaaaaactgaaggatccttgaggacggcagtacctggcatacctacacagtcagcgttcaacaagtgtttgcaaaggtacattggggcactgggggcacgagtgatctgtgacaatatccctggtttggtgagccggcagcggcagctgtgccagcgttacccagacatcatgcgttcagtgggcgagggtgcccgagaatggatccgagagtgtcagcaccaattccgccaccaccgctggaactgtaccaccctggaccgggaccacaccgtctttggccgtgtcatgctcagaagtagccgagaggcagcttttgtatatgccatctcatcagcaggggtagtccacgctattactcgcgcctgtagccagggtgaactgagtgtgtgcagctgtgacccctacacccgtggccgacaccatgaccagcgtggggactttgactggggtggctgcagtgacaacatccactacggtgtccgttttgccaaggccttcgtggatgccaaggagaagaggcttaaggatgcccgggccctcatgaacttacataataaccgctgtggtcgcacggctgtgcggcggtttctgaagctggagtgtaagtgccatggcgtgagtggttcctgtactctgcgcacctgctggcgtgcactctcagatttccgccgcacaggtgattacctgcggcgacgctatgatggggctgtgcaggtgatggccacccaagatggtgccaacttcaccgcagcccgccaaggctatcgccgtgccacccggactgatcttgtctactttgacaactctccagattactgtgtcttggacaaggctgcaggttccctaggcactgcaggccgtgtctgcagcaagacatcaaaaggaacagacggttgtgaaatcatgtgctgtggccgagggtacgacacaactcgagtcacccgtgttacccagtgtgagtgcaaattccactggtgctgtgctgtacggtgcaaggaatgcagaaatactgtggacgtccatacttgcaaagcccccaagaaggcagagtggctggaccagacctgaacacacagatacctcactcatccctccaattcaagcctctcaactcaaaagcacaagatccttgcatgcacaccttcctccaccctccaccctgggctgctaccgcttctatttaaggatgtagagagtaatccatagggaccatggtgtcctggctggttccttagccctgggaaggagttgtcaggggatataagaaactgtgcaagctccctgatttcccgctctggagatttgaagggagagtagaagagatagggggtctttagagtgaaatgagttgcactaaagtacgtagttgaggctccttttttctttcctttgcaccagcttcccgatacttcttggtgtgcaagaggaagggtacctgtagagagcttctttttgtttctacctggccaaagttagatgggacaaagatgaatggcatgtcccttctctgaagtccgtttgagcagaactacctggtaccccgaaagaaaatcttaggctaccacattctattattgagagcctgagatgttagccatagtggacaaggttccattcacatgctcatatgtttataaactgtgttttgtagaagaaaaagaatcataacaatacaaacacacattcattctc

SEQ ID NO: 311751 - DNA, 920 bp, Homo sapiens
tgaccatggatccctggtcagctttgactctcaccaaatgcccaggtgtggaccgatggttgggctggttgtattgatgcttggtaagagtcaaagctgaccatggatccctggggccaacggcaacagcatgggcctcacctcctctgtgatttctttctttgcaccaaagacatcagtctccaacatgtttctgttttgttgtttgattcagcaaaaatctcccagtgacaacatcgcaatagttttttacttctcttaggtggctctgggaatgggagaggggtaggatgtacaggggtagtttgttttagaaccagccgtattttacatgaagctgtataattaattgtcattatttttgttagcaaagattaaatgtgtcattggaagccatccctttttttacatttcatacaacagaaaccagaaaagcaatactgtttccattttaaggatatgattaatattattaatataataatgatgatgatgatgatgaaaactaaggatttttcaagagatctttctttccaaaacatttctggacagtacctgattgtattttttttttaaataaaagcacaagtacttttgaaaaaacacaccgcgccggccaagaaacacaacagaagaggggcccgccaaacaaataccccccgcgagggggcccaacatctaacgcgaccacacggtttgtggcaaacaggggggccccaataggacgcgcgcaaataagcgcaagaccgggcgcacgacaacacagccgcggagggcaaacaggcacgcggcgatcctggcaagaaacccagctcgcccgggcaatcgggaccaccacaagaattaagcgggataatacactagcgattggtacaacagcatgcgcgggaacctgacaggaataacgaaacacacgcgcg

SEQ ID NO: 311752 - DNA, 2295 bp, Homo sapiens
  misc_feature (1674)..(1674): n is a, c, g, or t
accatgatcttaacaaacttacccagtgggctcgtcattggaaaaccaaatgtgaacttattttatcggtaatcactaatatcagagagactctgcaacacggactaaatccataattttctcaagactaatgattcctacagaaattaacaacggaatagtcaaacatctgtgtttcccaaagtctttctagagattactagctccacagaatgttcaaaggtcctactcggtgaggaaattccacgttcaaataagtttggaaagactgagttaaacaaagttaaagaggatctttaactgcacggcttttcagaacaccctaacgtgcatcatctccaagaagtacttatccaggcagtattttccaaacttatttgacaaaggatactttttaaggaagaggatcaaacaggaatagttcactgtgagcacactttgggaaactcagctctaaatctacattgacattgagttttgtctagttaaggcaatgcaagatgaaaccctgggtccacagtatgtagcacaaaaggttccaacctcagttctaccatctgaacatttatctaatagttaataaaataacaagaaagaatgcaaaaaaaaaaaaaaaaagtcaagggtaggagccttctttagtgaaacagcactaagaacaaagcaaaaagaccataacattttaaaagccattttgggcaggctcaaggagaatgtaatcagcagtatcatcatgagcagctctacagatcattaatgctggtttatttgtcttttcaaaaagaaaagaaaaaggtcttgcaggggatgggcactcagccactggaagacagagagcaaatgtaaacaatttactggctttgaacttatttaataatatgtgggacgggccaatgctgagtccagatgtggatttactgaattgcttttagacaaaactcacatatgcaaacatatgcttgacttgtattgaatgtgtctactccatctttcccctctcctgactctactggacttgttaatgttgaatgattttatttttggtatctcaggacacttctatctctgaaagccggggcatcactacatattgatacccctactggagagaagattgcacggactggtaaatgatgtgtctttcctccttctcccaccattttctctccctctagaagccgaaccggaagttgacaaccttctggtttcagatgccaccccagacggtttccgtctgtcctggacagctgatgaaggggtcttcgacaattttgttctcaaaatcagagataccaaaaagcagtctgagccactggaaataaccctacttgcccccgaacgtaccagggacttaacaggtctcagagaggctactgaatacgaaattgaactctatggaataagcaaaggaaggcgatcccagacagtcagtgctatagcaacaacaggtactgtaaataaacaggagagaacagagaaaagtcatgactcaggggtcttcttctcacagggctgagtaatcacaggagctttggatgcaggcaggctggcgctctgatcctgactctttcaattacagactgtgttaccttggacaatttggctaagtccttatgcaaaaaaagtatgatgccatttacttaatagggttgtgaggattaaatgagataattnatataaagcccatagcggaaggcctggcaggtagcaagggcccagcaaatgagagctattcacgttgccattaatgcatcatcatcgttacaattatcatctttttttttttacgttccaaagattcttccttctatctattatctcatcatatctcatctcatcatatcatatctcatcattttatccagagatacacttccttgttctttggccaaatgttcgagctataccaagtagggagataatggagaagcagcacgtctatctatacacattaatatttataaaatgctacatgtgaataatcagtacggtgatcagcaaggataaaggagagagctggcaagattaacatgctactgtttatgaagctctctaactttgatactcataacaactctgaaaggcacctagagtgtccttggagtttaattacctttttccataggagctgtttcaaggagaaaaaaaaaaaagatggttaataatatgactcttaggcccagagtgatggctcacacctgtaatcccagcatttcaggaggctgagacaggaggatcacttgagtccaggagtttgagaccagcctaggcaacatagtaagaccctacctgtgc

SEQ ID NO: 311753 - DNA, 248 bp, Homo sapiens
acacacacacacacacacacacacacacacacccctatgcataatcacacactgttttggcatacaagcctataatttcagggaattcaggttatgaattcctacctggtataacaggatgtgagtctcatctgatttcacacactacaacaaatggttctcaagccagatggagcctgagggtgcaaccgtccttcagctgaatttgaatctgggtgccctgggtagatacagaacaatgtggctgc

SEQ ID NO: 311754 - DNA, 6452 bp, Homo sapiens
accggccacagcctgcctactgtcacccgcctctcccgcgcgcagatacacgcccccgcctccgtgggcacaaaggcagcgctgctggggaactcgggggaacgcgcacgtgggaaccgccgcagctccacactccaggtacttcttccaaggacctaggtctctcgcccatcggaaagaaaataattctttcaagaagatcagggacaactgatttgaagtctactctgtgcttctaaatccccaattctgctgaaagtgagataccctagagccctagagccccagcagcacccagccaaacccacctccaccatgggggccatgactcagctgttggcaggtgtctttcttgctttccttgccctcgctaccgaaggtggggtcctcaagaaagtcatccggcacaagcgacagagtggggtgaacgccaccctgccagaagagaaccagccagtggtgtttaaccacgtttacaacatcaagctgccagtgggatcccagtgttcggtggatctggagtcagccagtggggagaaagacctggcaccgccttcagagcccagcgaaagctttcaggagcacacagtagatggggaaaaccagattgtcttcacacatcgcatcaacatcccccgccgggcctgtggctgtgccgcagcccctgatgttaaggagctgctgagcagactggaggagctggagaacctggtgtcttccctgagggagcaatgtactgcaggagcaggctgctgtctccagcctgccacaggccgcttggacaccaggcccttctgtagcggtcggggcaacttcagcactgaaggatgtggctgtgtctgcgaacctggctggaaaggccccaactgctctgagcccgaatgtccaggcaactgtcaccttcgaggccggtgcattgatgggcagtgcatctgtgacgacggcttcacgggcgaggactgcagccagctggcttgccccagcgactgcaatgaccagggcaagtgcgtgaatggagtctgcatctgtttcgaaggctacgccggggctgactgcagccgtgaaatctgcccagtgccctgcagtgaggagcacggcacatgtgtagatggcttgtgtgtgtgccacgatggctttgcaggcgatgactgcaacaagcctctgtgtctcaacaattgctacaaccgtggacgatgcgtggagaatgagtgcgtgtgtgatgagggtttcacgggcgaagactgcagtgagctcatctgccccaatgactgcttcgaccggggccgctgcatcaatggcacctgctactgcgaagaaggcttcacaggtgaagactgcgggaaacccacctgcccacatgcctgccacacccagggccggtgtgaggaggggcagtgtgtatgtgatgagggctttgccggtgtggactgcagcgagaagaggtgtcctgctgactgtcacaatcgtggccgctgtgtagacgggcggtgtgagtgtgatgatggtttcactggagctgactgtggggagctcaagtgtcccaatggctgcagtggccatggccgctgtgtcaatgggcagtgtgtgtgtgatgagggctatactggggaggactgcagccagctacggtgccccaatgactgtcacagtcggggccgctgtgtcgagggcaaatgtgtatgtgagcaaggcttcaagggctatgactgcagtgacatgagctgccctaatgactgtcaccagcacggccgctgtgtgaatggcatgtgtgtttgtgatgacggctacacaggggaagactgccgggatcgccaatgccccagggactgcagcaacaggggcctctgtgtggacggacagtgcgtctgtgaggacggcttcaccggccctgactgtgcagaactctcctgtccaaatgactgccatggccagggtcgctgtgtgaatgggcagtgcgtgtgccatgaaggatttatgggcaaagactgcaaggagcaaagatgtcccagtgactgtcatggccagggccgctgcgtggacggccagtgcatctgccacgagggcttcacaggcctggactgtggccagcactcctgccccagtgactgcaacaacttaggacaatgcgtctcgggccgctgcatctgcaacgagggctacagcggagaagactgctcagaggtgtctcctcccaaagacctcgttgtgacagaagtgacggaagagacggtcaacctggcctgggacaatgagatgcgggtcacagagtaccttgtcgtgtacacgcccacccacgagggtggtctggaaatgcagttccgtgtgcctggggaccagacgtccaccatcatccaggagctggagcctggtgtggagtactttatccgtgtatttgccatcctggagaacaagaagagcattcctgtcagcgccagggtggccacgtacttacctgcacctgaaggcctgaaattcaagtccatcaaggagacatctgtggaagtggagtgggatcctctagacattgcttttgaaacctgggagatcatcttccggaatatgaataaagaagatgagggagagatcaccaaaagcctgaggaggccagagacctcttaccggcaaactggtctagctcctgggcaagagtatgagatatctctgcacatagtgaaaaacaatacccggggccctggcctgaagagggtgaccaccacacgcttggatgcccccagccagatcgaggtgaaagatgtcacagacaccactgccttgatcacctggttcaagcccctggctgagatcgatggcattgagctgacctacggcatcaaagacgtgccaggagaccgtaccaccatcgatctcacagaggacgagaaccagtactccatcgggaacctgaagcctgacactgagtacgaggtgtccctcatctcccgcagaggtgacatgtcaagcaacccagccaaagagaccttcacaacaggcctcgatgctcccaggaatcttcgacgtgtttcccagacagataacagcatcaccctggaatggaggaatggcaaggcagctattgacagttacagaattaagtatgcccccatctctggaggggaccacgctgaggttgatgttccaaagagccaacaagccacaaccaaaaccacactcacaggtctgaggccgggaactgaatatgggattggagtttctgctgtgaaggaagacaaggagagcaatccagcgaccatcaacgcagccacagagttggacacgcccaaggaccttcaggtttctgaaactgcagagaccagcctgaccctgctctggaagacaccgttggccaaatttgaccgctaccgcctcaattacagtctccccacaggccagtgggtgggagtgcagcttccaagaaacaccacttcctatgtcctgagaggcctggaaccaggacaggagtacaatgtcctcctgacagccgagaaaggcagacacaagagcaagcccgcacgtgtgaaggcatccactgaacaagcccctgagctggaaaacctcaccgtgactgaggttggctgggatggcctcagactcaactggaccgcagctgaccaggcctatgagcactttatcattcaggtgcaggaggccaacaaggtggaggcagctcggaacctcaccgtgcctggcagccttcgggctgtggacataccgggcctcaaggctgctacgccttatacagtctccatctatggggtgatccagggctatagaacaccagtgctctctgctgaggcctccacaggggaaactcccaatttgggagaggtcgtggtggccgaggtgggctgggatgccctcaaactcaactggactgctccagaaggggcctatgagtactttttcattcaggtgcaggaggctgacacagtagaggcagcccagaacctcaccgtcccaggaggactgaggtccacagacctgcctgggctcaaagcagccactcattataccatcaccatccgcggggtcactcaggacttcagcacaacccctctctctgttgaagtcttgacagaggaggttccagatatgggaaacctcacagtgaccgaggttagctgggatgctctcagactgaactggaccacgccagatggaacctatgaccagtttactattcaggtccaggaggctgaccaggtggaagaggctcacaatctcacggttcctggcagcctgcgttccatggaaatcccaggcctcagggctggcactccttacacagtcaccctgcacggcgaggtcaggggccacagcactcgaccccttgctgtagaggtcgtcacagccatgggctccccaaaggaagtcattttctcagacatcactgaaaattcggctactgtcagctggagggcacccacggcccaagtggagagcttccggattacctatgtgcccattacaggaggtacaccctccatggtaactgtggacggaaccaagactcagaccaggctggtgaaactcatacctggcgtggagtaccttgtcagcatcatcgccatgaagggctttgaggaaagtgaacctgtctcagggtcattcaccacagctctggatggcccatctggcctggtgacagccaacatcactgactcagaagccttggccaggtggcagccagccattgccactgtggacagttatgtcatctcctacacaggcgagaaagtgccagaaattacacgcacggtgtccgggaacacagtggagtatgctctgaccgacctcgagcctgccacggaatacacactgagaatctttgcagagaaagggccccagaagagctcaaccatcactgccaagttcacaacagacctcgattctccaagagacttgactgctactgaggttcagtcggaaactgccctccttacctggcgacccccccgggcatcagtcaccggttacctgctggtctatgaatcagtggatggcacagtcaaggaagtcattgtgggtccagataccacctcctacagcctggcagacctgagcccatccacccactacacagccaagatccaggcactcaatgggcccctgaggagcaatatgatccagaccatcttcaccacaattggactcctgtaccccttccccaaggactgctcccaagcaatgctgaatggagacacgacctctggcctctacaccatttatctgaatggtgataaggctcaggcgctggaagtcttctgtgacatgacctctgatgggggtggatggattgtgttcctgagacgcaaaaacggacgcgagaacttctaccaaaactggaaggcatatgctgctggatttggggaccgcagagaagaattctggcttgggctggacaacctgaacaaaatcacagcccaggggcagtacgagctccgggtggacctgcgggaccatggggagacagcctttgctgtctatgacaagttcagcgtgggagatgccaagactcgctacaagctgaaggtggaggggtacagtgggacagcaggtgactccatggcctaccacaatggcagatccttctccacctttgacaaggacacagattcagccatcaccaactgtgctctgtcctacaaaggggctttctggtacaggaactgtcaccgtgtcaacctgatggggagatatggggacaataaccacagtcagggcgttaactggttccactggaagggccacgaacactcaatccagtttgctgagatgaagctgagaccaagcaacttcagaaatcttgaaggcaggcgcaaacgggcataaattccagggaccactgggtgagagaggaataaggcccagagcgaggaaaggattttaccaaagcatcaatacaaccagcccaaccatcggtccacacctgggcatttggtgagagtcaaagctgaccatggatccctggggccaacggcaacagcatgggcctcacctcctctgtgatttctttctttgcaccaaagacatcagtctccaacatgtttctgttttgttgtttgattcagcaaaaatctcccagtgacaacatcgcaatagttttttacttctcttaggtggctctgggaatgggagaggggtaggatgtacaggggtagtttgttttagaaccagccgtattttacatgaagctgtataattaattgtcattatttttgttagcaaagattaaatgtgtcattggaagccatccctttttttacatttcatacaacagaaaccagaaaagcaatactgtttccattttaaggatatgattaatattattaatataataatgatgatgatgatgatgaaaactaaggatttttcaagagatctttctttccaaaacatttctggacagtacctgattgtattttttttttaaataaaagcacaagtacttttga

SEQ ID NO: 311755 - DNA, 5633 bp, Homo sapiens
accggccacagcctgcctactgtcacccgcctctcccgcgcgcagatacacgcccccgcctccgtgggcacaaaggcagcgctgctggggaactcgggggaacgcgcacgtgggaaccgccgcagctccacactccaggtacttcttccaaggacctaggtctctcgcccatcggaaagaaaataattctttcaagaagatcagggacaactgatttgaagtctactctgtgcttctaaatccccaattctgctgaaagtgagataccctagagccctagagccccagcagcacccagccaaacccacctccaccatgggggccatgactcagctgttggcaggtgtctttcttgctttccttgccctcgctaccgaaggtggggtcctcaagaaagtcatccggcacaagcgacagagtggggtgaacgccaccctgccagaagagaaccagccagtggtgtttaaccacgtttacaacatcaagctgccagtgggatcccagtgttcggtggatctggagtcagccagtggggagaaagacctggcaccgccttcagagcccagcgaaagctttcaggagcacacagtagatggggaaaaccagattgtcttcacacatcgcatcaacatcccccgccgggcctgtggctgtgccgcagcccctgatgttaaggagctgctgagcagactggaggagctggagaacctggtgtcttccctgagggagcaatgtactgcaggagcaggctgctgtctccagcctgccacaggccgcttggacaccaggcccttctgtagcggtcggggcaacttcagcactgaaggatgtggctgtgtctgcgaacctggctggaaaggccccaactgctctgagcccgaatgtccaggcaactgtcaccttcgaggccggtgcattgatgggcagtgcatctgtgacgacggcttcacgggcgaggactgcagccagctggcttgccccagcgactgcaatgaccagggcaagtgcgtgaatggagtctgcatctgtttcgaaggctacgccggggctgactgcagccgtgaaatctgcccagtgccctgcagtgaggagcacggcacatgtgtagatggcttgtgtgtgtgccacgatggctttgcaggcgatgactgcaacaagcctctgtgtctcaacaattgctacaaccgtggacgatgcgtggagaatgagtgcgtgtgtgatgagggtttcacgggcgaagactgcagtgagctcatctgccccaatgactgcttcgaccggggccgctgcatcaatggcacctgctactgcgaagaaggcttcacaggtgaagactgcgggaaacccacctgcccacatgcctgccacacccagggccggtgtgaggaggggcagtgtgtatgtgatgagggctttgccggtgtggactgcagcgagaagaggtgtcctgctgactgtcacaatcgtggccgctgtgtagacgggcggtgtgagtgtgatgatggtttcactggagctgactgtggggagctcaagtgtcccaatggctgcagtggccatggccgctgtgtcaatgggcagtgtgtgtgtgatgagggctatactggggaggactgcagccagctacggtgccccaatgactgtcacagtcggggccgctgtgtcgagggcaaatgtgtatgtgagcaaggcttcaagggctatgactgcagtgacatgagctgccctaatgactgtcaccagcacggccgctgtgtgaatggcatgtgtgtttgtgatgacggctacacaggggaagactgccgggatcgccaatgccccagggactgcagcaacaggggcctctgtgtggacggacagtgcgtctgtgaggacggcttcaccggccctgactgtgcagaactctcctgtccaaatgactgccatggccagggtcgctgtgtgaatgggcagtgcgtgtgccatgaaggatttatgggcaaagactgcaaggagcaaagatgtcccagtgactgtcatggccagggccgctgcgtggacggccagtgcatctgccacgagggcttcacaggcctggactgtggccagcactcctgccccagtgactgcaacaacttaggacaatgcgtctcgggccgctgcatctgcaacgagggctacagcggagaagactgctcagaggtgtctcctcccaaagacctcgttgtgacagaagtgacggaagagacggtcaacctggcctgggacaatgagatgcgggtcacagagtaccttgtcgtgtacacgcccacccacgagggtggtctggaaatgcagttccgtgtgcctggggaccagacgtccaccatcatccaggagctggagcctggtgtggagtactttatccgtgtatttgccatcctggagaacaagaagagcattcctgtcagcgccagggtggccacgtacttacctgcacctgaaggcctgaaattcaagtccatcaaggagacatctgtggaagtggagtgggatcctctagacattgcttttgaaacctgggagatcatcttccggaatatgaataaagaagatgagggagagatcaccaaaagcctgaggaggccagagacctcttaccggcaaactggtctagctcctgggcaagagtatgagatatctctgcacatagtgaaaaacaatacccggggccctggcctgaagagggtgaccaccacacgcttggatgcccccagccagatcgaggtgaaagatgtcacagacaccactgccttgatcacctggttcaagcccctggctgagatcgatggcattgagctgacctacggcatcaaagacgtgccaggagaccgtaccaccatcgatctcacagaggacgagaaccagtactccatcgggaacctgaagcctgacactgagtacgaggtgtccctcatctcccgcagaggtgacatgtcaagcaacccagccaaagagaccttcacaacaggcctcgatgctcccaggaatcttcgacgtgtttcccagacagataacagcatcaccctggaatggaggaatggcaaggcagctattgacagttacagaattaagtatgcccccatctctggaggggaccacgctgaggttgatgttccaaagagccaacaagccacaaccaaaaccacactcacaggtctgaggccgggaactgaatatgggattggagtttctgctgtgaaggaagacaaggagagcaatccagcgaccatcaacgcagccacagagttggacacgcccaaggaccttcaggtttctgaaactgcagagaccagcctgaccctgctctggaagacaccgttggccaaatttgaccgctaccgcctcaattacagtctccccacaggccagtgggtgggagtgcagcttccaagaaacaccacttcctatgtcctgagaggcctggaaccaggacaggagtacaatgtcctcctgacagccgagaaaggcagacacaagagcaagcccgcacgtgtgaaggcatccactgccatgggctccccaaaggaagtcattttctcagacatcactgaaaattcggctactgtcagctggagggcacccacggcccaagtggagagcttccggattacctatgtgcccattacaggaggtacaccctccatggtaactgtggacggaaccaagactcagaccaggctggtgaaactcatacctggcgtggagtaccttgtcagcatcatcgccatgaagggctttgaggaaagtgaacctgtctcagggtcattcaccacagctctggatggcccatctggcctggtgacagccaacatcactgactcagaagccttggccaggtggcagccagccattgccactgtggacagttatgtcatctcctacacaggcgagaaagtgccagaaattacacgcacggtgtccgggaacacagtggagtatgctctgaccgacctcgagcctgccacggaatacacactgagaatctttgcagagaaagggccccagaagagctcaaccatcactgccaagttcacaacagacctcgattctccaagagacttgactgctactgaggttcagtcggaaactgccctccttacctggcgacccccccgggcatcagtcaccggttacctgctggtctatgaatcagtggatggcacagtcaaggaagtcattgtgggtccagataccacctcctacagcctggcagacctgagcccatccacccactacacagccaagatccaggcactcaatgggcccctgaggagcaatatgatccagaccatcttcaccacaattggactcctgtaccccttccccaaggactgctcccaagcaatgctgaatggagacacgacctctggcctctacaccatttatctgaatggtgataaggctcaggcgctggaagtcttctgtgacatgacctctgatgggggtggatggattgtgttcctgagacgcaaaaacggacgcgagaacttctaccaaaactggaaggcatatgctgctggatttggggaccgcagagaagaattctggcttgggctggacaacctgaacaaaatcacagcccaggggcagtacgagctccgggtggacctgcgggaccatggggagacagcctttgctgtctatgacaagttcagcgtgggagatgccaagactcgctacaagctgaaggtggaggggtacagtgggacagcaggtgactccatggcctaccacaatggcagatccttctccacctttgacaaggacacagattcagccatcaccaactgtgctctgtcctacaaaggggctttctggtacaggaactgtcaccgtgtcaacctgatggggagatatggggacaataaccacagtcagggcgttaactggttccactggaagggccacgaacactcaatccagtttgctgagatgaagctgagaccaagcaacttcagaaatcttgaaggcaggcgcaaacgggcataaattccagggaccactgggtgagagaggaataaggcccagagcgaggaaaggattttaccaaagcatcaatacaaccagcccaaccatcggtccacacctgggcatttggtgagagtcaaagctgaccatggatccctggggccaacggcaacagcatgggcctcacctcctctgtgatttctttctttgcaccaaagacatcagtctccaacatgtttctgttttgttgtttgattcagcaaaaatctcccagtgacaacatcgcaatagttttttacttctcttaggtggctctgggaatgggagaggggtaggatgtacaggggtagtttgttttagaaccagccgtattttacatgaagctgtataattaattgtcattatttttgttagcaaagattaaatgtgtcattggaagccatccctttttttacatttcatacaacagaaaccagaaaagcaatactgtttccattttaaggatatgattaatattattaatataataatgatgatgatgatgatgaaaactaaggatttttcaagagatctttctttccaaaacatttctggacagtacctgattgtattttttttttaaataaaagcacaagtacttttga

SEQ ID NO: 311756 - DNA, 3391 bp, Homo sapiens
cgagctcgtacccccatagatggtactctataaggcttgcatcctcgaggcccgggatgtccacagctctgaggctgccaggcaacgtgaggttctgggcttgcctccactttgttgacctcctgcacctgaatgacaaagtgctcataggcattgtcagctgcggtccagttgagtctgaggccatcccagccaacctcagacacggctaaatctcccagctgtgggagatcctctgtgacgacctctacagcaagggttcgagtgctgtggcccctgacctcgccgtgcaggttgactgtgtaaggagtgccagacctgaggcctgggatttccatggaacgcaggctgccaggaaccgtgagattgtgagcctcttccaccaggtcagcctcctggacctgaatagtaaactggtcataggttccatctggcgtggtccagtactctctgctgaggcctccacagccaaagaacctgaaattggaaacttaaatgtttctgacataactcccgagagcttcaatctctcctggatggctaccgatgggatcttcgagacctttaccattgaaattattgattccaataggttgctggagactgtggaatataatatctctggtgctgaacgaactgcccatatctcagggctaccccctagtactgattttattgtctacctctctggacttgctcccagcatccggaccaaaaccatcagtgccacagccacgacagaggccctgccccttctggaaaacctaaccatttccgacattaatccctacgggttcacagtttcctggatggcatcggagaatgcctttgacagctttctagtaacggtggtggattctgggaagctgctggacccccaggaattcacactttcaggaacccagaggaagctggagcttagaggcctcataactggcattggctatgaggttatggtctctggcttcacccaagggcatcaaaccaagcccttgagggctgagattgttacagaagccgaaccggaagttgacaaccttctggtttcagatgccaccccagacggtttccgtctgtcctggacagctgatgaaggggtcttcgacaattttgttctcaaaatcagagataccaaaaagcagtctgagccactggaaataaccctacttgcccccgaacgtaccagggacttaacaggtctcagagaggctactgaatacgaaattgaactctatggaataagcaaaggaaggcgatcccagacagtcagtgctatagcaacaacagccatgggctccccaaaggaagtcattttctcagacatcactgaaaattcggctactgtcagctggagggcacccacggcccaagtggagagcttccggattacctatgtgcccattacaggaggtacaccctccatggtaactgtggacggaaccaagactcagaccaggctggtgaaactcatacctggcgtggagtaccttgtcagcatcatcgccatgaagggctttgaggaaagtgaacctgtctcagggtcattcaccacagctctggatggcccatctggcctggtgacagccaacatcactgactcagaagccttggccaggtggcagccagccattgccactgtggacagttatgtcatctcctacacaggcgagaaagtgccagaaattacacgcacggtgtccgggaacacagtggagtatgctctgaccgacctcgagcctgccacggaatacacactgagaatctttgcagagaaagggccccagaagagctcaaccatcactgccaagttcacaacagacctcgattctccaagagacttgactgctactgaggttcagtcggaaactgccctccttacctggcgacccccccgggcatcagtcaccggttacctgctggtctatgaatcagtggatggcacagtcaaggaagtcattgtgggtccagataccacctcctacagcctggcagacctgagcccatccacccactacacagccaagatccaggcactcaatgggcccctgaggagcaatatgatccagaccatcttcaccacaattggactcctgtaccccttccccaaggactgctcccaagcaatgctgaatggagacacgacctctggcctctacaccatttatctgaatggtgataaggctcaggcgctggaagtcttctgtgacatgacctctgatgggggtggatggattgtgttcctgagacgcaaaaacggacgcgagaacttctaccaaaactggaaggcatatgctgctggatttggggaccgcagagaagaattctggcttgggctggacaacctgaacaaaatcacagcccaggggcagtacgagctccgggtggacctgcgggaccatggggagacagcctttgctgtctatgacaagttcagcgtgggagatgccaagactcgctacaagctgaaggtggaggggtacagtgggacagcaggtgactccatggcctaccacaatggcagatccttctccacctttgacaaggacacagattcagccatcaccaactgtgctctgtcctacaaaggggctttctggtacaggaactgtcaccgtgtcaacctgatggggagatatggggacaataaccacagtcagggcgttaactggttccactggaagggccacgaacactcaatccagtttgctgagatgaagctgagaccaagcaacttcagaaatcttgaaggcaggcgcaaacgggcataaattccagggaccactgggtgagagaggaataaggcccagagcgaggaaaggattttaccaaagcatcaatacaaccagcccaaccatcggtccacacctgggcatttggtgagagtcaaagctgaccatggatccctggggccaacggcaacagcatgggcctcacctcctctgtgatttctttctttgcaccaaagacatcagtctccaacatgtttctgttttgttgtttgattcagcaaaaatctcccagtgacaacatcgcaatagttttttacttctcttaggtggctctgggaatgggagaggggtaggatgtacaggggtagtttgttttagaaccagccgtattttacatgaagctgtataattaattgtcattatttttgttagcaaagattaaatgtgtcattggaagccatccctttttttacatttcatacaacagaaaccagaaaagcaatactgtttccattttaaggatatgattaatattattaatataataatgatgatgatgatgatgaaaactaaggatttttcaagagatctttctttccaaaacatttctggacagtacctgattgtattttttttttaaataaaagcacaagtacttttga

SEQ ID NO: 311757 - DNA, 7170 bp, Homo sapiens
accggccacagcctgcctactgtcacccgcctctcccgcgcgcagatacacgcccccgcctccgtgggcacaaaggcagcgctgctggggaactcgggggaacgcgcacgtgggaaccgccgcagctccacactccaggtacttcttccaaggacctaggtctctcgcccatcggaaagaaaataattctttcaagaagatcagggacaactgatttgaagtctactctgtgcttctaaatccccaattctgctgaaagtgagataccctagagccctagagccccagcagcacccagccaaacccacctccaccatgggggccatgactcagctgttggcaggtgtctttcttgctttccttgccctcgctaccgaaggtggggtcctcaagaaagtcatccggcacaagcgacagagtggggtgaacgccaccctgccagaagagaaccagccagtggtgtttaaccacgtttacaacatcaagctgccagtgggatcccagtgttcggtggatctggagtcagccagtggggagaaagacctggcaccgccttcagagcccagcgaaagctttcaggagcacacagtagatggggaaaaccagattgtcttcacacatcgcatcaacatcccccgccgggcctgtggctgtgccgcagcccctgatgttaaggagctgctgagcagactggaggagctggagaacctggtgtcttccctgagggagcaatgtactgcaggagcaggctgctgtctccagcctgccacaggccgcttggacaccaggcccttctgtagcggtcggggcaacttcagcactgaaggatgtggctgtgtctgcgaacctggctggaaaggccccaactgctctgagcccgaatgtccaggcaactgtcaccttcgaggccggtgcattgatgggcagtgcatctgtgacgacggcttcacgggcgaggactgcagccagctggcttgccccagcgactgcaatgaccagggcaagtgcgtgaatggagtctgcatctgtttcgaaggctacgccggggctgactgcagccgtgaaatctgcccagtgccctgcagtgaggagcacggcacatgtgtagatggcttgtgtgtgtgccacgatggctttgcaggcgatgactgcaacaagcctctgtgtctcaacaattgctacaaccgtggacgatgcgtggagaatgagtgcgtgtgtgatgagggtttcacgggcgaagactgcagtgagctcatctgccccaatgactgcttcgaccggggccgctgcatcaatggcacctgctactgcgaagaaggcttcacaggtgaagactgcgggaaacccacctgcccacatgcctgccacacccagggccggtgtgaggaggggcagtgtgtatgtgatgagggctttgccggtgtggactgcagcgagaagaggtgtcctgctgactgtcacaatcgtggccgctgtgtagacgggcggtgtgagtgtgatgatggtttcactggagctgactgtggggagctcaagtgtcccaatggctgcagtggccatggccgctgtgtcaatgggcagtgtgtgtgtgatgagggctatactggggaggactgcagccagctacggtgccccaatgactgtcacagtcggggccgctgtgtcgagggcaaatgtgtatgtgagcaaggcttcaagggctatgactgcagtgacatgagctgccctaatgactgtcaccagcacggccgctgtgtgaatggcatgtgtgtttgtgatgacggctacacaggggaagactgccgggatcgccaatgccccagggactgcagcaacaggggcctctgtgtggacggacagtgcgtctgtgaggacggcttcaccggccctgactgtgcagaactctcctgtccaaatgactgccatggccagggtcgctgtgtgaatgggcagtgcgtgtgccatgaaggatttatgggcaaagactgcaaggagcaaagatgtcccagtgactgtcatggccagggccgctgcgtggacggccagtgcatctgccacgagggcttcacaggcctggactgtggccagcactcctgccccagtgactgcaacaacttaggacaatgcgtctcgggccgctgcatctgcaacgagggctacagcggagaagactgctcagaggtgtctcctcccaaagacctcgttgtgacagaagtgacggaagagacggtcaacctggcctgggacaatgagatgcgggtcacagagtaccttgtcgtgtacacgcccacccacgagggtggtctggaaatgcagttccgtgtgcctggggaccagacgtccaccatcatccaggagctggagcctggtgtggagtactttatccgtgtatttgccatcctggagaacaagaagagcattcctgtcagcgccagggtggccacgtacttacctgcacctgaaggcctgaaattcaagtccatcaaggagacatctgtggaagtggagtgggatcctctagacattgcttttgaaacctgggagatcatcttccggaatatgaataaagaagatgagggagagatcaccaaaagcctgaggaggccagagacctcttaccggcaaactggtctagctcctgggcaagagtatgagatatctctgcacatagtgaaaaacaatacccggggccctggcctgaagagggtgaccaccacacgcttggatgcccccagccagatcgaggtgaaagatgtcacagacaccactgccttgatcacctggttcaagcccctggctgagatcgatggcattgagctgacctacggcatcaaagacgtgccaggagaccgtaccaccatcgatctcacagaggacgagaaccagtactccatcgggaacctgaagcctgacactgagtacgaggtgtccctcatctcccgcagaggtgacatgtcaagcaacccagccaaagagaccttcacaacaggcctcgatgctcccaggaatcttcgacgtgtttcccagacagataacagcatcaccctggaatggaggaatggcaaggcagctattgacagttacagaattaagtatgcccccatctctggaggggaccacgctgaggttgatgttccaaagagccaacaagccacaaccaaaaccacactcacaggtctgaggccgggaactgaatatgggattggagtttctgctgtgaaggaagacaaggagagcaatccagcgaccatcaacgcagccacagagttggacacgcccaaggaccttcaggtttctgaaactgcagagaccagcctgaccctgctctggaagacaccgttggccaaatttgaccgctaccgcctcaattacagtctccccacaggccagtgggtgggagtgcagcttccaagaaacaccacttcctatgtcctgagaggcctggaaccaggacaggagtacaatgtcctcctgacagccgagaaaggcagacacaagagcaagcccgcacgtgtgaaggcatccactgaacaagcccctgagctggaaaacctcaccgtgactgaggttggctgggatggcctcagactcaactggaccgcagctgaccaggcctatgagcactttatcattcaggtgcaggaggccaacaaggtggaggcagctcggaacctcaccgtgcctggcagccttcgggctgtggacataccgggcctcaaggctgctacgccttatacagtctccatctatggggtgatccagggctatagaacaccagtgctctctgctgaggcctccacaggggaaactcccaatttgggagaggtcgtggtggccgaggtgggctgggatgccctcaaactcaactggactgctccagaaggggcctatgagtactttttcattcaggtgcaggaggctgacacagtagaggcagcccagaacctcaccgtcccaggaggactgaggtccacagacctgcctgggctcaaagcagccactcattataccatcaccatccgcggggtcactcaggacttcagcacaacccctctctctgttgaagtcttgacagaggaggttccagatatgggaaacctcacagtgaccgaggttagctgggatgctctcagactgaactggaccacgccagatggaacctatgaccagtttactattcaggtccaggaggctgaccaggtggaagaggctcacaatctcacggttcctggcagcctgcgttccatggaaatcccaggcctcagggctggcactccttacacagtcaccctgcacggcgaggtcaggggccacagcactcgaccccttgctgtagaggtcgtcacagaggatctcccacagctgggagatttagccgtgtctgaggttggctgggatggcctcagactcaactggaccgcagctgacaatgcctatgagcactttgtcattcaggtgcaggaggtcaacaaagtggaggcagcccagaacctcacgttgcctggcagcctcagggctgtggacatcccgggcctcgaggctgccacgccttatagagtctccatctatggggtgatccggggctatagaacaccagtactctctgctgaggcctccacagccaaagaacctgaaattggaaacttaaatgtttctgacataactcccgagagcttcaatctctcctggatggctaccgatgggatcttcgagacctttaccattgaaattattgattccaataggttgctggagactgtggaatataatatctctggtgctgaacgaactgcccatatctcagggctaccccctagtactgattttattgtctacctctctggacttgctcccagcatccggaccaaaaccatcagtgccacagccacgacagaagccgaaccggaagttgacaaccttctggtttcagatgccaccccagacggtttccgtctgtcctggacagctgatgaaggggtcttcgacaattttgttctcaaaatcagagataccaaaaagcagtctgagccactggaaataaccctacttgcccccgaacgtaccagggacttaacaggtctcagagaggctactgaatacgaaattgaactctatggaataagcaaaggaaggcgatcccagacagtcagtgctatagcaacaacagccatgggctccccaaaggaagtcattttctcagacatcactgaaaattcggctactgtcagctggagggcacccacggcccaagtggagagcttccggattacctatgtgcccattacaggaggtacaccctccatggtaactgtggacggaaccaagactcagaccaggctggtgaaactcatacctggcgtggagtaccttgtcagcatcatcgccatgaagggctttgaggaaagtgaacctgtctcagggtcattcaccacagctctggatggcccatctggcctggtgacagccaacatcactgactcagaagccttggccaggtggcagccagccattgccactgtggacagttatgtcatctcctacacaggcgagaaagtgccagaaattacacgcacggtgtccgggaacacagtggagtatgctctgaccgacctcgagcctgccacggaatacacactgagaatctttgcagagaaagggccccagaagagctcaaccatcagtcaccggttacctgctggtctatgaatcagtggatggcacagtcaaggaagtcattgtgggtccagataccacctcctacagcctggcagacctgagcccatccacccactacacagccaagatccaggcactcaatgggcccctgaggagcaatatgatccagaccatcttcaccacaattggactcctgtaccccttccccaaggactgctcccaagcaatgctgaatggagacacgacctctggcctctacaccatttatctgaatggtgataaggctcaggcgctggaagtcttctgtgacatgacctctgatgggggtggatggattgtgttcctgagacgcaaaaacggacgcgagaacttctaccaaaactggaaggcatatgctgctggatttggggaccgcagagaagaattctggcttgggctggacaacctgaacaaaatcacagcccaggggcagtacgagctccgggtggacctgcgggaccatggggagacagcctttgctgtctatgacaagttcagcgtgggagatgccaagactcgctacaagctgaaggtggaggggtacagtgggacagcaggtgactccatggcctaccacaatggcagatccttctccacctttgacaaggacacagattcagccatcaccaactgtgctctgtcctacaaaggggctttctggtacaggaactgtcaccgtgtcaacctgatggggagatatggggacaataaccacagtcagggcgttaactggttccactggaagggccacgaacactcaatccagtttgctgagatgaagctgagaccaagcaacttcagaaatcttgaaggcaggcgcaaacgggcataaattccagggaccactgggtgagagaggaataaggcccagagcgaggaaaggattttaccaaagcatcaatacaaccagcccaaccatcggtccacacctgggcatttggtgagagtcaaagctgaccatggatccctggggccaacggcaacagcatgggcctcacctcctctgtgatttctttctttgcaccaaagacatcagtctccaacatgtttctgttttgttgtttgattcagcaaaaatctcccagtgacaacatcgcaatagttttttacttctcttaggtggctctgggaatgggagaggggtaggatgtacaggggtagtttgttttagaaccagccgtattttacatgaagctgtataattaattgtcattatttttgttagcaaagattaaatgtgtcattggaagccatccctttttttacatttcatacaacagaaaccagaaaagcaatactgtttccattttaaggatatgattaatattattaatataataatgatgatgatgatgatgaaaactaaggatttttcaagagatctttctttccaaaacatttctggacagtacctgattgtattttttttttaaataaaagcacaagtacttttga

SEQ ID NO: 311758 - DNA, 7866 bp, Homo sapiens
accggccacagcctgcctactgtcacccgcctctcccgcgcgcagatacacgcccccgcctccgtgggcacaaaggcagcgctgctggggaactcgggggaacgcgcacgtgggaaccgccgcagctccacactccaggtacttcttccaaggacctaggtctctcgcccatcggaaagaaaataattctttcaagaagatcagggacaactgatttgaagtctactctgtgcttctaaatccccaattctgctgaaagtgagataccctagagccctagagccccagcagcacccagccaaacccacctccaccatgggggccatgactcagctgttggcaggtgtctttcttgctttccttgccctcgctaccgaaggtggggtcctcaagaaagtcatccggcacaagcgacagagtggggtgaacgccaccctgccagaagagaaccagccagtggtgtttaaccacgtttacaacatcaagctgccagtgggatcccagtgttcggtggatctggagtcagccagtggggagaaagacctggcaccgccttcagagcccagcgaaagctttcaggagcacacagtagatggggaaaaccagattgtcttcacacatcgcatcaacatcccccgccgggcctgtggctgtgccgcagcccctgatgttaaggagctgctgagcagactggaggagctggagaacctggtgtcttccctgagggagcaatgtactgcaggagcaggctgctgtctccagcctgccacaggccgcttggacaccaggcccttctgtagcggtcggggcaacttcagcactgaaggatgtggctgtgtctgcgaacctggctggaaaggccccaactgctctgagcccgaatgtccaggcaactgtcaccttcgaggccggtgcattgatgggcagtgcatctgtgacgacggcttcacgggcgaggactgcagccagctggcttgccccagcgactgcaatgaccagggcaagtgcgtgaatggagtctgcatctgtttcgaaggctacgccggggctgactgcagccgtgaaatctgcccagtgccctgcagtgaggagcacggcacatgtgtagatggcttgtgtgtgtgccacgatggctttgcaggcgatgactgcaacaagcctctgtgtctcaacaattgctacaaccgtggacgatgcgtggagaatgagtgcgtgtgtgatgagggtttcacgggcgaagactgcagtgagctcatctgccccaatgactgcttcgaccggggccgctgcatcaatggcacctgctactgcgaagaaggcttcacaggtgaagactgcgggaaacccacctgcccacatgcctgccacacccagggccggtgtgaggaggggcagtgtgtatgtgatgagggctttgccggtgtggactgcagcgagaagaggtgtcctgctgactgtcacaatcgtggccgctgtgtagacgggcggtgtgagtgtgatgatggtttcactggagctgactgtggggagctcaagtgtcccaatggctgcagtggccatggccgctgtgtcaatgggcagtgtgtgtgtgatgagggctatactggggaggactgcagccagctacggtgccccaatgactgtcacagtcggggccgctgtgtcgagggcaaatgtgtatgtgagcaaggcttcaagggctatgactgcagtgacatgagctgccctaatgactgtcaccagcacggccgctgtgtgaatggcatgtgtgtttgtgatgacggctacacaggggaagactgccgggatcgccaatgccccagggactgcagcaacaggggcctctgtgtggacggacagtgcgtctgtgaggacggcttcaccggccctgactgtgcagaactctcctgtccaaatgactgccatggccagggtcgctgtgtgaatgggcagtgcgtgtgccatgaaggatttatgggcaaagactgcaaggagcaaagatgtcccagtgactgtcatggccagggccgctgcgtggacggccagtgcatctgccacgagggcttcacaggcctggactgtggccagcactcctgccccagtgactgcaacaacttaggacaatgcgtctcgggccgctgcatctgcaacgagggctacagcggagaagactgctcagaggtgtctcctcccaaagacctcgttgtgacagaagtgacggaagagacggtcaacctggcctgggacaatgagatgcgggtcacagagtaccttgtcgtgtacacgcccacccacgagggtggtctggaaatgcagttccgtgtgcctggggaccagacgtccaccatcatccaggagctggagcctggtgtggagtactttatccgtgtatttgccatcctggagaacaagaagagcattcctgtcagcgccagggtggccacgtacttacctgcacctgaaggcctgaaattcaagtccatcaaggagacatctgtggaagtggagtgggatcctctagacattgcttttgaaacctgggagatcatcttccggaatatgaataaagaagatgagggagagatcaccaaaagcctgaggaggccagagacctcttaccggcaaactggtctagctcctgggcaagagtatgagatatctctgcacatagtgaaaaacaatacccggggccctggcctgaagagggtgaccaccacacgcttggatgcccccagccagatcgaggtgaaagatgtcacagacaccactgccttgatcacctggttcaagcccctggctgagatcgatggcattgagctgacctacggcatcaaagacgtgccaggagaccgtaccaccatcgatctcacagaggacgagaaccagtactccatcgggaacctgaagcctgacactgagtacgaggtgtccctcatctcccgcagaggtgacatgtcaagcaacccagccaaagagaccttcacaacaggcctcgatgctcccaggaatcttcgacgtgtttcccagacagataacagcatcaccctggaatggaggaatggcaaggcagctattgacagttacagaattaagtatgcccccatctctggaggggaccacgctgaggttgatgttccaaagagccaacaagccacaaccaaaaccacactcacaggtctgaggccgggaactgaatatgggattggagtttctgctgtgaaggaagacaaggagagcaatccagcgaccatcaacgcagccacagagttggacacgcccaaggaccttcaggtttctgaaactgcagagaccagcctgaccctgctctggaagacaccgttggccaaatttgaccgctaccgcctcaattacagtctccccacaggccagtgggtgggagtgcagcttccaagaaacaccacttcctatgtcctgagaggcctggaaccaggacaggagtacaatgtcctcctgacagccgagaaaggcagacacaagagcaagcccgcacgtgtgaaggcatccactgaacaagcccctgagctggaaaacctcaccgtgactgaggttggctgggatggcctcagactcaactggaccgcagctgaccaggcctatgagcactttatcattcaggtgcaggaggccaacaaggtggaggcagctcggaacctcaccgtgcctggcagccttcgggctgtggacataccgggcctcaaggctgctacgccttatacagtctccatctatggggtgatccagggctatagaacaccagtgctctctgctgaggcctccacaggggaaactcccaatttgggagaggtcgtggtggccgaggtgggctgggatgccctcaaactcaactggactgctccagaaggggcctatgagtactttttcattcaggtgcaggaggctgacacagtagaggcagcccagaacctcaccgtcccaggaggactgaggtccacagacctgcctgggctcaaagcagccactcattataccatcaccatccgcggggtcactcaggacttcagcacaacccctctctctgttgaagtcttgacagaggaggttccagatatgggaaacctcacagtgaccgaggttagctgggatgctctcagactgaactggaccacgccagatggaacctatgaccagtttactattcaggtccaggaggctgaccaggtggaagaggctcacaatctcacggttcctggcagcctgcgttccatggaaatcccaggcctcagggctggcactccttacacagtcaccctgcacggcgaggtcaggggccacagcactcgaccccttgctgtagaggtcgtcacagaggatctcccacagctgggagatttagccgtgtctgaggttggctgggatggcctcagactcaactggaccgcagctgacaatgcctatgagcactttgtcattcaggtgcaggaggtcaacaaagtggaggcagcccagaacctcacgttgcctggcagcctcagggctgtggacatcccgggcctcgaggctgccacgccttatagagtctccatctatggggtgatccggggctatagaacaccagtactctctgctgaggcctccacagccaaagaacctgaaattggaaacttaaatgtttctgacataactcccgagagcttcaatctctcctggatggctaccgatgggatcttcgagacctttaccattgaaattattgattccaataggttgctggagactgtggaatataatatctctggtgctgaacgaactgcccatatctcagggctaccccctagtactgattttattgtctacctctctggacttgctcccagcatccggaccaaaaccatcagtgccacagccacgacagaggccctgccccttctggaaaacctaaccatttccgacattaatccctacgggttcacagtttcctggatggcatcggagaatgcctttgacagctttctagtaacggtggtggattctgggaagctgctggacccccaggaattcacactttcaggaacccagaggaagctggagcttagaggcctcataactggcattggctatgaggttatggtctctggcttcacccaagggcatcaaaccaagcccttgagggctgagattgttacagaagccgaaccggaagttgacaaccttctggtttcagatgccaccccagacggtttccgtctgtcctggacagctgatgaaggggtcttcgacaattttgttctcaaaatcagagataccaaaaagcagtctgagccactggaaataaccctacttgcccccgaacgtaccagggacttaacaggtctcagagaggctactgaatacgaaattgaactctatggaataagcaaaggaaggcgatcccagacagtcagtgctatagcaacaacagccatgggctccccaaaggaagtcattttctcagacatcactgaaaattcggctactgtcagctggagggcacccacggcccaagtggagagcttccggattacctatgtgcccattacaggaggtacaccctccatggtaactgtggacggaaccaagactcagaccaggctggtgaaactcatacctggcgtggagtaccttgtcagcatcatcgccatgaagggctttgaggaaagtgaacctgtctcagggtcattcaccacagctctggatggcccatctggcctggtgacagccaacatcactgactcagaagccttggccaggtggcagccagccattgccactgtggacagttatgtcatctcctacacaggcgagaaagtgccagaaattacacgcacggtgtccgggaacacagtggagtatgctctgaccgacctcgagcctgccacggaatacacactgagaatctttgcagagaaagggccccagaagagctcaaccatcactgccaagttcacaacagacctcgattctccaagagacttgactgctactgaggttcagtcggaaactgccctccttacctggcgacccccccgggcatcagtcaccggttacctgctggtctatgaatcagtggatggcacagtcaaggaagtcattgtgggtccagataccacctcctacagcctggcagacctgagcccatccacccactacacagccaagatccaggcactcaatgggcccctgaggagcaatatgatccagaccatcttcaccacaattggactcctgtaccccttccccaaggactgctcccaagcaatgctgaatggagacacgacctctggcctctacaccatttatctgaatggtgataaggctcaggcgctggaagtcttctgtgacatgacctctgatgggggtggatggattgtgttcctgagacgcaaaaacggacgcgagaacttctaccaaaactggaaggcatatgctgctggatttggggaccgcagagaagaattctggcttgggctggacaacctgaacaaaatcacagcccaggggcagtacgagctccgggtggacctgcgggaccatggggagacagcctttgctgtctatgacaagttcagcgtgggagatgccaagactcgctacaagctgaaggtggaggggtacagtgggacagcaggtgactccatggcctaccacaatggcagatccttctccacctttgacaaggacacagattcagccatcaccaactgtgctctgtcctacaaaggggctttctggtacaggaactgtcaccgtgtcaacctgatggggagatatggggacaataaccacagtcagggcgttaactggttccactggaagggccacgaacactcaatccagtttgctgagatgaagctgagaccaagcaacttcagaaatcttgaaggcaggcgcaaacgggcataaattccagggaccactgggtgagagaggaataaggcccagagcgaggaaaggattttaccaaagcatcaatacaaccagcccaaccatcggtccacacctgggcatttggtgagagtcaaagctgaccatggatccctggggccaacggcaacagcatgggcctcacctcctctgtgatttctttctttgcaccaaagacatcagtctccaacatgtttctgttttgttgtttgattcagcaaaaatctcccagtgacaacatcgcaatagttttttacttctcttaggtggctctgggaatgggagaggggtaggatgtacaggggtagtttgttttagaaccagccgtattttacatgaagctgtataattaattgtcattatttttgttagcaaagattaaatgtgtcattggaagccatccctttttttacatttcatacaacagaaaccagaaaagcaatactgtttccattttaaggatatgattaatattattaatataataatgatgatgatgatgatgaaaactaaggatttttcaagagatctttctttccaaaacatttctggacagtacctgattgtattttttttttaaataaaagcacaagtacttttgaaaaaacacaccgcgccggccaagaaacacaacagaagaggggcccgccaaacaaataccccccgcgagggggcccaacatctaacgcgaccacacggtttgtggcaaacaggggggccccaataggacgcgcgcaaataagcgcaagaccgggcgcacgacaacacagccgcggagggcaaacaggcacgcggcgatcctggcaagaaacccagctcgcccgggcaatcgggaccaccacaagaattaagcgggataatacactagcgattggtacaacagcatgcgcgggaacctgacaggaataacgaaacacacgcgcg

SEQ ID NO: 311759 - DNA, 1491 bp, Homo sapiens
  misc_feature (37)..(37): n is a, c, g, or t
  misc_feature (77)..(77): n is a, c, g, or t
agcgtgtggagcatgccatgactcgttacaagctganggtggagagggtacagtgggacagcaggtgactccatggnctaccacaatggcagatccttctccacctttgacaaggacacagaagatccaggcactcaatgggcccctgaggagcaatatgatccagaccatcttcaccacaattggactcctgtaccccttccccaaggactgctcccaagcaatgctgaatggagacacgacctctggcctctacaccatttatctgaatggtgataaggctcaggcgctggaagtcttctgtgacatgacctctgatgggggtggatggattgtgttcctgagacgcaaaaacggacgcgagaacttctaccaaaactggaaggcatatgctgctggatttggggaccgcagagaagaattctggcttgggctggacaacctgaacaaaatcacagcccaggggcagtacgagctccgggtggacctgcgggaccatggggagacagcctttgctgtctatgacaagttcagcgtgggagatgccaagactcgctacaagctgaaggtggaggggtacagtgggacagcaggtgactccatggcctaccacaatggcagatccttctccacctttgacaaggacacagattcagccatcaccaactgtgctctgtcctacaaaggggctttctggtacaggaactgtcaccgtgtcaacctgatggggagatatggggacaataaccacagtcagggcgttaactggttccactggaagggccacgaacactcaatccagtttgctgagatgaagctgagaccaagcaacttcagaaatcttgaaggcaggcgcaaacgggcataaattccagggaccactgggtgagagaggaataaggcccagagcgaggaaaggattttaccaaagcatcaatacaaccagcccaaccatcggtccacacctgggcatttggtgagagtcaaagctgaccatggatccctggggccaacggcaacagcatgggcctcacctcctctgtgatttctttctttgcaccaaagacatcagtctccaacatgtttctgttttgttgtttgattcagcaaaaatctcccagtgacaacatcgcaatagttttttacttctcttaggtggctctgggaatgggagaggggtaggatgtacaggggtagtttgttttagaaccagccgtattttacatgaagctgtataattaattgtcattatttttgttagcaaagattaaatgtgtcattggaagccatccctttttttacatttcatacaacagaaaccagaaaagcaatactgtttccattttaaggatatgattaatattattaatataataatgatgatgatgatgatgaaaactaaggatttttcaagagatctttctttccaaaacatttctggacagtacctgattgtattttttttttaaataaaagcacaagtacttttga

SEQ ID NO: 311760 - DNA, 1545 bp, Homo sapiens
  misc_feature (57)..(57): n is a, c, g, or t
  misc_feature (60)..(60): n is a, c, g, or t
tcatcccggcaaacaacgtataaccgttattagtgcattcactggacgacgtgaatnaancttgacatatacatccccacacccacccacataacctccccattatcaatatcctgcaccagaatgtgtgcatttgttacaatcaatgaacctacattgacacatcattatcacccaaaactgggtggtatttttaatccctgtttatcaggtgagaacaccaagacttaaggaggggcaggtgaccacccaaagttacatagcaaattagggatggacagaatggagcctgatgctctctccacagtgccacactccttcctctcacaacgatgccctctttcctgcaatagcttaagtacacccagattcatcgatatgttcataggtgttcctgagacgcaaaaacggacgcgagaacttctaccaaaactggaaggcatatgctgctggatttggggaccgcagagaagaattctggcttgggctggacaacctgaacaaaatcacagcccaggggcagtacgagctccgggtggacctgcgggaccatggggagacagcctttgctgtctatgacaagttcagcgtgggagatgccaagactcgctacaagctgaaggtggaggggtacagtgggacagcaggtgactccatggcctaccacaatggcagatccttctccacctttgacaaggacacagattcagccatcaccaactgtgctctgtcctacaaaggggctttctggtacaggaactgtcaccgtgtcaacctgatggggagatatggggacaataaccacagtcagggcgttaactggttccactggaagggccacgaacactcaatccagtttgctgagatgaagctgagaccaagcaacttcagaaatcttgaaggcaggcgcaaacgggcataaattccagggaccactgggtgagagaggaataaggcccagagcgaggaaaggattttaccaaagcatcaatacaaccagcccaaccatcggtccacacctgggcatttggtgagagtcaaagctgaccatggatccctggggccaacggcaacagcatgggcctcacctcctctgtgatttctttctttgcaccaaagacatcagtctccaacatgtttctgttttgttgtttgattcagcaaaaatctcccagtgacaacatcgcaatagttttttacttctcttaggtggctctgggaatgggagaggggtaggatgtacaggggtagtttgttttagaaccagccgtattttacatgaagctgtataattaattgtcattatttttgttagcaaagattaaatgtgtcattggaagccatccctttttttacatttcatacaacagaaaccagaaaagcaatactgtttccattttaaggatatgattaatattattaatataataatgatgatgatgatgatgaaaactaaggatttttcaagagatctttctttccaaaacatttctggacagtacctgattgtattttttttttaaataaaagcacaagtacttttga

SEQ ID NO: 311761 - DNA, 957 bp, Homo sapiens
tgtccaggagggaaatttcagctgagatttctcaggtccatattttctgtctctcccaggtgactccatggcctaccacaatggcagatccttctccacctttgacaaggacacagattcagccatcaccaactgtgctctgtcctacaaaggggctttctggtacaggaactgtcaccgtgtcaacctgatggggagatatggggacaataaccacagtcagggcgttaactggttccactggaagggccacgaacactcaatccagtttgctgagatgaagctgagaccaagcaacttcagaaatcttgaaggcaggcgcaaacgggcataaattccagggaccactgggtgagagaggaataaggcccagagcgaggaaaggattttaccaaagcatcaatacaaccagcccaaccatcggtccacacctgggcatttggtgagagtcaaagctgaccatggatccctggggccaacggcaacagcatgggcctcacctcctctgtgatttctttctttgcaccaaagacatcagtctccaacatgtttctgttttgttgtttgattcagcaaaaatctcccagtgacaacatcgcaatagttttttacttctcttaggtggctctgggaatgggagaggggtaggatgtacaggggtagtttgttttagaaccagccgtattttacatgaagctgtataattaattgtcattatttttgttagcaaagattaaatgtgtcattggaagccatccctttttttacatttcatacaacagaaaccagaaaagcaatactgtttccattttaaggatatgattaatattattaatataataatgatgatgatgatgatgaaaactaaggatttttcaagagatctttctttccaaaacatttctggacagtacctgattgtattttttttttaaataaaagcacaagtacttttga

SEQ ID NO: 311762 - DNA, 6976 bp, Homo sapiens
accggccacagcctgcctactgtcacccgcctctcccgcgcgcagatacacgcccccgcctccgtgggcacaaaggcagcgctgctggggaactcgggggaacgcgcacgtgggaaccgccgcagctccacactccaggtacttcttccaaggacctaggtctctcgcccatcggaaagaaaataattctttcaagaagatcagggacaactgatttgaagtctactctgtgcttctaaatccccaattctgctgaaagtgagataccctagagccctagagccccagcagcacccagccaaacccacctccaccatgggggccatgactcagctgttggcaggtgtctttcttgctttccttgccctcgctaccgaaggtggggtcctcaagaaagtcatccggcacaagcgacagagtggggtgaacgccaccctgccagaagagaaccagccagtggtgtttaaccacgtttacaacatcaagctgccagtgggatcccagtgttcggtggatctggagtcagccagtggggagaaagacctggcaccgccttcagagcccagcgaaagctttcaggagcacacagtagatggggaaaaccagattgtcttcacacatcgcatcaacatcccccgccgggcctgtggctgtgccgcagcccctgatgttaaggagctgctgagcagactggaggagctggagaacctggtgtcttccctgagggagcaatgtactgcaggagcaggctgctgtctccagcctgccacaggccgcttggacaccaggcccttctgtagcggtcggggcaacttcagcactgaaggatgtggctgtgtctgcgaacctggctggaaaggccccaactgctctgagcccgaatgtccaggcaactgtcaccttcgaggccggtgcattgatgggcagtgcatctgtgacgacggcttcacgggcgaggactgcagccagctggcttgccccagcgactgcaatgaccagggcaagtgcgtgaatggagtctgcatctgtttcgaaggctacgccggggctgactgcagccgtgaaatctgcccagtgccctgcagtgaggagcacggcacatgtgtagatggcttgtgtgtgtgccacgatggctttgcaggcgatgactgcaacaagcctctgtgtctcaacaattgctacaaccgtggacgatgcgtggagaatgagtgcgtgtgtgatgagggtttcacgggcgaagactgcagtgagctcatctgccccaatgactgcttcgaccggggccgctgcatcaatggcacctgctactgcgaagaaggcttcacaggtgaagactgcgggaaacccacctgcccacatgcctgccacacccagggccggtgtgaggaggggcagtgtgtatgtgatgagggctttgccggtgtggactgcagcgagaagaggtgtcctgctgactgtcacaatcgtggccgctgtgtagacgggcggtgtgagtgtgatgatggtttcactggagctgactgtggggagctcaagtgtcccaatggctgcagtggccatggccgctgtgtcaatgggcagtgtgtgtgtgatgagggctatactggggaggactgcagccagctacggtgccccaatgactgtcacagtcggggccgctgtgtcgagggcaaatgtgtatgtgagcaaggcttcaagggctatgactgcagtgacatgagctgccctaatgactgtcaccagcacggccgctgtgtgaatggcatgtgtgtttgtgatgacggctacacaggggaagactgccgggatcgccaatgccccagggactgcagcaacaggggcctctgtgtggacggacagtgcgtctgtgaggacggcttcaccggccctgactgtgcagaactctcctgtccaaatgactgccatggccagggtcgctgtgtgaatgggcagtgcgtgtgccatgaaggatttatgggcaaagactgcaaggagcaaagatgtcccagtgactgtcatggccagggccgctgcgtggacggccagtgcatctgccacgagggcttcacaggcctggactgtggccagcactcctgccccagtgactgcaacaacttaggacaatgcgtctcgggccgctgcatctgcaacgagggctacagcggagaagactgctcagaggtgtctcctcccaaagacctcgttgtgacagaagtgacggaagagacggtcaacctggcctgggacaatgagatgcgggtcacagagtaccttgtcgtgtacacgcccacccacgagggtggtctggaaatgcagttccgtgtgcctggggaccagacgtccaccatcatccaggagctggagcctggtgtggagtactttatccgtgtatttgccatcctggagaacaagaagagcattcctgtcagcgccagggtggccacgtacttacctgcacctgaaggcctgaaattcaagtccatcaaggagacatctgtggaagtggagtgggatcctctagacattgcttttgaaacctgggagatcatcttccggaatatgaataaagaagatgagggagagatcaccaaaagcctgaggaggccagagacctcttaccggcaaactggtctagctcctgggcaagagtatgagatatctctgcacatagtgaaaaacaatacccggggccctggcctgaagagggtgaccaccacacgcttggatgcccccagccagatcgaggtgaaagatgtcacagacaccactgccttgatcacctggttcaagcccctggctgagatcgatggcattgagctgacctacggcatcaaagacgtgccaggagaccgtaccaccatcgatctcacagaggacgagaaccagtactccatcgggaacctgaagcctgacactgagtacgaggtgtccctcatctcccgcagaggtgacatgtcaagcaacccagccaaagagaccttcacaacaggcctcgatgctcccaggaatcttcgacgtgtttcccagacagataacagcatcaccctggaatggaggaatggcaaggcagctattgacagttacagaattaagtatgcccccatctctggaggggaccacgctgaggttgatgttccaaagagccaacaagccacaaccaaaaccacactcacaggtctgaggccgggaactgaatatgggattggagtttctgctgtgaaggaagacaaggagagcaatccagcgaccatcaacgcagccacagagttggacacgcccaaggaccttcaggtttctgaaactgcagagaccagcctgaccctgctctggaagacaccgttggccaaatttgaccgctaccgcctcaattacagtctccccacaggccagtgggtgggagtgcagcttccaagaaacaccacttcctatgtcctgagaggcctggaaccaggacaggagtacaatgtcctcctgacagccgagaaaggcagacacaagagcaagcccgcacgtgtgaaggcatccactgaacaagcccctgagctggaaaacctcaccgtgactgaggttggctgggatggcctcagactcaactggaccgcagctgaccaggcctatgagcactttatcattcaggtgcaggaggccaacaaggtggaggcagctcggaacctcaccgtgcctggcagccttcgggctgtggacataccgggcctcaaggctgctacgccttatacagtctccatctatggggtgatccagggctatagaacaccagtgctctctgctgaggcctccacaggggaaactcccaatttgggagaggtcgtggtggccgaggtgggctgggatgccctcaaactcaactggactgctccagaaggggcctatgagtactttttcattcaggtgcaggaggctgacacagtagaggcagcccagaacctcaccgtcccaggaggactgaggtccacagacctgcctgggctcaaagcagccactcattataccatcaccatccgcggggtcactcaggacttcagcacaacccctctctctgttgaagtcttgacagaggaggttccagatatgggaaacctcacagtgaccgaggttagctgggatgctctcagactgaactggaccacgccagatggaacctatgaccagtttactattcaggtccaggaggctgaccaggtggaagaggctcacaatctcacggttcctggcagcctgcgttccatggaaatcccaggcctcagggctggcactccttacacagtcaccctgcacggcgaggtcaggggccacagcactcgaccccttgctgtagaggtcgtcacagaggatctcccacagctgggagatttagccgtgtctgaggttggctgggatggcctcagactcaactggaccgcagctgacaatgcctatgagcactttgtcattcaggtgcaggaggtcaacaaagtggaggcagcccagaacctcacgttgcctggcagcctcagggctgtggacatcccgggcctcgaggctgccacgccttatagagtctccatctatggggtgatccggggctatagaacaccagtactctctgctgaggcctccacagccaaagaacctgaaattggaaacttaaatgtttctgacataactcccgagagcttcaatctctcctggatggctaccgatgggatcttcgagacctttaccattgaaattattgattccaataggttgctggagactgtggaatataatatctctggtgctgaacgaactgcccatatctcagggctaccccctagtactgattttattgtctacctctctggacttgctcccagcatccggaccaaaaccatcagtgccacagccacgacagaggccctgccccttctggaaaacctaaccatttccgacattaatccctacgggttcacagtttcctggatggcatcggagaatgcctttgacagctttctagtaacggtggtggattctgggaagctgctggacccccaggaattcacactttcaggaacccagaggaagctggagcttagaggcctcataactggcattggctatgaggttatggtctctggcttcacccaagggcatcaaaccaagcccttgagggctgagattgttacagaagccgaaccggaagttgacaaccttctggtttcagatgccaccccagacggtttccgtctgtcctggacagctgatgaaggggtcttcgacaattttgttctcaaaatcagagataccaaaaagcagtctgagccactggaaataaccctacttgcccccgaacgtaccagggacttaacaggtctcagagaggctactgaatacgaaattgaactctatggaataagcaaaggaaggcgatcccagacagtcagtgctatagcaacaacagccatgggctccccaaaggaagtcattttctcagacatcactgaaaattcggctactgtcagctggagggcacccacggcccaagtggagagcttccggattacctatgtgcccattacaggaggtacaccctccatggtaactgtggacggaaccaagactcagaccaggctggtgaaactcatacctggcgtggagtaccttgtcagcatcatcgccatgaagggctttgaggaaagtgaacctgtctcagggtcattcaccacagctctggatggcccatctggcctggtgacagccaacatcactgactcagaagccttggccaggtggcagccagccattgccactgtggacagttatgtcatctcctacacaggcgagaaagtgccagaaattacacgcacggtgtccgggaacacagtggagtatgctctgaccgacctcgagcctgccacggaatacacactgagaatctttgcagagaaagggccccagaagagctcaaccatcactgccaagttcacaacagacctcgattctccaagagacttgactgctactgaggttcagtcggaaactgccctccttacctggcgacccccccgggcatcagtcaccggttacctgctggtctatgaatcagtggatggcacagtcaaggaagtcattgtgggtccagataccacctcctacagcctggcagacctgagcccatccacccactacacagccaagatccaggcactcaatgggcccctgaggagcaatatgatccagaccatcttcaccacaattggactcctgtaccccttccccaaggactgctcccaagcaatgctgaatggagacacgacctctggcctctacaccatttatctgaatggtgataaggctcaggcgctggaagtcttctgtgacatgacctctgatgggggtggatggattgtgttcctgagacgcaaaaacggacgcgagaacttctaccaaaactggaaggcatatgctgctggatttggggaccgcagagaagaattctggcttgggctggacaacctgaacaaaatcacagcccaggggcagtacgagctccgggtggacctgcgggaccatggggagacagcctttgctgtctatgacaagttcagcgtgggagatgccaagactcgctacaagctgaaggtggaggggtacagtgggacagcaggtgactccatggcctaccacaatggcagatccttctccacctttgacaaggacacagattcagccatcaccaactgtgctctgtcctacaaaggggctttctggtacaggaactgtcaccgtgtcaacctgatggggagatatggggacaataaccacagtcagggcgttaactggttccactggaagggccacgaacactcaatccagtttgctgagatgaagctgagaccaagcaacttcagaaatcttgaaggcaggcgcaaacgggcataaattccagggaccactgggtgagatctccgtcgactgggatcctctagatataaca

SEQ ID NO: 311763 - DNA, 7147 bp, Homo sapiens
accggccacagcctgcctactgtcacccgcctctcccgcgcgcagatacacgcccccgcctccgtgggcacaaaggcagcgctgctggggaactcgggggaacgcgcacgtgggaaccgccgcagctccacactccaggtacttcttccaaggacctaggtctctcgcccatcggaaagaaaataattctttcaagaagatcagggacaactgatttgaagtctactctgtgcttctaaatccccaattctgctgaaagtgagataccctagagccctagagccccagcagcacccagccaaacccacctccaccatgggggccatgactcagctgttggcaggtgtctttcttgctttccttgccctcgctaccgaaggtggggtcctcaagaaagtcatccggcacaagcgacagagtggggtgaacgccaccctgccagaagagaaccagccagtggtgtttaaccacgtttacaacatcaagctgccagtgggatcccagtgttcggtggatctggagtcagccagtggggagaaagacctggcaccgccttcagagcccagcgaaagctttcaggagcacacagtagatggggaaaaccagattgtcttcacacatcgcatcaacatcccccgccgggcctgtggctgtgccgcagcccctgatgttaaggagctgctgagcagactggaggagctggagaacctggtgtcttccctgagggagcaatgtactgcaggagcaggctgctgtctccagcctgccacaggccgcttggacaccaggcccttctgtagcggtcggggcaacttcagcactgaaggatgtggctgtgtctgcgaacctggctggaaaggccccaactgctctgagcccgaatgtccaggcaactgtcaccttcgaggccggtgcattgatgggcagtgcatctgtgacgacggcttcacgggcgaggactgcagccagctggcttgccccagcgactgcaatgaccagggcaagtgcgtgaatggagtctgcatctgtttcgaaggctacgccggggctgactgcagccgtgaaatctgcccagtgccctgcagtgaggagcacggcacatgtgtagatggcttgtgtgtgtgccacgatggctttgcaggcgatgactgcaacaagcctctgtgtctcaacaattgctacaaccgtggacgatgcgtggagaatgagtgcgtgtgtgatgagggtttcacgggcgaagactgcagtgagctcatctgccccaatgactgcttcgaccggggccgctgcatcaatggcacctgctactgcgaagaaggcttcacaggtgaagactgcgggaaacccacctgcccacatgcctgccacacccagggccggtgtgaggaggggcagtgtgtatgtgatgagggctttgccggtgtggactgcagcgagaagaggtgtcctgctgactgtcacaatcgtggccgctgtgtagacgggcggtgtgagtgtgatgatggtttcactggagctgactgtggggagctcaagtgtcccaatggctgcagtggccatggccgctgtgtcaatgggcagtgtgtgtgtgatgagggctatactggggaggactgcagccagctacggtgccccaatgactgtcacagtcggggccgctgtgtcgagggcaaatgtgtatgtgagcaaggcttcaagggctatgactgcagtgacatgagctgccctaatgactgtcaccagcacggccgctgtgtgaatggcatgtgtgtttgtgatgacggctacacaggggaagactgccgggatcgccaatgccccagggactgcagcaacaggggcctctgtgtggacggacagtgcgtctgtgaggacggcttcaccggccctgactgtgcagaactctcctgtccaaatgactgccatggccagggtcgctgtgtgaatgggcagtgcgtgtgccatgaaggatttatgggcaaagactgcaaggagcaaagatgtcccagtgactgtcatggccagggccgctgcgtggacggccagtgcatctgccacgagggcttcacaggcctggactgtggccagcactcctgccccagtgactgcaacaacttaggacaatgcgtctcgggccgctgcatctgcaacgagggctacagcggagaagactgctcagaggtgtctcctcccaaagacctcgttgtgacagaagtgacggaagagacggtcaacctggcctgggacaatgagatgcgggtcacagagtaccttgtcgtgtacacgcccacccacgagggtggtctggaaatgcagttccgtgtgcctggggaccagacgtccaccatcatccaggagctggagcctggtgtggagtactttatccgtgtatttgccatcctggagaacaagaagagcattcctgtcagcgccagggtggccacgtacttacctgcacctgaaggcctgaaattcaagtccatcaaggagacatctgtggaagtggagtgggatcctctagacattgcttttgaaacctgggagatcatcttccggaatatgaataaagaagatgagggagagatcaccaaaagcctgaggaggccagagacctcttaccggcaaactggtctagctcctgggcaagagtatgagatatctctgcacatagtgaaaaacaatacccggggccctggcctgaagagggtgaccaccacacgcttggatgcccccagccagatcgaggtgaaagatgtcacagacaccactgccttgatcacctggttcaagcccctggctgagatcgatggcattgagctgacctacggcatcaaagacgtgccaggagaccgtaccaccatcgatctcacagaggacgagaaccagtactccatcgggaacctgaagcctgacactgagtacgaggtgtccctcatctcccgcagaggtgacatgtcaagcaacccagccaaagagaccttcacaacaggcctcgatgctcccaggaatcttcgacgtgtttcccagacagataacagcatcaccctggaatggaggaatggcaaggcagctattgacagttacagaattaagtatgcccccatctctggaggggaccacgctgaggttgatgttccaaagagccaacaagccacaaccaaaaccacactcacaggtctgaggccgggaactgaatatgggattggagtttctgctgtgaaggaagacaaggagagcaatccagcgaccatcaacgcagccacagagttggacacgcccaaggaccttcaggtttctgaaactgcagagaccagcctgaccctgctctggaagacaccgttggccaaatttgaccgctaccgcctcaattacagtctccccacaggccagtgggtgggagtgcagcttccaagaaacaccacttcctatgtcctgagaggcctggaaccaggacaggagtacaatgtcctcctgacagccgagaaaggcagacacaagagcaagcccgcacgtgtgaaggcatccactgaacaagcccctgagctggaaaacctcaccgtgactgaggttggctgggatggcctcagactcaactggaccgcagctgaccaggcctatgagcactttatcattcaggtgcaggaggccaacaaggtggaggcagctcggaacctcaccgtgcctggcagccttcgggctgtggacataccgggcctcaaggctgctacgccttatacagtctccatctatggggtgatccagggctatagaacaccagtgctctctgctgaggcctccacaggggaaactcccaatttgggagaggtcgtggtggccgaggtgggctgggatgccctcaaactcaactggactgctccagaaggggcctatgagtactttttcattcaggtgcaggaggctgacacagtagaggcagcccagaacctcaccgtcccaggaggactgaggtccacagacctgcctgggctcaaagcagccactcattataccatcaccatccgcggggtcactcaggacttcagcacaacccctctctctgttgaagtcttgacagaggaggttccagatatgggaaacctcacagtgaccgaggttagctgggatgctctcagactgaactggaccacgccagatggaacctatgaccagtttactattcaggtccaggaggctgaccaggtggaagaggctcacaatctcacggttcctggcagcctgcgttccatggaaatcccaggcctcagggctggcactccttacacagtcaccctgcacggcgaggtcaggggccacagcactcgaccccttgctgtagaggtcgtcacagaggatctcccacagctgggagatttagccgtgtctgaggttggctgggatggcctcagactcaactggaccgcagctgacaatgcctatgagcactttgtcattcaggtgcaggaggtcaacaaagtggaggcagcccagaacctcacgttgcctggcagcctcagggctgtggacatcccgggcctcgaggctgccacgccttatagagtctccatctatggggtgatccggggctatagaacaccagtactctctgctgaggcctccacagccaaagaacctgaaattggaaacttaaatgtttctgacataactcccgagagcttcaatctctcctggatggctaccgatgggatcttcgagacctttaccattgaaattattgattccaataggttgctggagactgtggaatataatatctctggtgctgaacgaactgcccatatctcagggctaccccctagtactgattttattgtctacctctctggacttgctcccagcatccggaccaaaaccatcagtgccacagccacgacagaggccctgccccttctggaaaacctaaccatttccgacattaatccctacgggttcacagtttcctggatggcatcggagaatgcctttgacagctttctagtaacggtggtggattctgggaagctgctggacccccaggaattcacactttcaggaacccagaggaagctggagcttagaggcctcataactggcattggctatgaggttatggtctctggcttcacccaagggcatcaaaccaagcccttgagggctgagattgttacagaagccgaaccggaagttgacaaccttctggtttcagatgccaccccagacggtttccgtctgtcctggacagctgatgaaggggtcttcgacaattttgttctcaaaatcagagataccaaaaagcagtctgagccactggaaataaccctacttgcccccgaacgtaccagggacttaacaggtctcagagaggctactgaatacgaaattgaactctatggaataagcaaaggaaggcgatcccagacagtcagtgctatagcaacaacagccatgggctccccaaaggaagtcattttctcagacatcactgaaaattcggctactgtcagctggagggcacccacggcccaagtggagagcttccggattacctatgtgcccattacaggaggtacaccctccatggtaactgtggacggaaccaagactcagaccaggctggtgaaactcatacctggcgtggagtaccttgtcagcatcatcgccatgaagggctttgaggaaagtgaacctgtctcagggtcattcaccacagctctggatggcccatctggcctggtgacagccaacatcactgactcagaagccttggccaggtggcagccagccattgccactgtggacagttatgtcatctcctacacaggcgagaaagtgccagaaattacacgcacggtgtccgggaacacagtggagtatgctctgaccgacctcgagcctgccacggaatacacactgagaatctttgcagagaaagggccccagaagagctcaaccatcactgccaagttcacaacagacctcgattctccaagagacttgactgctactgaggttcagtcggaaactgccctccttacctggcgacccccccgggcatcagtcaccggttacctgctggtctatgaatcagtggatggcacagtcaaggaagtcattgtgggtccagataccacctcctacagcctggcagacctgagcccatccacccactacacagccaagatccaggcactcaatgggcccctgaggagcaatatgatccagaccatcttcaccacaattggactcctgtaccccttccccaaggactgctcccaagcaatgctgaatggagacacgacctctggcctctacaccatttatctgaatggtgataaggctcaggcgctggaagtcttctgtgacatgacctctgatgggggtggatggattgtgttcctgagacgcaaaaacggacgcgagaacttctaccaaaactggaaggcatatgctgctggatttggggaccgcagagaagaattctggcttgggctggacaacctgaacaaaatcacagcccaggggcagtacgagctccgggtggacctgcgggaccatggggagacagcctttgctgtctatgacaagttcagcgtgggagatgccaagactcgctacaagctgaaggtggaggggtacagtgggacagcaggtgactccatggcctaccacaatggcagatccttctccacctttgacaaggacacagattcagccatcaccaactgtgctctgtcctacaaaggggctttctggtacaggaactgtcaccgtgtcaacctgatggggagatatggggacaataaccacagtcagggcgttaactggttccactggaagggccacgaacactcaatccagtttgctgagatgaagctgagaccaagcaacttcagaaatcttgaaggcaggcgcaaacgggcataaattccagggaccactgggtgagatgtggagagaggctggagatccccattaggactgtccacccacactcgaagccacaaaactgcagggattggggctctcactggtttgtcgcctaactcccgcctaaaaggccacaaatttctggtaaacaggtaacagacctaaacgtaaagtgcatcagtaaaatgaacattatctactgccccgatctctagcctgacac

SEQ ID NO: 311764 - DNA, 5880 bp, Homo sapiens
accggccacagcctgcctactgtcacccgcctctcccgcgcgcagatacacgcccccgcctccgtgggcacaaaggcagcgctgctggggaactcgggggaacgcgcacgtgggaaccgccgcagctccacactccaggtacttcttccaaggacctaggtctctcgcccatcggaaagaaaataattctttcaagaagatcagggacaactgatttgaagtctactctgtgcttctaaatccccaattctgctgaaagtgagataccctagagccctagagccccagcagcacccagccaaacccacctccaccatgggggccatgactcagctgttggcaggtgtctttcttgctttccttgccctcgctaccgaaggtggggtcctcaagaaagtcatccggcacaagcgacagagtggggtgaacgccaccctgccagaagagaaccagccagtggtgtttaaccacgtttacaacatcaagctgccagtgggatcccagtgttcggtggatctggagtcagccagtggggagaaagacctggcaccgccttcagagcccagcgaaagctttcaggagcacacagtagatggggaaaaccagattgtcttcacacatcgcatcaacatcccccgccgggcctgtggctgtgccgcagcccctgatgttaaggagctgctgagcagactggaggagctggagaacctggtgtcttccctgagggagcaatgtactgcaggagcaggctgctgtctccagcctgccacaggccgcttggacaccaggcccttctgtagcggtcggggcaacttcagcactgaaggatgtggctgtgtctgcgaacctggctggaaaggccccaactgctctgagcccgaatgtccaggcaactgtcaccttcgaggccggtgcattgatgggcagtgcatctgtgacgacggcttcacgggcgaggactgcagccagctggcttgccccagcgactgcaatgaccagggcaagtgcgtgaatggagtctgcatctgtttcgaaggctacgccggggctgactgcagccgtgaaatctgcccagtgccctgcagtgaggagcacggcacatgtgtagatggcttgtgtgtgtgccacgatggctttgcaggcgatgactgcaacaagcctctgtgtctcaacaattgctacaaccgtggacgatgcgtggagaatgagtgcgtgtgtgatgagggtttcacgggcgaagactgcagtgagctcatctgccccaatgactgcttcgaccggggccgctgcatcaatggcacctgctactgcgaagaaggcttcacaggtgaagactgcgggaaacccacctgcccacatgcctgccacacccagggccggtgtgaggaggggcagtgtgtatgtgatgagggctttgccggtgtggactgcagcgagaagaggtgtcctgctgactgtcacaatcgtggccgctgtgtagacgggcggtgtgagtgtgatgatggtttcactggagctgactgtggggagctcaagtgtcccaatggctgcagtggccatggccgctgtgtcaatgggcagtgtgtgtgtgatgagggctatactggggaggactgcagccagctacggtgccccaatgactgtcacagtcggggccgctgtgtcgagggcaaatgtgtatgtgagcaaggcttcaagggctatgactgcagtgacatgagctgccctaatgactgtcaccagcacggccgctgtgtgaatggcatgtgtgtttgtgatgacggctacacaggggaagactgccgggatcgccaatgccccagggactgcagcaacaggggcctctgtgtggacggacagtgcgtctgtgaggacggcttcaccggccctgactgtgcagaactctcctgtccaaatgactgccatggccagggtcgctgtgtgaatgggcagtgcgtgtgccatgaaggatttatgggcaaagactgcaaggagcaaagatgtcccagtgactgtcatggccagggccgctgcgtggacggccagtgcatctgccacgagggcttcacaggcctggactgtggccagcactcctgccccagtgactgcaacaacttaggacaatgcgtctcgggccgctgcatctgcaacgagggctacagcggagaagactgctcagaggtgtctcctcccaaagacctcgttgtgacagaagtgacggaagagacggtcaacctggcctgggacaatgagatgcgggtcacagagtaccttgtcgtgtacacgcccacccacgagggtggtctggaaatgcagttccgtgtgcctggggaccagacgtccaccatcatccaggagctggagcctggtgtggagtactttatccgtgtatttgccatcctggagaacaagaagagcattcctgtcagcgccagggtggccacgtacttacctgcacctgaaggcctgaaattcaagtccatcaaggagacatctgtggaagtggagtgggatcctctagacattgcttttgaaacctgggagatcatcttccggaatatgaataaagaagatgagggagagatcaccaaaagcctgaggaggccagagacctcttaccggcaaactggtctagctcctgggcaagagtatgagatatctctgcacatagtgaaaaacaatacccggggccctggcctgaagagggtgaccaccacacgcttggatgcccccagccagatcgaggtgaaagatgtcacagacaccactgccttgatcacctggttcaagcccctggctgagatcgatggcattgagctgacctacggcatcaaagacgtgccaggagaccgtaccaccatcgatctcacagaggacgagaaccagtactccatcgggaacctgaagcctgacactgagtacgaggtgtccctcatctcccgcagaggtgacatgtcaagcaacccagccaaagagaccttcacaacaggcctcgatgctcccaggaatcttcgacgtgtttcccagacagataacagcatcaccctggaatggaggaatggcaaggcagctattgacagttacagaattaagtatgcccccatctctggaggggaccacgctgaggttgatgttccaaagagccaacaagccacaaccaaaaccacactcacaggtctgaggccgggaactgaatatgggattggagtttctgctgtgaaggaagacaaggagagcaatccagcgaccatcaacgcagccacagagttggacacgcccaaggaccttcaggtttctgaaactgcagagaccagcctgaccctgctctggaagacaccgttggccaaatttgaccgctaccgcctcaattacagtctccccacaggccagtgggtgggagtgcagcttccaagaaacaccacttcctatgtcctgagaggcctggaaccaggacaggagtacaatgtcctcctgacagccgagaaaggcagacacaagagcaagcccgcacgtgtgaaggcatccactgaacaagcccctgagctggaaaacctcaccgtgactgaggttggctgggatggcctcagactcaactggaccgcagctgaccaggcctatgagcactttatcattcaggtgcaggaggccaacaaggtggaggcagctcggaacctcaccgtgcctggcagccttcgggctgtggacataccgggcctcaaggctgctacgccttatacagtctccatctatggggtgatccagggctatagaacaccagtgctctctgctgaggcctccacaggggaaactcccaatttgggagaggtcgtggtggccgaggtgggctgggatgccctcaaactcaactggactgctccagaaggggcctatgagtactttttcattcaggtgcaggaggctgacacagtagaggcagcccagaacctcaccgtcccaggaggactgaggtccacagacctgcctgggctcaaagcagccactcattataccatcaccatccgcggggtcactcaggacttcagcacaacccctctctctgttgaagtcttgacagaggaggttccagatatgggaaacctcacagtgaccgaggttagctgggatgctctcagactgaactggaccacgccagatggaacctatgaccagtttactattcaggtccaggaggctgaccaggtggaagaggctcacaatctcacggttcctggcagcctgcgttccatggaaatcccaggcctcagggctggcactccttacacagtcaccctgcacggcgaggtcaggggccacagcactcgaccccttgctgtagaggtcgtcacagaggatctcccacagctgggagatttagccgtgtctgaggttggctgggatggcctcagactcaactggaccgcagctgacaatgcctatgagcactttgtcattcaggtgcaggaggtcaacaaagtggaggcagcccagaacctcacgttgcctggcagcctcagggctgtggacatcccgggcctcgaggctgccacgccttatagagtctccatctatggggtgatccggggctatagaacaccagtactctctgctgaggcctccacagccaaagaacctgaaattggaaacttaaatgtttctgacataactcccgagagcttcaatctctcctggatggctaccgatgggatcttcgagacctttaccattgaaattattgattccaataggttgctggagactgtggaatataatatctctggtgctgaacgaactgcccatatctcagggctaccccctagtactgattttattgtctacctctctggacttgctcccagcatccggaccaaaaccatcagtgccacagccacgacagaagccgaaccggaagttgacaaccttctggtttcagatgccaccccagacggtttccgtctgtcctggacagctgatgaaggggtcttcgacaattttgttctcaaaatcagagataccaaaaagcagtctgagccactggaaataaccctacttgcccccgaacgtaccagggacttaacaggtctcagagaggctactgaatacgaaattgaactctatggaataagcaaaggaaggcgatcccagacagtcagtgctatagcaacaacagccatgggctccccaaaggaagtcattttctcagacatcactgaaaattcggctactgtcagctggagggcacccacggcccaagtggagagcttccggattacctatgtgcccattacaggaggtacaccctccatggtaactgtggacggaaccaagactcagaccaggctggtgaaactcatacctggcgtggagtaccttgtcagcatcatcgccatgaagggctttgaggaaagtgaacctgtctcagggtcattcaccacagctctggatggcccatctggcctggtgacagccaacatgtttctgttttgttgtttgattcagcaaaaatctcccagtgacaacatcgcaatagttttttacttctcttaggtggctctgggaatgggagaggggtaggatgtacaggggtagtttgttttagaaccagccgtattttacatgaagctgtataattaattgtcattatttttgttagcaaagattaaatgtgtcattggaagccatccctttttttacatttcatacaacagaaaccagaaaagcaatactgtttccattttaaggatatgattaatattattaatataataatgatgatgatgatgatgaaaactaaggatttttcaagagatctttctttccaaaacatttctggacagtacctgattgtattttttttttaaataaaagcacaagtacttttga

SEQ ID NO: 311765 - DNA, 5835 bp, Homo sapiens
accggccacagcctgcctactgtcacccgcctctcccgcgcgcagatacacgcccccgcctccgtgggcacaaaggcagcgctgctggggaactcgggggaacgcgcacgtgggaaccgccgcagctccacactccaggtacttcttccaaggacctaggtctctcgcccatcggaaagaaaataattctttcaagaagatcagggacaactgatttgaagtctactctgtgcttctaaatccccaattctgctgaaagtgagataccctagagccctagagccccagcagcacccagccaaacccacctccaccatgggggccatgactcagctgttggcaggtgtctttcttgctttccttgccctcgctaccgaaggtggggtcctcaagaaagtcatccggcacaagcgacagagtggggtgaacgccaccctgccagaagagaaccagccagtggtgtttaaccacgtttacaacatcaagctgccagtgggatcccagtgttcggtggatctggagtcagccagtggggagaaagacctggcaccgccttcagagcccagcgaaagctttcaggagcacacagtagatggggaaaaccagattgtcttcacacatcgcatcaacatcccccgccgggcctgtggctgtgccgcagcccctgatgttaaggagctgctgagcagactggaggagctggagaacctggtgtcttccctgagggagcaatgtactgcaggagcaggctgctgtctccagcctgccacaggccgcttggacaccaggcccttctgtagcggtcggggcaacttcagcactgaaggatgtggctgtgtctgcgaacctggctggaaaggccccaactgctctgagcccgaatgtccaggcaactgtcaccttcgaggccggtgcattgatgggcagtgcatctgtgacgacggcttcacgggcgaggactgcagccagctggcttgccccagcgactgcaatgaccagggcaagtgcgtgaatggagtctgcatctgtttcgaaggctacgccggggctgactgcagccgtgaaatctgcccagtgccctgcagtgaggagcacggcacatgtgtagatggcttgtgtgtgtgccacgatggctttgcaggcgatgactgcaacaagcctctgtgtctcaacaattgctacaaccgtggacgatgcgtggagaatgagtgcgtgtgtgatgagggtttcacgggcgaagactgcagtgagctcatctgccccaatgactgcttcgaccggggccgctgcatcaatggcacctgctactgcgaagaaggcttcacaggtgaagactgcgggaaacccacctgcccacatgcctgccacacccagggccggtgtgaggaggggcagtgtgtatgtgatgagggctttgccggtgtggactgcagcgagaagaggtgtcctgctgactgtcacaatcgtggccgctgtgtagacgggcggtgtgagtgtgatgatggtttcactggagctgactgtggggagctcaagtgtcccaatggctgcagtggccatggccgctgtgtcaatgggcagtgtgtgtgtgatgagggctatactggggaggactgcagccagctacggtgccccaatgactgtcacagtcggggccgctgtgtcgagggcaaatgtgtatgtgagcaaggcttcaagggctatgactgcagtgacatgagctgccctaatgactgtcaccagcacggccgctgtgtgaatggcatgtgtgtttgtgatgacggctacacaggggaagactgccgggatcgccaatgccccagggactgcagcaacaggggcctctgtgtggacggacagtgcgtctgtgaggacggcttcaccggccctgactgtgcagaactctcctgtccaaatgactgccatggccagggtcgctgtgtgaatgggcagtgcgtgtgccatgaaggatttatgggcaaagactgcaaggagcaaagatgtcccagtgactgtcatggccagggccgctgcgtggacggccagtgcatctgccacgagggcttcacaggcctggactgtggccagcactcctgccccagtgactgcaacaacttaggacaatgcgtctcgggccgctgcatctgcaacgagggctacagcggagaagactgctcagaggtgtctcctcccaaagacctcgttgtgacagaagtgacggaagagacggtcaacctggcctgggacaatgagatgcgggtcacagagtaccttgtcgtgtacacgcccacccacgagggtggtctggaaatgcagttccgtgtgcctggggaccagacgtccaccatcatccaggagctggagcctggtgtggagtactttatccgtgtatttgccatcctggagaacaagaagagcattcctgtcagcgccagggtggccacgtacttacctgcacctgaaggcctgaaattcaagtccatcaaggagacatctgtggaagtggagtgggatcctctagacattgcttttgaaacctgggagatcatcttccggaatatgaataaagaagatgagggagagatcaccaaaagcctgaggaggccagagacctcttaccggcaaactggtctagctcctgggcaagagtatgagatatctctgcacatagtgaaaaacaatacccggggccctggcctgaagagggtgaccaccacacgcttggatgcccccagccagatcgaggtgaaagatgtcacagacaccactgccttgatcacctggttcaagcccctggctgagatcgatggcattgagctgacctacggcatcaaagacgtgccaggagaccgtaccaccatcgatctcacagaggacgagaaccagtactccatcgggaacctgaagcctgacactgagtacgaggtgtccctcatctcccgcagaggtgacatgtcaagcaacccagccaaagagaccttcacaacaggcctcgatgctcccaggaatcttcgacgtgtttcccagacagataacagcatcaccctggaatggaggaatggcaaggcagctattgacagttacagaattaagtatgcccccatctctggaggggaccacgctgaggttgatgttccaaagagccaacaagccacaaccaaaaccacactcacaggtctgaggccgggaactgaatatgggattggagtttctgctgtgaaggaagacaaggagagcaatccagcgaccatcaacgcagccacagagttggacacgcccaaggaccttcaggtttctgaaactgcagagaccagcctgaccctgctctggaagacaccgttggccaaatttgaccgctaccgcctcaattacagtctccccacaggccagtgggtgggagtgcagcttccaagaaacaccacttcctatgtcctgagaggcctggaaccaggacaggagtacaatgtcctcctgacagccgagaaaggcagacacaagagcaagcccgcacgtgtgaaggcatccactgaacaagcccctgagctggaaaacctcaccgtgactgaggttggctgggatggcctcagactcaactggaccgcagctgaccaggcctatgagcactttatcattcaggtgcaggaggccaacaaggtggaggcagctcggaacctcaccgtgcctggcagccttcgggctgtggacataccgggcctcaaggctgctacgccttatacagtctccatctatggggtgatccagggctatagaacaccagtgctctctgctgaggcctccacaggggaaactcccaatttgggagaggtcgtggtggccgaggtgggctgggatgccctcaaactcaactggactgctccagaaggggcctatgagtactttttcattcaggtgcaggaggctgacacagtagaggcagcccagaacctcaccgtcccaggaggactgaggtccacagacctgcctgggctcaaagcagccactcattataccatcaccatccgcggggtcactcaggacttcagcacaacccctctctctgttgaagtcttgacagaggaggttccagatatgggaaacctcacagtgaccgaggttagctgggatgctctcagactgaactggaccacgccagatggaacctatgaccagtttactattcaggtccaggaggctgaccaggtggaagaggctcacaatctcacggttcctggcagcctgcgttccatggaaatcccaggcctcagggctggcactccttacacagtcaccctgcacggcgaggtcaggggccacagcactcgaccccttgctgtagaggtcgtcacagaggatctcccacagctgggagatttagccgtgtctgaggttggctgggatggcctcagactcaactggaccgcagctgacaatgcctatgagcactttgtcattcaggtgcaggaggtcaacaaagtggaggcagcccagaacctcacgttgcctggcagcctcagggctgtggacatcccgggcctcgaggctgccacgccttatagagtctccatctatggggtgatccggggctatagaacaccagtactctctgctgaggcctccacagccaaagaacctgaaattggaaacttaaatgtttctgacataactcccgagagcttcaatctctcctggatggctaccgatgggatcttcgagacctttaccattgaaattattgattccaataggttgctggagactgtggaatataatatctctggtgctgaacgaactgcccatatctcagggctaccccctagtactgattttattgtctacctctctggacttgctcccagcatccggaccaaaaccatcagtgccacagccacgacagaagccgaaccggaagttgacaaccttctggtttcagatgccaccccagacggtttccgtctgtcctggacagctgatgaaggggtcttcgacaattttgttctcaaaatcagagataccaaaaagcagtctgagccactggaaataaccctacttgcccccgaacgtaccagggacttaacaggtctcagagaggctactgaatacgaaattgaactctatggaataagcaaaggaaggcgatcccagacagtcagtgctatagcaacaacagccatgggctccccaaaggaagtcattttctcagacatcactgaaaattcggctactgtcagctggagggcacccacggcccaagtggagagcttccggattacctatgtgcccattacaggaggtacaccctccatggtaactgtggacggaaccaagactcagaccaggctggtgaaactcatacctggcgtggagtaccttgtcagcatcatcgccatgaagggctttgaggaaagtgaacctgtctcagggtcattcaccacagctctggatggcccatctggcctggtgacagccaacatcactgactcagaagccttggccaggtggcagccagccattgccactgtggacagttatgtcatctcctacacaggcgagaaagtgccagaaattacacgcacggtgtccgggaacacagtggagtatgctctgaccgacctcgagcctgccacggaatacacactgagaatctttgcagagaaagggccccagaagagctcaaccatcactgccaagttcacaacagacctcgattctccggggtaggactgcaggtttcacatgaacctgttctaggctgtggacattggtgtggagaggttctgcaattttttaaaaatatgtaactgggttgattttaagtaaaattatttgtgtattgat

SEQ ID NO: 311766 - DNA, 6014 bp, Homo sapiens
  misc_feature (5393)..(5393): n is a, c, g, or t
accggccacagcctgcctactgtcacccgcctctcccgcgcgcagatacacgcccccgcctccgtgggcacaaaggcagcgctgctggggaactcgggggaacgcgcacgtgggaaccgccgcagctccacactccaggtacttcttccaaggacctaggtctctcgcccatcggaaagaaaataattctttcaagaagatcagggacaactgatttgaagtctactctgtgcttctaaatccccaattctgctgaaagtgagataccctagagccctagagccccagcagcacccagccaaacccacctccaccatgggggccatgactcagctgttggcaggtgtctttcttgctttccttgccctcgctaccgaaggtggggtcctcaagaaagtcatccggcacaagcgacagagtggggtgaacgccaccctgccagaagagaaccagccagtggtgtttaaccacgtttacaacatcaagctgccagtgggatcccagtgttcggtggatctggagtcagccagtggggagaaagacctggcaccgccttcagagcccagcgaaagctttcaggagcacacagtagatggggaaaaccagattgtcttcacacatcgcatcaacatcccccgccgggcctgtggctgtgccgcagcccctgatgttaaggagctgctgagcagactggaggagctggagaacctggtgtcttccctgagggagcaatgtactgcaggagcaggctgctgtctccagcctgccacaggccgcttggacaccaggcccttctgtagcggtcggggcaacttcagcactgaaggatgtggctgtgtctgcgaacctggctggaaaggccccaactgctctgagcccgaatgtccaggcaactgtcaccttcgaggccggtgcattgatgggcagtgcatctgtgacgacggcttcacgggcgaggactgcagccagctggcttgccccagcgactgcaatgaccagggcaagtgcgtgaatggagtctgcatctgtttcgaaggctacgccggggctgactgcagccgtgaaatctgcccagtgccctgcagtgaggagcacggcacatgtgtagatggcttgtgtgtgtgccacgatggctttgcaggcgatgactgcaacaagcctctgtgtctcaacaattgctacaaccgtggacgatgcgtggagaatgagtgcgtgtgtgatgagggtttcacgggcgaagactgcagtgagctcatctgccccaatgactgcttcgaccggggccgctgcatcaatggcacctgctactgcgaagaaggcttcacaggtgaagactgcgggaaacccacctgcccacatgcctgccacacccagggccggtgtgaggaggggcagtgtgtatgtgatgagggctttgccggtgtggactgcagcgagaagaggtgtcctgctgactgtcacaatcgtggccgctgtgtagacgggcggtgtgagtgtgatgatggtttcactggagctgactgtggggagctcaagtgtcccaatggctgcagtggccatggccgctgtgtcaatgggcagtgtgtgtgtgatgagggctatactggggaggactgcagccagctacggtgccccaatgactgtcacagtcggggccgctgtgtcgagggcaaatgtgtatgtgagcaaggcttcaagggctatgactgcagtgacatgagctgccctaatgactgtcaccagcacggccgctgtgtgaatggcatgtgtgtttgtgatgacggctacacaggggaagactgccgggatcgccaatgccccagggactgcagcaacaggggcctctgtgtggacggacagtgcgtctgtgaggacggcttcaccggccctgactgtgcagaactctcctgtccaaatgactgccatggccagggtcgctgtgtgaatgggcagtgcgtgtgccatgaaggatttatgggcaaagactgcaaggagcaaagatgtcccagtgactgtcatggccagggccgctgcgtggacggccagtgcatctgccacgagggcttcacaggcctggactgtggccagcactcctgccccagtgactgcaacaacttaggacaatgcgtctcgggccgctgcatctgcaacgagggctacagcggagaagactgctcagaggtgtctcctcccaaagacctcgttgtgacagaagtgacggaagagacggtcaacctggcctgggacaatgagatgcgggtcacagagtaccttgtcgtgtacacgcccacccacgagggtggtctggaaatgcagttccgtgtgcctggggaccagacgtccaccatcatccaggagctggagcctggtgtggagtactttatccgtgtatttgccatcctggagaacaagaagagcattcctgtcagcgccagggtggccacgtacttacctgcacctgaaggcctgaaattcaagtccatcaaggagacatctgtggaagtggagtgggatcctctagacattgcttttgaaacctgggagatcatcttccggaatatgaataaagaagatgagggagagatcaccaaaagcctgaggaggccagagacctcttaccggcaaactggtctagctcctgggcaagagtatgagatatctctgcacatagtgaaaaacaatacccggggccctggcctgaagagggtgaccaccacacgcttggatgcccccagccagatcgaggtgaaagatgtcacagacaccactgccttgatcacctggttcaagcccctggctgagatcgatggcattgagctgacctacggcatcaaagacgtgccaggagaccgtaccaccatcgatctcacagaggacgagaaccagtactccatcgggaacctgaagcctgacactgagtacgaggtgtccctcatctcccgcagaggtgacatgtcaagcaacccagccaaagagaccttcacaacaggcctcgatgctcccaggaatcttcgacgtgtttcccagacagataacagcatcaccctggaatggaggaatggcaaggcagctattgacagttacagaattaagtatgcccccatctctggaggggaccacgctgaggttgatgttccaaagagccaacaagccacaaccaaaaccacactcacaggtctgaggccgggaactgaatatgggattggagtttctgctgtgaaggaagacaaggagagcaatccagcgaccatcaacgcagccacagagttggacacgcccaaggaccttcaggtttctgaaactgcagagaccagcctgaccctgctctggaagacaccgttggccaaatttgaccgctaccgcctcaattacagtctccccacaggccagtgggtgggagtgcagcttccaagaaacaccacttcctatgtcctgagaggcctggaaccaggacaggagtacaatgtcctcctgacagccgagaaaggcagacacaagagcaagcccgcacgtgtgaaggcatccactgaacaagcccctgagctggaaaacctcaccgtgactgaggttggctgggatggcctcagactcaactggaccgcagctgaccaggcctatgagcactttatcattcaggtgcaggaggccaacaaggtggaggcagctcggaacctcaccgtgcctggcagccttcgggctgtggacataccgggcctcaaggctgctacgccttatacagtctccatctatggggtgatccagggctatagaacaccagtgctctctgctgaggcctccacaggggaaactcccaatttgggagaggtcgtggtggccgaggtgggctgggatgccctcaaactcaactggactgctccagaaggggcctatgagtactttttcattcaggtgcaggaggctgacacagtagaggcagcccagaacctcaccgtcccaggaggactgaggtccacagacctgcctgggctcaaagcagccactcattataccatcaccatccgcggggtcactcaggacttcagcacaacccctctctctgttgaagtcttgacagaggaggttccagatatgggaaacctcacagtgaccgaggttagctgggatgctctcagactgaactggaccacgccagatggaacctatgaccagtttactattcaggtccaggaggctgaccaggtggaagaggctcacaatctcacggttcctggcagcctgcgttccatggaaatcccaggcctcagggctggcactccttacacagtcaccctgcacggcgaggtcaggggccacagcactcgaccccttgctgtagaggtcgtcacagaggatctcccacagctgggagatttagccgtgtctgaggttggctgggatggcctcagactcaactggaccgcagctgacaatgcctatgagcactttgtcattcaggtgcaggaggtcaacaaagtggaggcagcccagaacctcacgttgcctggcagcctcagggctgtggacatcccgggcctcgaggctgccacgccttatagagtctccatctatggggtgatccggggctatagaacaccagtactctctgctgaggcctccacagccaaagaacctgaaattggaaacttaaatgtttctgacataactcccgagagcttcaatctctcctggatggctaccgatgggatcttcgagacctttaccattgaaattattgattccaataggttgctggagactgtggaatataatatctctggtgctgaacgaactgcccatatctcagggctaccccctagtactgattttattgtctacctctctggacttgctcccagcatccggaccaaaaccatcagtgccacagccacgacagaagccgaaccggaagttgacaaccttctggtttcagatgccaccccagacggtttccgtctgtcctggacagctgatgaaggggtcttcgacaattttgttctcaaaatcagagataccaaaaagcagtctgagccactggaaataaccctacttgcccccgaacgtaccagggacttaacaggtctcagagaggctactgaatacgaaattgaactctatggaataagcaaaggaaggcgatcccagacagtcagtgctatagcaacaacaggtactgtaaataaacaggagagaacagagaaaagtcatgactcaggggtcttcttctcacagggctgagtaatcacaggagctttggatgcaggcaggctggcgctctgatcctgactctttcaattacagactgtgttaccttggacaatttggctaagtccttatgcaaaaaaagtatgatgccatttacttaatagggttgtgaggattaaatgagataattnatataaagcccatagcggaaggcctggcaggtagcaagggcccagcaaatgagagctattcacgttgccattaatgcatcatcatcgttacaattatcatctttttttttttacgttccaaagattcttccttctatctattatctcatcatatctcatctcatcatatcatatctcatcattttatccagagatacacttccttgttctttggccaaatgttcgagctataccaagtagggagataatggagaagcagcacgtctatctatacacattaatatttataaaatgctacatgtgaataatcagtacggtgatcagcaaggataaaggagagagctggcaagattaacatgctactgtttatgaagctctctaactttgatactcataacaactctgaaaggcacctagagtgtccttggagtttaattacctttttccataggagctgtttcaaggagaaaaaaaaaaaagatggttaataatatgactcttaggcccagagtgatggctcacacctgtaatcccagcatttcaggaggctgagacaggaggatcacttgagtccaggagtttgagaccagcctaggcaacatagtaagaccctacctgtgc

SEQ ID NO: 311767 - DNA, 4431 bp, Homo sapiens
accggccacagcctgcctactgtcacccgcctctcccgcgcgcagatacacgcccccgcctccgtgggcacaaaggcagcgctgctggggaactcgggggaacgcgcacgtgggaaccgccgcagctccacactccaggtacttcttccaaggacctaggtctctcgcccatcggaaagaaaataattctttcaagaagatcagggacaactgatttgaagtctactctgtgcttctaaatccccaattctgctgaaagtgagataccctagagccctagagccccagcagcacccagccaaacccacctccaccatgggggccatgactcagctgttggcaggtgtctttcttgctttccttgccctcgctaccgaaggtggggtcctcaagaaagtcatccggcacaagcgacagagtggggtgaacgccaccctgccagaagagaaccagccagtggtgtttaaccacgtttacaacatcaagctgccagtgggatcccagtgttcggtggatctggagtcagccagtggggagaaagacctggcaccgccttcagagcccagcgaaagctttcaggagcacacagtagatggggaaaaccagattgtcttcacacatcgcatcaacatcccccgccgggcctgtggctgtgccgcagcccctgatgttaaggagctgctgagcagactggaggagctggagaacctggtgtcttccctgagggagcaatgtactgcaggagcaggctgctgtctccagcctgccacaggccgcttggacaccaggcccttctgtagcggtcggggcaacttcagcactgaaggatgtggctgtgtctgcgaacctggctggaaaggccccaactgctctgagcccgaatgtccaggcaactgtcaccttcgaggccggtgcattgatgggcagtgcatctgtgacgacggcttcacgggcgaggactgcagccagctggcttgccccagcgactgcaatgaccagggcaagtgcgtgaatggagtctgcatctgtttcgaaggctacgccggggctgactgcagccgtgaaatctgcccagtgccctgcagtgaggagcacggcacatgtgtagatggcttgtgtgtgtgccacgatggctttgcaggcgatgactgcaacaagcctctgtgtctcaacaattgctacaaccgtggacgatgcgtggagaatgagtgcgtgtgtgatgagggtttcacgggcgaagactgcagtgagctcatctgccccaatgactgcttcgaccggggccgctgcatcaatggcacctgctactgcgaagaaggcttcacaggtgaagactgcgggaaacccacctgcccacatgcctgccacacccagggccggtgtgaggaggggcagtgtgtatgtgatgagggctttgccggtgtggactgcagcgagaagaggtgtcctgctgactgtcacaatcgtggccgctgtgtagacgggcggtgtgagtgtgatgatggtttcactggagctgactgtggggagctcaagtgtcccaatggctgcagtggccatggccgctgtgtcaatgggcagtgtgtgtgtgatgagggctatactggggaggactgcagccagctacggtgccccaatgactgtcacagtcggggccgctgtgtcgagggcaaatgtgtatgtgagcaaggcttcaagggctatgactgcagtgacatgagctgccctaatgactgtcaccagcacggccgctgtgtgaatggcatgtgtgtttgtgatgacggctacacaggggaagactgccgggatcgccaatgccccagggactgcagcaacaggggcctctgtgtggacggacagtgcgtctgtgaggacggcttcaccggccctgactgtgcagaactctcctgtccaaatgactgccatggccagggtcgctgtgtgaatgggcagtgcgtgtgccatgaaggatttatgggcaaagactgcaaggagcaaagatgtcccagtgactgtcatggccagggccgctgcgtggacggccagtgcatctgccacgagggcttcacaggcctggactgtggccagcactcctgccccagtgactgcaacaacttaggacaatgcgtctcgggccgctgcatctgcaacgagggctacagcggagaagactgctcagaggtgtctcctcccaaagacctcgttgtgacagaagtgacggaagagacggtcaacctggcctgggacaatgagatgcgggtcacagagtaccttgtcgtgtacacgcccacccacgagggtggtctggaaatgcagttccgtgtgcctggggaccagacgtccaccatcatccaggagctggagcctggtgtggagtactttatccgtgtatttgccatcctggagaacaagaagagcattcctgtcagcgccagggtggccacgtacttacctgcacctgaaggcctgaaattcaagtccatcaaggagacatctgtggaagtggagtgggatcctctagacattgcttttgaaacctgggagatcatcttccggaatatgaataaagaagatgagggagagatcaccaaaagcctgaggaggccagagacctcttaccggcaaactggtctagctcctgggcaagagtatgagatatctctgcacatagtgaaaaacaatacccggggccctggcctgaagagggtgaccaccacacgcttggatgcccccagccagatcgaggtgaaagatgtcacagacaccactgccttgatcacctggttcaagcccctggctgagatcgatggcattgagctgacctacggcatcaaagacgtgccaggagaccgtaccaccatcgatctcacagaggacgagaaccagtactccatcgggaacctgaagcctgacactgagtacgaggtgtccctcatctcccgcagaggtgacatgtcaagcaacccagccaaagagaccttcacaacaggcctcgatgctcccaggaatcttcgacgtgtttcccagacagataacagcatcaccctggaatggaggaatggcaaggcagctattgacagttacagaattaagtatgcccccatctctggaggggaccacgctgaggttgatgttccaaagagccaacaagccacaaccaaaaccacactcacaggtctgaggccgggaactgaatatgggattggagtttctgctgtgaaggaagacaaggagagcaatccagcgaccatcaacgcagccacagagttggacacgcccaaggaccttcaggtttctgaaactgcagagaccagcctgaccctgctctggaagacaccgttggccaaatttgaccgctaccgcctcaattacagtctccccacaggccagtgggtgggagtgcagcttccaagaaacaccacttcctatgtcctgagaggcctggaaccaggacaggagtacaatgtcctcctgacagccgagaaaggcagacacaagagcaagcccgcacgtgtgaaggcatccactgaacaagcccctgagctggaaaacctcaccgtgactgaggttggctgggatggcctcagactcaactggaccgcagctgaccaggcctatgagcactttatcattcaggtgcaggaggccaacaaggtggaggcagctcggaacctcaccgtgcctggcagccttcgggctgtggacataccgggcctcaaggctgctacgccttatacagtctccatctatggggtgatccagggctatagaacaccagtgctctctgctgaggcctccacaggggaaactcccaatttgggagaggtcgtggtggccgaggtgggctgggatgccctcaaactcaactggactgctccagaaggggcctatgagtactttttcattcaggtgcaggaggctgacacagtagaggcagcccagaacctcaccgtcccaggaggactgaggtccacagacctgcctgggctcaaagcagccactcattataccatcaccatccgcggggtcactcaggacttcagcacaacccctctctctgttgaagtcttgacaggtattctagacgaattcactaattcacttcctcccctttgtctctgctcgggaggaatcaaagcactttcttgctttaaactgggatcagctcctaccacattggggaaataccagtgaatcatctctgcttcttcctaaatgtcacatcccttatttggctaagtcctagttgtagcccagttccatggaaaattccacctactcctcctttaaaaaagtgagaggtggcttttctttcaaagtaagtttcagtcacaatatctaaaaagttggaaagcccaacctgtaaatgaagaaaaaatagctctgagctcatgagctcattttaagaacaccaaaggactccccatagcc

SEQ ID NO: 311768 - DNA, 3648 bp, Homo sapiens
accggccacagcctgcctactgtcacccgcctctcccgcgcgcagatacacgcccccgcctccgtgggcacaaaggcagcgctgctggggaactcgggggaacgcgcacgtgggaaccgccgcagctccacactccaggtacttcttccaaggacctaggtctctcgcccatcggaaagaaaataattctttcaagaagatcagggacaactgatttgaagtctactctgtgcttctaaatccccaattctgctgaaagtgagataccctagagccctagagccccagcagcacccagccaaacccacctccaccatgggggccatgactcagctgttggcaggtgtctttcttgctttccttgccctcgctaccgaaggtggggtcctcaagaaagtcatccggcacaagcgacagagtggggtgaacgccaccctgccagaagagaaccagccagtggtgtttaaccacgtttacaacatcaagctgccagtgggatcccagtgttcggtggatctggagtcagccagtggggagaaagacctggcaccgccttcagagcccagcgaaagctttcaggagcacacagtagatggggaaaaccagattgtcttcacacatcgcatcaacatcccccgccgggcctgtggctgtgccgcagcccctgatgttaaggagctgctgagcagactggaggagctggagaacctggtgtcttccctgagggagcaatgtactgcaggagcaggctgctgtctccagcctgccacaggccgcttggacaccaggcccttctgtagcggtcggggcaacttcagcactgaaggatgtggctgtgtctgcgaacctggctggaaaggccccaactgctctgagcccgaatgtccaggcaactgtcaccttcgaggccggtgcattgatgggcagtgcatctgtgacgacggcttcacgggcgaggactgcagccagctggcttgccccagcgactgcaatgaccagggcaagtgcgtgaatggagtctgcatctgtttcgaaggctacgccggggctgactgcagccgtgaaatctgcccagtgccctgcagtgaggagcacggcacatgtgtagatggcttgtgtgtgtgccacgatggctttgcaggcgatgactgcaacaagcctctgtgtctcaacaattgctacaaccgtggacgatgcgtggagaatgagtgcgtgtgtgatgagggtttcacgggcgaagactgcagtgagctcatctgccccaatgactgcttcgaccggggccgctgcatcaatggcacctgctactgcgaagaaggcttcacaggtgaagactgcgggaaacccacctgcccacatgcctgccacacccagggccggtgtgaggaggggcagtgtgtatgtgatgagggctttgccggtgtggactgcagcgagaagaggtgtcctgctgactgtcacaatcgtggccgctgtgtagacgggcggtgtgagtgtgatgatggtttcactggagctgactgtggggagctcaagtgtcccaatggctgcagtggccatggccgctgtgtcaatgggcagtgtgtgtgtgatgagggctatactggggaggactgcagccagctacggtgccccaatgactgtcacagtcggggccgctgtgtcgagggcaaatgtgtatgtgagcaaggcttcaagggctatgactgcagtgacatgagctgccctaatgactgtcaccagcacggccgctgtgtgaatggcatgtgtgtttgtgatgacggctacacaggggaagactgccgggatcgccaatgccccagggactgcagcaacaggggcctctgtgtggacggacagtgcgtctgtgaggacggcttcaccggccctgactgtgcagaactctcctgtccaaatgactgccatggccagggtcgctgtgtgaatgggcagtgcgtgtgccatgaaggatttatgggcaaagactgcaaggagcaaagatgtcccagtgactgtcatggccagggccgctgcgtggacggccagtgcatctgccacgagggcttcacaggcctggactgtggccagcactcctgccccagtgactgcaacaacttaggacaatgcgtctcgggccgctgcatctgcaacgagggctacagcggagaagactgctcagaggtgtctcctcccaaagacctcgttgtgacagaagtgacggaagagacggtcaacctggcctgggacaatgagatgcgggtcacagagtaccttgtcgtgtacacgcccacccacgagggtggtctggaaatgcagttccgtgtgcctggggaccagacgtccaccatcatccaggagctggagcctggtgtggagtactttatccgtgtatttgccatcctggagaacaagaagagcattcctgtcagcgccagggtggccacgtacttacctgcacctgaaggcctgaaattcaagtccatcaaggagacatctgtggaagtggagtgggatcctctagacattgcttttgaaacctgggagatcatcttccggaatatgaataaagaagatgagggagagatcaccaaaagcctgaggaggccagagacctcttaccggcaaactggtctagctcctgggcaagagtatgagatatctctgcacatagtgaaaaacaatacccggggccctggcctgaagagggtgaccaccacacgcttggatgcccccagccagatcgaggtgaaagatgtcacagacaccactgccttgatcacctggttcaagcccctggctgagatcgatggcattgagctgacctacggcatcaaagacgtgccaggagaccgtaccaccatcgatctcacagaggacgagaaccagtactccatcgggaacctgaagcctgacactgagtacgaggtgtccctcatctcccgcagaggtgacatgtcaagcaacccagccaaagagaccttcacaacaggcctcgatgctcccaggaatcttcgacgtgtttcccagacagataacagcatcaccctggaatggaggaatggcaaggcagctattgacagttacagaattaagtatgcccccatctctggaggggaccacgctgaggttgatgttccaaagagccaacaagccacaaccaaaaccacactcacaggtctgaggccgggaactgaatatgggattggagtttctgctgtgaaggaagacaaggagagcaatccagcgaccatcaacgcagccacagagttggacacgcccaaggaccttcaggtttctgaaactgcagagaccagcctgaccctgctctggaagacaccgttggccaaatttgaccgctaccgcctcaattacagtctccccacaggccagtgggtgggagtgcagcttccaagaaacaccacttcctatgtcctgagaggcctggaaccaggacaggagtacaatgtcctcctgacagccgagaaaggcagacacaagagcaagcccgcacgtgtgaaggcatccactggtgagtctgccctgagcttcctccaaactctaggttgattctgaggttagcagatctcctcagccagggtgtcctcacatgagaaagccaaatgcaaaagcaagccactttctccatct

SEQ ID NO: 311769 - DNA, 540 bp, Homo sapiens
gtgactcataatcatcataggaatagtaagacttcttgaaaatgtgacaaaaactatgaatccgctccccaggggtggaaatacacacacacacacacacacacacacacacacacacacccctatgcataatcacacactgttttggcatacaagcctataatttcagggaattcaggttatgaattcctacctggtataacaggatgtgagtctcatctgatttcacacactacaacaaatggttctcaagccagatggagcctgagggtgcaaccgtccttcagctgaatttgaatctgggtgccctgggtagatacagaacaatgtggctgcttaagcctggctgagaacttctgtttcttttgttgcaggccgcttggacaccaggcccttctgtagcggtcggggcaacttcagcactgaaggatgtggctgtgtctgcgaacctggctggaaaggccccaactgctctgagcccgaatgtccaggcaactgtcaccttcgaggccggtgcattgatgggcagtgcatctgtga

SEQ ID NO: 311770 - DNA, 474 bp, Homo sapiens
cctgaatcccagcgtgcaattgcctttttaagtaactcagcaactctgtgtccttatgcagaggaggttccagatatgggaaacctcacagtgaccgaggttagctgggatgctctcagactgaactggaccacgccagatggaacctatgaccagtttactattcaggtccaggaggctgaccaggtggaagaggctcacaatctcacggttcctggcagcctgcgttccatggaaatcccaggcctcagggctggcactccttacacagtcaccctgcacggcgaggtcaggggccacagcactcgaccccttgctgtagaggtcgtcacaggtatatgaccctcctcccagactggagacatgataggagccagcatgtcattgaaatagagaaaattcacccgtgtggcagaatcctaccccaatgttgttgacagacagcgtgaatctctaactcaggaaggtctgtgt

SEQ ID NO: 311771 - DNA, 7544 bp, Homo sapiens
accggccacagcctgcctactgtcacccgcctctcccgcgcgcagatacacgcccccgcctccgtgggcacaaaggcagcgctgctggggaactcgggggaacgcgcacgtgggaaccgccgcagctccacactccaggtacttcttccaaggacctaggtctctcgcccatcggaaagaaaataattctttcaagaagatcagggacaactgatttgaagtctactctgtgcttctaaatccccaattctgctgaaagtgagataccctagagccctagagccccagcagcacccagccaaacccacctccaccatgggggccatgactcagctgttggcaggtgtctttcttgctttccttgccctcgctaccgaaggtggggtcctcaagaaagtcatccggcacaagcgacagagtggggtgaacgccaccctgccagaagagaaccagccagtggtgtttaaccacgtttacaacatcaagctgccagtgggatcccagtgttcggtggatctggagtcagccagtggggagaaagacctggcaccgccttcagagcccagcgaaagctttcaggagcacacagtagatggggaaaaccagattgtcttcacacatcgcatcaacatcccccgccgggcctgtggctgtgccgcagcccctgatgttaaggagctgctgagcagactggaggagctggagaacctggtgtcttccctgagggagcaatgtactgcaggagcaggctgctgtctccagcctgccacaggccgcttggacaccaggcccttctgtagcggtcggggcaacttcagcactgaaggatgtggctgtgtctgcgaacctggctggaaaggccccaactgctctgagcccgaatgtccaggcaactgtcaccttcgaggccggtgcattgatgggcagtgcatctgtgacgacggcttcacgggcgaggactgcagccagctggcttgccccagcgactgcaatgaccagggcaagtgcgtgaatggagtctgcatctgtttcgaaggctacgccggggctgactgcagccgtgaaatctgcccagtgccctgcagtgaggagcacggcacatgtgtagatggcttgtgtgtgtgccacgatggctttgcaggcgatgactgcaacaagcctctgtgtctcaacaattgctacaaccgtggacgatgcgtggagaatgagtgcgtgtgtgatgagggtttcacgggcgaagactgcagtgagctcatctgccccaatgactgcttcgaccggggccgctgcatcaatggcacctgctactgcgaagaaggcttcacaggtgaagactgcgggaaacccacctgcccacatgcctgccacacccagggccggtgtgaggaggggcagtgtgtatgtgatgagggctttgccggtgtggactgcagcgagaagaggtgtcctgctgactgtcacaatcgtggccgctgtgtagacgggcggtgtgagtgtgatgatggtttcactggagctgactgtggggagctcaagtgtcccaatggctgcagtggccatggccgctgtgtcaatgggcagtgtgtgtgtgatgagggctatactggggaggactgcagccagctacggtgccccaatgactgtcacagtcggggccgctgtgtcgagggcaaatgtgtatgtgagcaaggcttcaagggctatgactgcagtgacatgagctgccctaatgactgtcaccagcacggccgctgtgtgaatggcatgtgtgtttgtgatgacggctacacaggggaagactgccgggatcgccaatgccccagggactgcagcaacaggggcctctgtgtggacggacagtgcgtctgtgaggacggcttcaccggccctgactgtgcagaactctcctgtccaaatgactgccatggccagggtcgctgtgtgaatgggcagtgcgtgtgccatgaaggatttatgggcaaagactgcaaggagcaaagatgtcccagtgactgtcatggccagggccgctgcgtggacggccagtgcatctgccacgagggcttcacaggcctggactgtggccagcactcctgccccagtgactgcaacaacttaggacaatgcgtctcgggccgctgcatctgcaacgagggctacagcggagaagactgctcagaggtgtctcctcccaaagacctcgttgtgacagaagtgacggaagagacggtcaacctggcctgggacaatgagatgcgggtcacagagtaccttgtcgtgtacacgcccacccacgagggtggtctggaaatgcagttccgtgtgcctggggaccagacgtccaccatcatccaggagctggagcctggtgtggagtactttatccgtgtatttgccatcctggagaacaagaagagcattcctgtcagcgccagggtggccacgtacttacctgcacctgaaggcctgaaattcaagtccatcaaggagacatctgtggaagtggagtgggatcctctagacattgcttttgaaacctgggagatcatcttccggaatatgaataaagaagatgagggagagatcaccaaaagcctgaggaggccagagacctcttaccggcaaactggtctagctcctgggcaagagtatgagatatctctgcacatagtgaaaaacaatacccggggccctggcctgaagagggtgaccaccacacgcttggatgcccccagccagatcgaggtgaaagatgtcacagacaccactgccttgatcacctggttcaagcccctggctgagatcgatggcattgagctgacctacggcatcaaagacgtgccaggagaccgtaccaccatcgatctcacagaggacgagaaccagtactccatcgggaacctgaagcctgacactgagtacgaggtgtccctcatctcccgcagaggtgacatgtcaagcaacccagccaaagagaccttcacaacaggcctcgatgctcccaggaatcttcgacgtgtttcccagacagataacagcatcaccctggaatggaggaatggcaaggcagctattgacagttacagaattaagtatgcccccatctctggaggggaccacgctgaggttgatgttccaaagagccaacaagccacaaccaaaaccacactcacaggtctgaggccgggaactgaatatgggattggagtttctgctgtgaaggaagacaaggagagcaatccagcgaccatcaacgcagccacagagttggacacgcccaaggaccttcaggtttctgaaactgcagagaccagcctgaccctgctctggaagacaccgttggccaaatttgaccgctaccgcctcaattacagtctccccacaggccagtgggtgggagtgcagcttccaagaaacaccacttcctatgtcctgagaggcctggaaccaggacaggagtacaatgtcctcctgacagccgagaaaggcagacacaagagcaagcccgcacgtgtgaaggcatccactgaacaagcccctgagctggaaaacctcaccgtgactgaggttggctgggatggcctcagactcaactggaccgcagctgaccaggcctatgagcactttatcattcaggtgcaggaggccaacaaggtggaggcagctcggaacctcaccgtgcctggcagccttcgggctgtggacataccgggcctcaaggctgctacgccttatacagtctccatctatggggtgatccagggctatagaacaccagtgctctctgctgaggcctccacaggggaaactcccaatttgggagaggtcgtggtggccgaggtgggctgggatgccctcaaactcaactggactgctccagaaggggcctatgagtactttttcattcaggtgcaggaggctgacacagtagaggcagcccagaacctcaccgtcccaggaggactgaggtccacagacctgcctgggctcaaagcagccactcattataccatcaccatccgcggggtcactcaggacttcagcacaacccctctctctgttgaagtcttgacagaggaggttccagatatgggaaacctcacagtgaccgaggttagctgggatgctctcagactgaactggaccacgccagatggaacctatgaccagtttactattcaggtccaggaggctgaccaggtggaagaggctcacaatctcacggttcctggcagcctgcgttccatggaaatcccaggcctcagggctggcactccttacacagtcaccctgcacggcgaggtcaggggccacagcactcgaccccttgctgtagaggtcgtcacagaggatctcccacagctgggagatttagccgtgtctgaggttggctgggatggcctcagactcaactggaccgcagctgacaatgcctatgagcactttgtcattcaggtgcaggaggtcaacaaagtggaggcagcccagaacctcacgttgcctggcagcctcagggctgtggacatcccgggcctcgaggctgccacgccttatagagtctccatctatggggtgatccggggctatagaacaccagtactctctgctgaggcctccacagccaaagaacctgaaattggaaacttaaatgtttctgacataactcccgagagcttcaatctctcctggatggctaccgatgggatcttcgagacctttaccattgaaattattgattccaataggttgctggagactgtggaatataatatctctggtgctgaacgaactgcccatatctcagggctaccccctagtactgattttattgtctacctctctggacttgctcccagcatccggaccaaaaccatcagtgccacagccacgacagaggccctgccccttctggaaaacctaaccatttccgacattaatccctacgggttcacagtttcctggatggcatcggagaatgcctttgacagctttctagtaacggtggtggattctgggaagctgctggacccccaggaattcacactttcaggaacccagaggaagctggagcttagaggcctcataactggcattggctatgaggttatggtctctggcttcacccaagggcatcaaaccaagcccttgagggctgagattgttacagaagccgaaccggaagttgacaaccttctggtttcagatgccaccccagacggtttccgtctgtcctggacagctgatgaaggggtcttcgacaattttgttctcaaaatcagagataccaaaaagcagtctgagccactggaaataaccctacttgcccccgaacgtaccagggacttaacaggtctcagagaggctactgaatacgaaattgaactctatggaataagcaaaggaaggcgatcccagacagtcagtgctatagcaacaacagccatgggctccccaaaggaagtcattttctcagacatcactgaaaattcggctactgtcagctggagggcacccacggcccaagtggagagcttccggattacctatgtgcccattacaggaggtacaccctccatggtaactgtggacggaaccaagactcagaccaggctggtgaaactcatacctggcgtggagtaccttgtcagcatcatcgccatgaagggctttgaggaaagtgaacctgtctcagggtcattcaccacagctctggatggcccatctggcctggtgacagccaacatcactgactcagaagccttggccaggtggcagccagccattgccactgtggacagttatgtcatctcctacacaggcgagaaagtgccagaaattacacgcacggtgtccgggaacacagtggagtatgctctgaccgacctcgagcctgccacggaatacacactgagaatctttgcagagaaagggccccagaagagctcaaccatcactgccaagttcacaacagacctcgattctccaagagacttgactgctactgaggttcagtcggaaactgccctccttacctggcgacccccccgggcatcagtcaccggttacctgctggtctatgaatcagtggatggcacagtcaaggaagtcattgtgggtccagataccacctcctacagcctggcagacctgagcccatccacccactacacagccaagatccaggcactcaatgggcccctgaggagcaatatgatccagaccatcttcaccacaattggactcctgtaccccttccccaaggactgctcccaagcaatgctgaatggagacacgacctctggcctctacaccatttatctgaatggtgataaggctcaggcgctggaagtcttctgtgacatgacctctgatgggggtggatggattgtgttcctgagacgcaaaaacggacgcgagaacttctaccaaaactggaaggcatatgctgctggatttggggaccgcagagaagaattctggcttgggctggacaacctgaacaaaatcacagcccaggggcagtacgagctccgggtggacctgcgggaccatggggagacagcctttgctgtctatgacaagttcagcgtgggagatgccaagactcgctacaagctgaaggtggaggggtacagtgggacagcaggtgactccatggcctaccacaatggcagatccttctccacctttgacaaggacacagattcagccatcaccaactgtgctctgtcctacaaaggggctttctggtacaggaactgtcaccgtgtcaacctgatggggagatatggggacaataaccacagtcagggcgttaactggttccactggaagggccacgaacactcaatccagtttgctgagatgaagctgagaccaagcaacttcagaaatcttgaaggcaggcgcaaacgggcataaattccagggaccactgggtgagagaggaataaggcccagagcgaggaaaggattttaccaaagcatcaatacaaccagcccaaccatcggtccacacctgggcatttggtgagagtcaaagctgaccatggatccctggggccaacggcaacagcatgggcctcacctcctctgtgatttctttctttgcaccaaagacatcagtctccaacatgtttctgttttgttgtttgattcagcaaaaatctcccagtgacaacatcgcaatagttttttacttctcttaggtggctctgggaatgggagaggggtaggatgtacaggggtagtttgttttagaaccagccgtattttacatgaagctgtataattaattgtcattatttttgttagcaaagattaaatgtgtcattggaagccatccctttttttacatttcatacaacagaaaccagaaaagcaatactgtttccattttaaggatatgattaatattattaatataataatgatgatgatgatgatgaaaactaaggatttttcaagagatctttctttccaaaacatttctggacagtacctgattgtattttttttttaaataaaagcacaagtacttttga

SEQ ID NO: 311772 - DNA, 7271 bp, Homo sapiens
accggccacagcctgcctactgtcacccgcctctcccgcgcgcagatacacgcccccgcctccgtgggcacaaaggcagcgctgctggggaactcgggggaacgcgcacgtgggaaccgccgcagctccacactccaggtacttcttccaaggacctaggtctctcgcccatcggaaagaaaataattctttcaagaagatcagggacaactgatttgaagtctactctgtgcttctaaatccccaattctgctgaaagtgagataccctagagccctagagccccagcagcacccagccaaacccacctccaccatgggggccatgactcagctgttggcaggtgtctttcttgctttccttgccctcgctaccgaaggtggggtcctcaagaaagtcatccggcacaagcgacagagtggggtgaacgccaccctgccagaagagaaccagccagtggtgtttaaccacgtttacaacatcaagctgccagtgggatcccagtgttcggtggatctggagtcagccagtggggagaaagacctggcaccgccttcagagcccagcgaaagctttcaggagcacacagtagatggggaaaaccagattgtcttcacacatcgcatcaacatcccccgccgggcctgtggctgtgccgcagcccctgatgttaaggagctgctgagcagactggaggagctggagaacctggtgtcttccctgagggagcaatgtactgcaggagcaggctgctgtctccagcctgccacaggccgcttggacaccaggcccttctgtagcggtcggggcaacttcagcactgaaggatgtggctgtgtctgcgaacctggctggaaaggccccaactgctctgagcccgaatgtccaggcaactgtcaccttcgaggccggtgcattgatgggcagtgcatctgtgacgacggcttcacgggcgaggactgcagccagctggcttgccccagcgactgcaatgaccagggcaagtgcgtgaatggagtctgcatctgtttcgaaggctacgccggggctgactgcagccgtgaaatctgcccagtgccctgcagtgaggagcacggcacatgtgtagatggcttgtgtgtgtgccacgatggctttgcaggcgatgactgcaacaagcctctgtgtctcaacaattgctacaaccgtggacgatgcgtggagaatgagtgcgtgtgtgatgagggtttcacgggcgaagactgcagtgagctcatctgccccaatgactgcttcgaccggggccgctgcatcaatggcacctgctactgcgaagaaggcttcacaggtgaagactgcgggaaacccacctgcccacatgcctgccacacccagggccggtgtgaggaggggcagtgtgtatgtgatgagggctttgccggtgtggactgcagcgagaagaggtgtcctgctgactgtcacaatcgtggccgctgtgtagacgggcggtgtgagtgtgatgatggtttcactggagctgactgtggggagctcaagtgtcccaatggctgcagtggccatggccgctgtgtcaatgggcagtgtgtgtgtgatgagggctatactggggaggactgcagccagctacggtgccccaatgactgtcacagtcggggccgctgtgtcgagggcaaatgtgtatgtgagcaaggcttcaagggctatgactgcagtgacatgagctgccctaatgactgtcaccagcacggccgctgtgtgaatggcatgtgtgtttgtgatgacggctacacaggggaagactgccgggatcgccaatgccccagggactgcagcaacaggggcctctgtgtggacggacagtgcgtctgtgaggacggcttcaccggccctgactgtgcagaactctcctgtccaaatgactgccatggccagggtcgctgtgtgaatgggcagtgcgtgtgccatgaaggatttatgggcaaagactgcaaggagcaaagatgtcccagtgactgtcatggccagggccgctgcgtggacggccagtgcatctgccacgagggcttcacaggcctggactgtggccagcactcctgccccagtgactgcaacaacttaggacaatgcgtctcgggccgctgcatctgcaacgagggctacagcggagaagactgctcagaggtgtctcctcccaaagacctcgttgtgacagaagtgacggaagagacggtcaacctggcctgggacaatgagatgcgggtcacagagtaccttgtcgtgtacacgcccacccacgagggtggtctggaaatgcagttccgtgtgcctggggaccagacgtccaccatcatccaggagctggagcctggtgtggagtactttatccgtgtatttgccatcctggagaacaagaagagcattcctgtcagcgccagggtggccacgtacttacctgcacctgaaggcctgaaattcaagtccatcaaggagacatctgtggaagtggagtgggatcctctagacattgcttttgaaacctgggagatcatcttccggaatatgaataaagaagatgagggagagatcaccaaaagcctgaggaggccagagacctcttaccggcaaactggtctagctcctgggcaagagtatgagatatctctgcacatagtgaaaaacaatacccggggccctggcctgaagagggtgaccaccacacgcttggatgcccccagccagatcgaggtgaaagatgtcacagacaccactgccttgatcacctggttcaagcccctggctgagatcgatggcattgagctgacctacggcatcaaagacgtgccaggagaccgtaccaccatcgatctcacagaggacgagaaccagtactccatcgggaacctgaagcctgacactgagtacgaggtgtccctcatctcccgcagaggtgacatgtcaagcaacccagccaaagagaccttcacaacaggcctcgatgctcccaggaatcttcgacgtgtttcccagacagataacagcatcaccctggaatggaggaatggcaaggcagctattgacagttacagaattaagtatgcccccatctctggaggggaccacgctgaggttgatgttccaaagagccaacaagccacaaccaaaaccacactcacaggtctgaggccgggaactgaatatgggattggagtttctgctgtgaaggaagacaaggagagcaatccagcgaccatcaacgcagccacagagttggacacgcccaaggaccttcaggtttctgaaactgcagagaccagcctgaccctgctctggaagacaccgttggccaaatttgaccgctaccgcctcaattacagtctccccacaggccagtgggtgggagtgcagcttccaagaaacaccacttcctatgtcctgagaggcctggaaccaggacaggagtacaatgtcctcctgacagccgagaaaggcagacacaagagcaagcccgcacgtgtgaaggcatccactgaacaagcccctgagctggaaaacctcaccgtgactgaggttggctgggatggcctcagactcaactggaccgcagctgaccaggcctatgagcactttatcattcaggtgcaggaggccaacaaggtggaggcagctcggaacctcaccgtgcctggcagccttcgggctgtggacataccgggcctcaaggctgctacgccttatacagtctccatctatggggtgatccagggctatagaacaccagtgctctctgctgaggcctccacaggggaaactcccaatttgggagaggtcgtggtggccgaggtgggctgggatgccctcaaactcaactggactgctccagaaggggcctatgagtactttttcattcaggtgcaggaggctgacacagtagaggcagcccagaacctcaccgtcccaggaggactgaggtccacagacctgcctgggctcaaagcagccactcattataccatcaccatccgcggggtcactcaggacttcagcacaacccctctctctgttgaagtcttgacagaggaggttccagatatgggaaacctcacagtgaccgaggttagctgggatgctctcagactgaactggaccacgccagatggaacctatgaccagtttactattcaggtccaggaggctgaccaggtggaagaggctcacaatctcacggttcctggcagcctgcgttccatggaaatcccaggcctcagggctggcactccttacacagtcaccctgcacggcgaggtcaggggccacagcactcgaccccttgctgtagaggtcgtcacagaggatctcccacagctgggagatttagccgtgtctgaggttggctgggatggcctcagactcaactggaccgcagctgacaatgcctatgagcactttgtcattcaggtgcaggaggtcaacaaagtggaggcagcccagaacctcacgttgcctggcagcctcagggctgtggacatcccgggcctcgaggctgccacgccttatagagtctccatctatggggtgatccggggctatagaacaccagtactctctgctgaggcctccacagccaaagaacctgaaattggaaacttaaatgtttctgacataactcccgagagcttcaatctctcctggatggctaccgatgggatcttcgagacctttaccattgaaattattgattccaataggttgctggagactgtggaatataatatctctggtgctgaacgaactgcccatatctcagggctaccccctagtactgattttattgtctacctctctggacttgctcccagcatccggaccaaaaccatcagtgccacagccacgacagaagccgaaccggaagttgacaaccttctggtttcagatgccaccccagacggtttccgtctgtcctggacagctgatgaaggggtcttcgacaattttgttctcaaaatcagagataccaaaaagcagtctgagccactggaaataaccctacttgcccccgaacgtaccagggacttaacaggtctcagagaggctactgaatacgaaattgaactctatggaataagcaaaggaaggcgatcccagacagtcagtgctatagcaacaacagccatgggctccccaaaggaagtcattttctcagacatcactgaaaattcggctactgtcagctggagggcacccacggcccaagtggagagcttccggattacctatgtgcccattacaggaggtacaccctccatggtaactgtggacggaaccaagactcagaccaggctggtgaaactcatacctggcgtggagtaccttgtcagcatcatcgccatgaagggctttgaggaaagtgaacctgtctcagggtcattcaccacagctctggatggcccatctggcctggtgacagccaacatcactgactcagaagccttggccaggtggcagccagccattgccactgtggacagttatgtcatctcctacacaggcgagaaagtgccagaaattacacgcacggtgtccgggaacacagtggagtatgctctgaccgacctcgagcctgccacggaatacacactgagaatctttgcagagaaagggccccagaagagctcaaccatcactgccaagttcacaacagacctcgattctccaagagacttgactgctactgaggttcagtcggaaactgccctccttacctggcgacccccccgggcatcagtcaccggttacctgctggtctatgaatcagtggatggcacagtcaaggaagtcattgtgggtccagataccacctcctacagcctggcagacctgagcccatccacccactacacagccaagatccaggcactcaatgggcccctgaggagcaatatgatccagaccatcttcaccacaattggactcctgtaccccttccccaaggactgctcccaagcaatgctgaatggagacacgacctctggcctctacaccatttatctgaatggtgataaggctcaggcgctggaagtcttctgtgacatgacctctgatgggggtggatggattgtgttcctgagacgcaaaaacggacgcgagaacttctaccaaaactggaaggcatatgctgctggatttggggaccgcagagaagaattctggcttgggctggacaacctgaacaaaatcacagcccaggggcagtacgagctccgggtggacctgcgggaccatggggagacagcctttgctgtctatgacaagttcagcgtgggagatgccaagactcgctacaagctgaaggtggaggggtacagtgggacagcaggtgactccatggcctaccacaatggcagatccttctccacctttgacaaggacacagattcagccatcaccaactgtgctctgtcctacaaaggggctttctggtacaggaactgtcaccgtgtcaacctgatggggagatatggggacaataaccacagtcagggcgttaactggttccactggaagggccacgaacactcaatccagtttgctgagatgaagctgagaccaagcaacttcagaaatcttgaaggcaggcgcaaacgggcataaattccagggaccactgggtgagagaggaataaggcccagagcgaggaaaggattttaccaaagcatcaatacaaccagcccaaccatcggtccacacctgggcatttggtgagagtcaaagctgaccatggatccctggggccaacggcaacagcatgggcctcacctcctctgtgatttctttctttgcaccaaagacatcagtctccaacatgtttctgttttgttgtttgattcagcaaaaatctcccagtgacaacatcgcaatagttttttacttctcttaggtggctctgggaatgggagaggggtaggatgtacaggggtagtttgttttagaaccagccgtattttacatgaagctgtataattaattgtcattatttttgttagcaaagattaaatgtgtcattggaagccatccctttttttacatttcatacaacagaaaccagaaaagcaatactgtttccattttaaggatatgattaatattattaatataataatgatgatgatgatgatgaaaactaaggatttttcaagagatctttctttccaaaacatttctggacagtacctgattgtattttttttttaaataaaagcacaagtacttttga

SEQ ID NO: 311773 - DNA, 5906 bp, Homo sapiens
accggccacagcctgcctactgtcacccgcctctcccgcgcgcagatacacgcccccgcctccgtgggcacaaaggcagcgctgctggggaactcgggggaacgcgcacgtgggaaccgccgcagctccacactccaggtacttcttccaaggacctaggtctctcgcccatcggaaagaaaataattctttcaagaagatcagggacaactgatttgaagtctactctgtgcttctaaatccccaattctgctgaaagtgagataccctagagccctagagccccagcagcacccagccaaacccacctccaccatgggggccatgactcagctgttggcaggtgtctttcttgctttccttgccctcgctaccgaaggtggggtcctcaagaaagtcatccggcacaagcgacagagtggggtgaacgccaccctgccagaagagaaccagccagtggtgtttaaccacgtttacaacatcaagctgccagtgggatcccagtgttcggtggatctggagtcagccagtggggagaaagacctggcaccgccttcagagcccagcgaaagctttcaggagcacacagtagatggggaaaaccagattgtcttcacacatcgcatcaacatcccccgccgggcctgtggctgtgccgcagcccctgatgttaaggagctgctgagcagactggaggagctggagaacctggtgtcttccctgagggagcaatgtactgcaggagcaggctgctgtctccagcctgccacaggccgcttggacaccaggcccttctgtagcggtcggggcaacttcagcactgaaggatgtggctgtgtctgcgaacctggctggaaaggccccaactgctctgagcccgaatgtccaggcaactgtcaccttcgaggccggtgcattgatgggcagtgcatctgtgacgacggcttcacgggcgaggactgcagccagctggcttgccccagcgactgcaatgaccagggcaagtgcgtgaatggagtctgcatctgtttcgaaggctacgccggggctgactgcagccgtgaaatctgcccagtgccctgcagtgaggagcacggcacatgtgtagatggcttgtgtgtgtgccacgatggctttgcaggcgatgactgcaacaagcctctgtgtctcaacaattgctacaaccgtggacgatgcgtggagaatgagtgcgtgtgtgatgagggtttcacgggcgaagactgcagtgagctcatctgccccaatgactgcttcgaccggggccgctgcatcaatggcacctgctactgcgaagaaggcttcacaggtgaagactgcgggaaacccacctgcccacatgcctgccacacccagggccggtgtgaggaggggcagtgtgtatgtgatgagggctttgccggtgtggactgcagcgagaagaggtgtcctgctgactgtcacaatcgtggccgctgtgtagacgggcggtgtgagtgtgatgatggtttcactggagctgactgtggggagctcaagtgtcccaatggctgcagtggccatggccgctgtgtcaatgggcagtgtgtgtgtgatgagggctatactggggaggactgcagccagctacggtgccccaatgactgtcacagtcggggccgctgtgtcgagggcaaatgtgtatgtgagcaaggcttcaagggctatgactgcagtgacatgagctgccctaatgactgtcaccagcacggccgctgtgtgaatggcatgtgtgtttgtgatgacggctacacaggggaagactgccgggatcgccaatgccccagggactgcagcaacaggggcctctgtgtggacggacagtgcgtctgtgaggacggcttcaccggccctgactgtgcagaactctcctgtccaaatgactgccatggccagggtcgctgtgtgaatgggcagtgcgtgtgccatgaaggatttatgggcaaagactgcaaggagcaaagatgtcccagtgactgtcatggccagggccgctgcgtggacggccagtgcatctgccacgagggcttcacaggcctggactgtggccagcactcctgccccagtgactgcaacaacttaggacaatgcgtctcgggccgctgcatctgcaacgagggctacagcggagaagactgctcagaggtgtctcctcccaaagacctcgttgtgacagaagtgacggaagagacggtcaacctggcctgggacaatgagatgcgggtcacagagtaccttgtcgtgtacacgcccacccacgagggtggtctggaaatgcagttccgtgtgcctggggaccagacgtccaccatcatccaggagctggagcctggtgtggagtactttatccgtgtatttgccatcctggagaacaagaagagcattcctgtcagcgccagggtggccacgtacttacctgcacctgaaggcctgaaattcaagtccatcaaggagacatctgtggaagtggagtgggatcctctagacattgcttttgaaacctgggagatcatcttccggaatatgaataaagaagatgagggagagatcaccaaaagcctgaggaggccagagacctcttaccggcaaactggtctagctcctgggcaagagtatgagatatctctgcacatagtgaaaaacaatacccggggccctggcctgaagagggtgaccaccacacgcttggatgcccccagccagatcgaggtgaaagatgtcacagacaccactgccttgatcacctggttcaagcccctggctgagatcgatggcattgagctgacctacggcatcaaagacgtgccaggagaccgtaccaccatcgatctcacagaggacgagaaccagtactccatcgggaacctgaagcctgacactgagtacgaggtgtccctcatctcccgcagaggtgacatgtcaagcaacccagccaaagagaccttcacaacaggcctcgatgctcccaggaatcttcgacgtgtttcccagacagataacagcatcaccctggaatggaggaatggcaaggcagctattgacagttacagaattaagtatgcccccatctctggaggggaccacgctgaggttgatgttccaaagagccaacaagccacaaccaaaaccacactcacaggtctgaggccgggaactgaatatgggattggagtttctgctgtgaaggaagacaaggagagcaatccagcgaccatcaacgcagccacagagttggacacgcccaaggaccttcaggtttctgaaactgcagagaccagcctgaccctgctctggaagacaccgttggccaaatttgaccgctaccgcctcaattacagtctccccacaggccagtgggtgggagtgcagcttccaagaaacaccacttcctatgtcctgagaggcctggaaccaggacaggagtacaatgtcctcctgacagccgagaaaggcagacacaagagcaagcccgcacgtgtgaaggcatccactgaagccgaaccggaagttgacaaccttctggtttcagatgccaccccagacggtttccgtctgtcctggacagctgatgaaggggtcttcgacaattttgttctcaaaatcagagataccaaaaagcagtctgagccactggaaataaccctacttgcccccgaacgtaccagggacttaacaggtctcagagaggctactgaatacgaaattgaactctatggaataagcaaaggaaggcgatcccagacagtcagtgctatagcaacaacagccatgggctccccaaaggaagtcattttctcagacatcactgaaaattcggctactgtcagctggagggcacccacggcccaagtggagagcttccggattacctatgtgcccattacaggaggtacaccctccatggtaactgtggacggaaccaagactcagaccaggctggtgaaactcatacctggcgtggagtaccttgtcagcatcatcgccatgaagggctttgaggaaagtgaacctgtctcagggtcattcaccacagctctggatggcccatctggcctggtgacagccaacatcactgactcagaagccttggccaggtggcagccagccattgccactgtggacagttatgtcatctcctacacaggcgagaaagtgccagaaattacacgcacggtgtccgggaacacagtggagtatgctctgaccgacctcgagcctgccacggaatacacactgagaatctttgcagagaaagggccccagaagagctcaaccatcactgccaagttcacaacagacctcgattctccaagagacttgactgctactgaggttcagtcggaaactgccctccttacctggcgacccccccgggcatcagtcaccggttacctgctggtctatgaatcagtggatggcacagtcaaggaagtcattgtgggtccagataccacctcctacagcctggcagacctgagcccatccacccactacacagccaagatccaggcactcaatgggcccctgaggagcaatatgatccagaccatcttcaccacaattggactcctgtaccccttccccaaggactgctcccaagcaatgctgaatggagacacgacctctggcctctacaccatttatctgaatggtgataaggctcaggcgctggaagtcttctgtgacatgacctctgatgggggtggatggattgtgttcctgagacgcaaaaacggacgcgagaacttctaccaaaactggaaggcatatgctgctggatttggggaccgcagagaagaattctggcttgggctggacaacctgaacaaaatcacagcccaggggcagtacgagctccgggtggacctgcgggaccatggggagacagcctttgctgtctatgacaagttcagcgtgggagatgccaagactcgctacaagctgaaggtggaggggtacagtgggacagcaggtgactccatggcctaccacaatggcagatccttctccacctttgacaaggacacagattcagccatcaccaactgtgctctgtcctacaaaggggctttctggtacaggaactgtcaccgtgtcaacctgatggggagatatggggacaataaccacagtcagggcgttaactggttccactggaagggccacgaacactcaatccagtttgctgagatgaagctgagaccaagcaacttcagaaatcttgaaggcaggcgcaaacgggcataaattccagggaccactgggtgagagaggaataaggcccagagcgaggaaaggattttaccaaagcatcaatacaaccagcccaaccatcggtccacacctgggcatttggtgagagtcaaagctgaccatggatccctggggccaacggcaacagcatgggcctcacctcctctgtgatttctttctttgcaccaaagacatcagtctccaacatgtttctgttttgttgtttgattcagcaaaaatctcccagtgacaacatcgcaatagttttttacttctcttaggtggctctgggaatgggagaggggtaggatgtacaggggtagtttgttttagaaccagccgtattttacatgaagctgtataattaattgtcattatttttgttagcaaagattaaatgtgtcattggaagccatccctttttttacatttcatacaacagaaaccagaaaagcaatactgtttccattttaaggatatgattaatattattaatataataatgatgatgatgatgatgaaaactaaggatttttcaagagatctttctttccaaaacatttctggacagtacctgattgtattttttttttaaataaaagcacaagtacttttga

SEQ ID NO: 311774 - DNA, 3931 bp, Homo sapiens
agaaatatgacattgttgtcctgctggtgttttaatagggacagcaccagtaggggatgcagtgaacaaagcctggcacttggactgcaatggcctatagatgtggcattgggtttgccattcccaggttctcagaagcaaaactttctgaggaatagtttaactgaccccatctctgtcattattcagaacaagcccctgagctggaaaacctcaccgtgactgaggttggctgggatggcctcagactcaactggaccgcagctgaccaggcctatgagcactttatcattcaggtgcaggaggccaacaaggtggaggcagctcggaacctcaccgtgcctggcagccttcgggctgtggacataccgggcctcaaggctgctacgccttatacagtctccatctatggggtgatccagggctatagaacaccagtgctctctgctgaggcctccacaggggaaactcccaatttgggagaggtcgtggtggccgaggtgggctgggatgccctcaaactcaactggactgctccagaaggggcctatgagtactttttcattcaggtgcaggaggctgacacagtagaggcagcccagaacctcaccgtcccaggaggactgaggtccacagacctgcctgggctcaaagcagccactcattataccatcaccatccgcggggtcactcaggacttcagcacaacccctctctctgttgaagtcttgacagaggaggttccagatatgggaaacctcacagtgaccgaggttagctgggatgctctcagactgaactggaccacgccagatggaacctatgaccagtttactattcaggtccaggaggctgaccaggtggaagaggctcacaatctcacggttcctggcagcctgcgttccatggaaatcccaggcctcagggctggcactccttacacagtcaccctgcacggcgaggtcaggggccacagcactcgaccccttgctgtagaggtcgtcacagaggatctcccacagctgggagatttagccgtgtctgaggttggctgggatggcctcagactcaactggaccgcagctgacaatgcctatgagcactttgtcattcaggtgcaggaggtcaacaaagtggaggcagcccagaacctcacgttgcctggcagcctcagggctgtggacatcccgggcctcgaggctgccacgccttatagagtctccatctatggggtgatccggggctatagaacaccagtactctctgctgaggcctccacagccaaagaacctgaaattggaaacttaaatgtttctgacataactcccgagagcttcaatctctcctggatggctaccgatgggatcttcgagacctttaccattgaaattattgattccaataggttgctggagactgtggaatataatatctctggtgctgaacgaactgcccatatctcagggctaccccctagtactgattttattgtctacctctctggacttgctcccagcatccggaccaaaaccatcagtgccacagccacgacagaagccgaaccggaagttgacaaccttctggtttcagatgccaccccagacggtttccgtctgtcctggacagctgatgaaggggtcttcgacaattttgttctcaaaatcagagataccaaaaagcagtctgagccactggaaataaccctacttgcccccgaacgtaccagggacttaacaggtctcagagaggctactgaatacgaaattgaactctatggaataagcaaaggaaggcgatcccagacagtcagtgctatagcaacaacagccatgggctccccaaaggaagtcattttctcagacatcactgaaaattcggctactgtcagctggagggcacccacggcccaagtggagagcttccggattacctatgtgcccattacaggaggtacaccctccatggtaactgtggacggaaccaagactcagaccaggctggtgaaactcatacctggcgtggagtaccttgtcagcatcatcgccatgaagggctttgaggaaagtgaacctgtctcagggtcattcaccacagctctggatggcccatctggcctggtgacagccaacatcactgactcagaagccttggccaggtggcagccagccattgccactgtggacagttatgtcatctcctacacaggcgagaaagtgccagaaattacacgcacggtgtccgggaacacagtggagtatgctctgaccgacctcgagcctgccacggaatacacactgagaatctttgcagagaaagggccccagaagagctcaaccatcactgccaagttcacaacagacctcgattctccaagagacttgactgctactgaggttcagtcggaaactgccctccttacctggcgacccccccgggcatcagtcaccggttacctgctggtctatgaatcagtggatggcacagtcaaggaagtcattgtgggtccagataccacctcctacagcctggcagacctgagcccatccacccactacacagccaagatccaggcactcaatgggcccctgaggagcaatatgatccagaccatcttcaccacaattggactcctgtaccccttccccaaggactgctcccaagcaatgctgaatggagacacgacctctggcctctacaccatttatctgaatggtgataaggctcaggcgctggaagtcttctgtgacatgacctctgatgggggtggatggattgtgttcctgagacgcaaaaacggacgcgagaacttctaccaaaactggaaggcatatgctgctggatttggggaccgcagagaagaattctggcttgggctggacaacctgaacaaaatcacagcccaggggcagtacgagctccgggtggacctgcgggaccatggggagacagcctttgctgtctatgacaagttcagcgtgggagatgccaagactcgctacaagctgaaggtggaggggtacagtgggacagcaggtgactccatggcctaccacaatggcagatccttctccacctttgacaaggacacagattcagccatcaccaactgtgctctgtcctacaaaggggctttctggtacaggaactgtcaccgtgtcaacctgatggggagatatggggacaataaccacagtcagggcgttaactggttccactggaagggccacgaacactcaatccagtttgctgagatgaagctgagaccaagcaacttcagaaatcttgaaggcaggcgcaaacgggcataaattccagggaccactgggtgagagaggaataaggcccagagcgaggaaaggattttaccaaagcatcaatacaaccagcccaaccatcggtccacacctgggcatttggtgagagtcaaagctgaccatggatccctggggccaacggcaacagcatgggcctcacctcctctgtgatttctttctttgcaccaaagacatcagtctccaacatgtttctgttttgttgtttgattcagcaaaaatctcccagtgacaacatcgcaatagttttttacttctcttaggtggctctgggaatgggagaggggtaggatgtacaggggtagtttgttttagaaccagccgtattttacatgaagctgtataattaattgtcattatttttgttagcaaagattaaatgtgtcattggaagccatccctttttttacatttcatacaacagaaaccagaaaagcaatactgtttccattttaaggatatgattaatattattaatataataatgatgatgatgatgatgaaaactaaggatttttcaagagatctttctttccaaaacatttctggacagtacctgattgtattttttttttaaataaaagcacaagtacttttga

SEQ ID NO: 311775 - DNA, 3552 bp, Homo sapiens
accatgatcttaacaaacttacccagtgggctcgtcattggaaaaccaaatgtgaacttattttatcggtaatcactaatatcagagagactctgcaacacggactaaatccataattttctcaagactaatgattcctacagaaattaacaacggaatagtcaaacatctgtgtttcccaaagtctttctagagattactagctccacagaatgttcaaaggtcctactcggtgaggaaattccacgttcaaataagtttggaaagactgagttaaacaaagttaaagaggatctttaactgcacggcttttcagaacaccctaacgtgcatcatctccaagaagtacttatccaggcagtattttccaaacttatttgacaaaggatactttttaaggaagaggatcaaacaggaatagttcactgtgagcacactttgggaaactcagctctaaatctacattgacattgagttttgtctagttaaggcaatgcaagatgaaaccctgggtccacagtatgtagcacaaaaggttccaacctcagttctaccatctgaacatttatctaatagttaataaaataacaagaaagaatgcaaaaaaaaaaaaaaaaagtcaagggtaggagccttctttagtgaaacagcactaagaacaaagcaaaaagaccataacattttaaaagccattttgggcaggctcaaggagaatgtaatcagcagtatcatcatgagcagctctacagatcattaatgctggtttatttgtcttttcaaaaagaaaagaaaaaggtcttgcaggggatgggcactcagccactggaagacagagagcaaatgtaaacaatttactggctttgaacttatttaataatatgtgggacgggccaatgctgagtccagatgtggatttactgaattgcttttagacaaaactcacatatgcaaacatatgcttgacttgtattgaatgtgtctactccatctttcccctctcctgactctactggacttgttaatgttgaatgattttatttttggtatctcaggacacttctatctctgaaagccggggcatcactacatattgatacccctactggagagaagattgcacggactggtaaatgatgtgtctttcctccttctcccaccattttctctccctctagaagccgaaccggaagttgacaaccttctggtttcagatgccaccccagacggtttccgtctgtcctggacagctgatgaaggggtcttcgacaattttgttctcaaaatcagagataccaaaaagcagtctgagccactggaaataaccctacttgcccccgaacgtaccagggacttaacaggtctcagagaggctactgaatacgaaattgaactctatggaataagcaaaggaaggcgatcccagacagtcagtgctatagcaacaacagccatgggctccccaaaggaagtcattttctcagacatcactgaaaattcggctactgtcagctggagggcacccacggcccaagtggagagcttccggattacctatgtgcccattacaggaggtacaccctccatggtaactgtggacggaaccaagactcagaccaggctggtgaaactcatacctggcgtggagtaccttgtcagcatcatcgccatgaagggctttgaggaaagtgaacctgtctcagggtcattcaccacagctctggatggcccatctggcctggtgacagccaacatcactgactcagaagccttggccaggtggcagccagccattgccactgtggacagttatgtcatctcctacacaggcgagaaagtgccagaaattacacgcacggtgtccgggaacacagtggagtatgctctgaccgacctcgagcctgccacggaatacacactgagaatctttgcagagaaagggccccagaagagctcaaccatcactgccaagttcacaacagacctcgattctccaagagacttgactgctactgaggttcagtcggaaactgccctccttacctggcgacccccccgggcatcagtcaccggttacctgctggtctatgaatcagtggatggcacagtcaaggaagtcattgtgggtccagataccacctcctacagcctggcagacctgagcccatccacccactacacagccaagatccaggcactcaatgggcccctgaggagcaatatgatccagaccatcttcaccacaattggactcctgtaccccttccccaaggactgctcccaagcaatgctgaatggagacacgacctctggcctctacaccatttatctgaatggtgataaggctcaggcgctggaagtcttctgtgacatgacctctgatgggggtggatggattgtgttcctgagacgcaaaaacggacgcgagaacttctaccaaaactggaaggcatatgctgctggatttggggaccgcagagaagaattctggcttgggctggacaacctgaacaaaatcacagcccaggggcagtacgagctccgggtggacctgcgggaccatggggagacagcctttgctgtctatgacaagttcagcgtgggagatgccaagactcgctacaagctgaaggtggaggggtacagtgggacagcaggtgactccatggcctaccacaatggcagatccttctccacctttgacaaggacacagattcagccatcaccaactgtgctctgtcctacaaaggggctttctggtacaggaactgtcaccgtgtcaacctgatggggagatatggggacaataaccacagtcagggcgttaactggttccactggaagggccacgaacactcaatccagtttgctgagatgaagctgagaccaagcaacttcagaaatcttgaaggcaggcgcaaacgggcataaattccagggaccactgggtgagagaggaataaggcccagagcgaggaaaggattttaccaaagcatcaatacaaccagcccaaccatcggtccacacctgggcatttggtgagagtcaaagctgaccatggatccctggggccaacggcaacagcatgggcctcacctcctctgtgatttctttctttgcaccaaagacatcagtctccaacatgtttctgttttgttgtttgattcagcaaaaatctcccagtgacaacatcgcaatagttttttacttctcttaggtggctctgggaatgggagaggggtaggatgtacaggggtagtttgttttagaaccagccgtattttacatgaagctgtataattaattgtcattatttttgttagcaaagattaaatgtgtcattggaagccatccctttttttacatttcatacaacagaaaccagaaaagcaatactgtttccattttaaggatatgattaatattattaatataataatgatgatgatgatgatgaaaactaaggatttttcaagagatctttctttccaaaacatttctggacagtacctgattgtattttttttttaaataaaagcacaagtacttttga

SEQ ID NO: 311776 - DNA, 7849 bp, Homo sapiens
accggccacagcctgcctactgtcacccgcctctcccgcgcgcagatacacgcccccgcctccgtgggcacaaaggcagcgctgctggggaactcgggggaacgcgcacgtgggaaccgccgcagctccacactccaggtacttcttccaaggacctaggtctctcgcccatcggaaagaaaataattctttcaagaagatcagggacaactgatttgaagtctactctgtgcttctaaatccccaattctgctgaaagtgagataccctagagccctagagccccagcagcacccagccaaacccacctccaccatgggggccatgactcagctgttggcaggtgtctttcttgctttccttgccctcgctaccgaaggtggggtcctcaagaaagtcatccggcacaagcgacagagtggggtgaacgccaccctgccagaagagaaccagccagtggtgtttaaccacgtttacaacatcaagctgccagtgggatcccagtgttcggtggatctggagtcagccagtggggagaaagacctggcaccgccttcagagcccagcgaaagctttcaggagcacacagtagatggggaaaaccagattgtcttcacacatcgcatcaacatcccccgccgggcctgtggctgtgccgcagcccctgatgttaaggagctgctgagcagactggaggagctggagaacctggtgtcttccctgagggagcaatgtactgcaggagcaggctgctgtctccagcctgccacaggccgcttggacaccaggcccttctgtagcggtcggggcaacttcagcactgaaggatgtggctgtgtctgcgaacctggctggaaaggccccaactgctctgagcccgaatgtccaggcaactgtcaccttcgaggccggtgcattgatgggcagtgcatctgtgacgacggcttcacgggcgaggactgcagccagctggcttgccccagcgactgcaatgaccagggcaagtgcgtgaatggagtctgcatctgtttcgaaggctacgccggggctgactgcagccgtgaaatctgcccagtgccctgcagtgaggagcacggcacatgtgtagatggcttgtgtgtgtgccacgatggctttgcaggcgatgactgcaacaagcctctgtgtctcaacaattgctacaaccgtggacgatgcgtggagaatgagtgcgtgtgtgatgagggtttcacgggcgaagactgcagtgagctcatctgccccaatgactgcttcgaccggggccgctgcatcaatggcacctgctactgcgaagaaggcttcacaggtgaagactgcgggaaacccacctgcccacatgcctgccacacccagggccggtgtgaggaggggcagtgtgtatgtgatgagggctttgccggtgtggactgcagcgagaagaggtgtcctgctgactgtcacaatcgtggccgctgtgtagacgggcggtgtgagtgtgatgatggtttcactggagctgactgtggggagctcaagtgtcccaatggctgcagtggccatggccgctgtgtcaatgggcagtgtgtgtgtgatgagggctatactggggaggactgcagccagctacggtgccccaatgactgtcacagtcggggccgctgtgtcgagggcaaatgtgtatgtgagcaaggcttcaagggctatgactgcagtgacatgagctgccctaatgactgtcaccagcacggccgctgtgtgaatggcatgtgtgtttgtgatgacggctacacaggggaagactgccgggatcgccaatgccccagggactgcagcaacaggggcctctgtgtggacggacagtgcgtctgtgaggacggcttcaccggccctgactgtgcagaactctcctgtccaaatgactgccatggccagggtcgctgtgtgaatgggcagtgcgtgtgccatgaaggatttatgggcaaagactgcaaggagcaaagatgtcccagtgactgtcatggccagggccgctgcgtggacggccagtgcatctgccacgagggcttcacaggcctggactgtggccagcactcctgccccagtgactgcaacaacttaggacaatgcgtctcgggccgctgcatctgcaacgagggctacagcggagaagactgctcagaggtgtctcctcccaaagacctcgttgtgacagaagtgacggaagagacggtcaacctggcctgggacaatgagatgcgggtcacagagtaccttgtcgtgtacacgcccacccacgagggtggtctggaaatgcagttccgtgtgcctggggaccagacgtccaccatcatccaggagctggagcctggtgtggagtactttatccgtgtatttgccatcctggagaacaagaagagcattcctgtcagcgccagggtggccacgtacttacctgcacctgaaggcctgaaattcaagtccatcaaggagacatctgtggaagtggagtgggatcctctagacattgcttttgaaacctgggagatcatcttccggaatatgaataaagaagatgagggagagatcaccaaaagcctgaggaggccagagacctcttaccggcaaactggtctagctcctgggcaagagtatgagatatctctgcacatagtgaaaaacaatacccggggccctggcctgaagagggtgaccaccacacgcttggatgcccccagccagatcgaggtgaaagatgtcacagacaccactgccttgatcacctggttcaagcccctggctgagatcgatggcattgagctgacctacggcatcaaagacgtgccaggagaccgtaccaccatcgatctcacagaggacgagaaccagtactccatcgggaacctgaagcctgacactgagtacgaggtgtccctcatctcccgcagaggtgacatgtcaagcaacccagccaaagagaccttcacaacaggcctcgatgctcccaggaatcttcgacgtgtttcccagacagataacagcatcaccctggaatggaggaatggcaaggcagctattgacagttacagaattaagtatgcccccatctctggaggggaccacgctgaggttgatgttccaaagagccaacaagccacaaccaaaaccacactcacaggtctgaggccgggaactgaatatgggattggagtttctgctgtgaaggaagacaaggagagcaatccagcgaccatcaacgcagccacagagttggacacgcccaaggaccttcaggtttctgaaactgcagagaccagcctgaccctgctctggaagacaccgttggccaaatttgaccgctaccgcctcaattacagtctccccacaggccagtgggtgggagtgcagcttccaagaaacaccacttcctatgtcctgagaggcctggaaccaggacaggagtacaatgtcctcctgacagccgagaaaggcagacacaagagcaagcccgcacgtgtgaaggcatccactgaacaagcccctgagctggaaaacctcaccgtgactgaggttggctgggatggcctcagactcaactggaccgcagctgaccaggcctatgagcactttatcattcaggtgcaggaggccaacaaggtggaggcagctcggaacctcaccgtgcctggcagccttcgggctgtggacataccgggcctcaaggctgctacgccttatacagtctccatctatggggtgatccagggctatagaacaccagtgctctctgctgaggcctccacaggggaaactcccaatttgggagaggtcgtggtggccgaggtgggctgggatgccctcaaactcaactggactgctccagaaggggcctatgagtactttttcattcaggtgcaggaggctgacacagtagaggcagcccagaacctcaccgtcccaggaggactgaggtccacagacctgcctgggctcaaagcagccactcattataccatcaccatccgcggggtcactcaggacttcagcacaacccctctctctgttgaagtcttgacagaggaggttccagatatgggaaacctcacagtgaccgaggttagctgggatgctctcagactgaactggaccacgccagatggaacctatgaccagtttactattcaggtccaggaggctgaccaggtggaagaggctcacaatctcacggttcctggcagcctgcgttccatggaaatcccaggcctcagggctggcactccttacacagtcaccctgcacggcgaggtcaggggccacagcactcgaccccttgctgtagaggtcgtcacagaggatctcccacagctgggagatttagccgtgtctgaggttggctgggatggcctcagactcaactggaccgcagctgacaatgcctatgagcactttgtcattcaggtgcaggaggtcaacaaagtggaggcagcccagaacctcacgttgcctggcagcctcagggctgtggacatcccgggcctcgaggctgccacgccttatagagtctccatctatggggtgatccggggctatagaacaccagtactctctgctgaggcctccacagccaaagaacctgaaattggaaacttaaatgtttctgacataactcccgagagcttcaatctctcctggatggctaccgatgggatcttcgagacctttaccattgaaattattgattccaataggttgctggagactgtggaatataatatctctggtgctgaacgaactgcccatatctcagggctaccccctagtactgattttattgtctacctctctggacttgctcccagcatccggaccaaaaccatcagtgccacagccacgacagaggccctgccccttctggaaaacctaaccatttccgacattaatccctacgggttcacagtttcctggatggcatcggagaatgcctttgacagctttctagtaacggtggtggattctgggaagctgctggacccccaggaattcacactttcaggaacccagaggaagctggagcttagaggcctcataactggcattggctatgaggttatggtctctggcttcacccaagggcatcaaaccaagcccttgagggctgagattgttacagaagccgaaccggaagttgacaaccttctggtttcagatgccaccccagacggtttccgtctgtcctggacagctgatgaaggggtcttcgacaattttgttctcaaaatcagagataccaaaaagcagtctgagccactggaaataaccctacttgcccccgaacgtaccagggacttaacaggtctcagagaggctactgaatacgaaattgaactctatggaataagcaaaggaaggcgatcccagacagtcagtgctatagcaacaacagccatgggctccccaaaggaagtcattttctcagacatcactgaaaattcggctactgtcagctggagggcacccacggcccaagtggagagcttccggattacctatgtgcccattacaggaggtacaccctccatggtaactgtggacggaaccaagactcagaccaggctggtgaaactcatacctggcgtggagtaccttgtcagcatcatcgccatgaagggctttgaggaaagtgaacctgtctcagggtcattcaccacagctctggatggcccatctggcctggtgacagccaacatcactgactcagaagccttggccaggtggcagccagccattgccactgtggacagttatgtcatctcctacacaggcgagaaagtgccagaaattacacgcacggtgtccgggaacacagtggagtatgctctgaccgacctcgagcctgccacggaatacacactgagaatctttgcagagaaagggccccagaagagctcaaccatcactgccaagttcacaacagacctcgattctccaagagacttgactgctactgaggttcagtcggaaactgccctccttacctggcgacccccccgggcatcagtcaccggttacctgctggtctatgaatcagtggatggcacagtcaaggaagtcattgtgggtccagataccacctcctacagcctggcagacctgagcccatccacccactacacagccaagatccaggcactcaatgggcccctgaggagcaatatgatccagaccatcttcaccacaattggactcctgtaccccttccccaaggactgctcccaagcaatgctgaatggagacacgacctctggcctctacaccatttatctgaatggtgataaggctcaggcgctggaagtcttctgtgacatgacctctgatgggggtggatggattgtgttcctgagacgcaaaaacggacgcgagaacttctaccaaaactggaaggcatatgctgctggatttggggaccgcagagaagaattctggcttgggctggacaacctgaacaaaatcacagcccaggggcagtacgagctccgggtggacctgcgggaccatggggagacagcctttgctgtctatgacaagttcagcgtgggagatgccaagactcgctacaagctgaaggtggaggggtacagtgggacagcaggtgactccatggcctaccacaatggcagatccttctccacctttgacaaggacacagattcagccatcaccaactgtgctctgtcctacaaaggggctttctggtacaggaactgtcaccgtgtcaacctgatggggagatatggggacaataaccacagtcagggcgttaactggttccactggaagggccacgaacactcaatccagtttgctgagatgaagctgagaccaagcaacttcagaaatcttgaaggcaggcgcaaacgggcataaattccagggaccactgggtgagagaggaataaggcccagagcgaggaaaggattttaccaaagcatcaatacaaccagcccaaccatcggtccacacctgggcatttggtgagagtcaaagctgaccatggatccctggggccaacggcaacagcatgggcctcacctcctctgtgatttctttctttgcaccaaagacatcagtctccaacatgtttctgttttgttgtttgattcagcaaaaatctcccagtgacaacatcgcaatagttttttacttctcttaggtggctctgggaatgggagaggggtaggatgtacaggggtagtttgttttagaaccagccgtattttacatgaagctgtataattaattgtcattatttttgttagcaaagattaaatgtgtcattggaagccatccctttttttacatttcatacaacagaaaccagaaaagcaatactgtttccattttaaggatatgattaatattattaatataataatgatgatgatgatgatgaaaactaaggatttttcaagagatctttctttccaaaacatttctggacagtacctgattgtattttttttttaaataaaagcacaagtacttttgagtttgttattttgctttgaattgttgagtctgaatttcaccaaagccaatcatttgaacaaagcggggaatgttgggataggaaaggtaagtagggatagtggtcaagtgggaggggtggaaaggagactaaagactgggagagagggaagcactttttttaaataaagttgaacacacttgggaaaagcttacaggccaggcctgtaatcccaacactttgggaggccaaggtgggaggatagcttaaccccaggagtttgagaccagcctgagcaacatagtgagaacttgtctctacagaaa

SEQ ID NO: 311777 - DNA, 1814 bp, Homo sapiens
gaccttggtctccccacggggaaggaaaagattttaagaggagggctttgtaagtggaaaaacagttcccactggccctaaacctagtatttaatgatccacgttccaggcaggaaaatatttttgaagaggcatattttttaggcaatttttcctagatgtttgttaggtttctatacattgagagctttttacaaactatagcaagcagggaaacagaggaaccatcctctctgtcaggacctcgattctccaagagacttgactgctactgaggttcagtcggaaactgccctccttacctggcgacccccccgggcatcagtcaccggttacctgctggtctatgaatcagtggatggcacagtcaaggaagtcattgtgggtccagataccacctcctacagcctggcagacctgagcccatccacccactacacagccaagatccaggcactcaatgggcccctgaggagcaatatgatccagaccatcttcaccacaattggactcctgtaccccttccccaaggactgctcccaagcaatgctgaatggagacacgacctctggcctctacaccatttatctgaatggtgataaggctcaggcgctggaagtcttctgtgacatgacctctgatgggggtggatggattgtgttcctgagacgcaaaaacggacgcgagaacttctaccaaaactggaaggcatatgctgctggatttggggaccgcagagaagaattctggcttgggctggacaacctgaacaaaatcacagcccaggggcagtacgagctccgggtggacctgcgggaccatggggagacagcctttgctgtctatgacaagttcagcgtgggagatgccaagactcgctacaagctgaaggtggaggggtacagtgggacagcaggtgactccatggcctaccacaatggcagatccttctccacctttgacaaggacacagattcagccatcaccaactgtgctctgtcctacaaaggggctttctggtacaggaactgtcaccgtgtcaacctgatggggagatatggggacaataaccacagtcagggcgttaactggttccactggaagggccacgaacactcaatccagtttgctgagatgaagctgagaccaagcaacttcagaaatcttgaaggcaggcgcaaacgggcataaattccagggaccactgggtgagagaggaataaggcccagagcgaggaaaggattttaccaaagcatcaatacaaccagcccaaccatcggtccacacctgggcatttggtgagagtcaaagctgaccatggatccctggggccaacggcaacagcatgggcctcacctcctctgtgatttctttctttgcaccaaagacatcagtctccaacatgtttctgttttgttgtttgattcagcaaaaatctcccagtgacaacatcgcaatagttttttacttctcttaggtggctctgggaatgggagaggggtaggatgtacaggggtagtttgttttagaaccagccgtattttacatgaagctgtataattaattgtcattatttttgttagcaaagattaaatgtgtcattggaagccatccctttttttacatttcatacaacagaaaccagaaaagcaatactgtttccattttaaggatatgattaatattattaatataataatgatgatgatgatgatgaaaactaaggatttttcaagagatctttctttccaaaacatttctggacagtacctgattgtattttttttttaaataaaagcacaagtacttttga

SEQ ID NO: 311778 - DNA, 7370 bp, Homo sapiens
  misc_feature (7345)..(7345): n is a, c, g, or t
accggccacagcctgcctactgtcacccgcctctcccgcgcgcagatacacgcccccgcctccgtgggcacaaaggcagcgctgctggggaactcgggggaacgcgcacgtgggaaccgccgcagctccacactccaggtacttcttccaaggacctaggtctctcgcccatcggaaagaaaataattctttcaagaagatcagggacaactgatttgaagtctactctgtgcttctaaatccccaattctgctgaaagtgagataccctagagccctagagccccagcagcacccagccaaacccacctccaccatgggggccatgactcagctgttggcaggtgtctttcttgctttccttgccctcgctaccgaaggtggggtcctcaagaaagtcatccggcacaagcgacagagtggggtgaacgccaccctgccagaagagaaccagccagtggtgtttaaccacgtttacaacatcaagctgccagtgggatcccagtgttcggtggatctggagtcagccagtggggagaaagacctggcaccgccttcagagcccagcgaaagctttcaggagcacacagtagatggggaaaaccagattgtcttcacacatcgcatcaacatcccccgccgggcctgtggctgtgccgcagcccctgatgttaaggagctgctgagcagactggaggagctggagaacctggtgtcttccctgagggagcaatgtactgcaggagcaggctgctgtctccagcctgccacaggccgcttggacaccaggcccttctgtagcggtcggggcaacttcagcactgaaggatgtggctgtgtctgcgaacctggctggaaaggccccaactgctctgagcccgaatgtccaggcaactgtcaccttcgaggccggtgcattgatgggcagtgcatctgtgacgacggcttcacgggcgaggactgcagccagctggcttgccccagcgactgcaatgaccagggcaagtgcgtgaatggagtctgcatctgtttcgaaggctacgccggggctgactgcagccgtgaaatctgcccagtgccctgcagtgaggagcacggcacatgtgtagatggcttgtgtgtgtgccacgatggctttgcaggcgatgactgcaacaagcctctgtgtctcaacaattgctacaaccgtggacgatgcgtggagaatgagtgcgtgtgtgatgagggtttcacgggcgaagactgcagtgagctcatctgccccaatgactgcttcgaccggggccgctgcatcaatggcacctgctactgcgaagaaggcttcacaggtgaagactgcgggaaacccacctgcccacatgcctgccacacccagggccggtgtgaggaggggcagtgtgtatgtgatgagggctttgccggtgtggactgcagcgagaagaggtgtcctgctgactgtcacaatcgtggccgctgtgtagacgggcggtgtgagtgtgatgatggtttcactggagctgactgtggggagctcaagtgtcccaatggctgcagtggccatggccgctgtgtcaatgggcagtgtgtgtgtgatgagggctatactggggaggactgcagccagctacggtgccccaatgactgtcacagtcggggccgctgtgtcgagggcaaatgtgtatgtgagcaaggcttcaagggctatgactgcagtgacatgagctgccctaatgactgtcaccagcacggccgctgtgtgaatggcatgtgtgtttgtgatgacggctacacaggggaagactgccgggatcgccaatgccccagggactgcagcaacaggggcctctgtgtggacggacagtgcgtctgtgaggacggcttcaccggccctgactgtgcagaactctcctgtccaaatgactgccatggccagggtcgctgtgtgaatgggcagtgcgtgtgccatgaaggatttatgggcaaagactgcaaggagcaaagatgtcccagtgactgtcatggccagggccgctgcgtggacggccagtgcatctgccacgagggcttcacaggcctggactgtggccagcactcctgccccagtgactgcaacaacttaggacaatgcgtctcgggccgctgcatctgcaacgagggctacagcggagaagactgctcagaggtgtctcctcccaaagacctcgttgtgacagaagtgacggaagagacggtcaacctggcctgggacaatgagatgcgggtcacagagtaccttgtcgtgtacacgcccacccacgagggtggtctggaaatgcagttccgtgtgcctggggaccagacgtccaccatcatccaggagctggagcctggtgtggagtactttatccgtgtatttgccatcctggagaacaagaagagcattcctgtcagcgccagggtggccacgtacttacctgcacctgaaggcctgaaattcaagtccatcaaggagacatctgtggaagtggagtgggatcctctagacattgcttttgaaacctgggagatcatcttccggaatatgaataaagaagatgagggagagatcaccaaaagcctgaggaggccagagacctcttaccggcaaactggtctagctcctgggcaagagtatgagatatctctgcacatagtgaaaaacaatacccggggccctggcctgaagagggtgaccaccacacgcttggatgcccccagccagatcgaggtgaaagatgtcacagacaccactgccttgatcacctggttcaagcccctggctgagatcgatggcattgagctgacctacggcatcaaagacgtgccaggagaccgtaccaccatcgatctcacagaggacgagaaccagtactccatcgggaacctgaagcctgacactgagtacgaggtgtccctcatctcccgcagaggtgacatgtcaagcaacccagccaaagagaccttcacaacaggcctcgatgctcccaggaatcttcgacgtgtttcccagacagataacagcatcaccctggaatggaggaatggcaaggcagctattgacagttacagaattaagtatgcccccatctctggaggggaccacgctgaggttgatgttccaaagagccaacaagccacaaccaaaaccacactcacaggtctgaggccgggaactgaatatgggattggagtttctgctgtgaaggaagacaaggagagcaatccagcgaccatcaacgcagccacagagttggacacgcccaaggaccttcaggtttctgaaactgcagagaccagcctgaccctgctctggaagacaccgttggccaaatttgaccgctaccgcctcaattacagtctccccacaggccagtgggtgggagtgcagcttccaagaaacaccacttcctatgtcctgagaggcctggaaccaggacaggagtacaatgtcctcctgacagccgagaaaggcagacacaagagcaagcccgcacgtgtgaaggcatccactgaacaagcccctgagctggaaaacctcaccgtgactgaggttggctgggatggcctcagactcaactggaccgcagctgaccaggcctatgagcactttatcattcaggtgcaggaggccaacaaggtggaggcagctcggaacctcaccgtgcctggcagccttcgggctgtggacataccgggcctcaaggctgctacgccttatacagtctccatctatggggtgatccagggctatagaacaccagtgctctctgctgaggcctccacaggggaaactcccaatttgggagaggtcgtggtggccgaggtgggctgggatgccctcaaactcaactggactgctccagaaggggcctatgagtactttttcattcaggtgcaggaggctgacacagtagaggcagcccagaacctcaccgtcccaggaggactgaggtccacagacctgcctgggctcaaagcagccactcattataccatcaccatccgcggggtcactcaggacttcagcacaacccctctctctgttgaagtcttgacagaggaggttccagatatgggaaacctcacagtgaccgaggttagctgggatgctctcagactgaactggaccacgccagatggaacctatgaccagtttactattcaggtccaggaggctgaccaggtggaagaggctcacaatctcacggttcctggcagcctgcgttccatggaaatcccaggcctcagggctggcactccttacacagtcaccctgcacggcgaggtcaggggccacagcactcgaccccttgctgtagaggtcgtcacagaggatctcccacagctgggagatttagccgtgtctgaggttggctgggatggcctcagactcaactggaccgcagctgacaatgcctatgagcactttgtcattcaggtgcaggaggtcaacaaagtggaggcagcccagaacctcacgttgcctggcagcctcagggctgtggacatcccgggcctcgaggctgccacgccttatagagtctccatctatggggtgatccggggctatagaacaccagtactctctgctgaggcctccacagccaaagaacctgaaattggaaacttaaatgtttctgacataactcccgagagcttcaatctctcctggatggctaccgatgggatcttcgagacctttaccattgaaattattgattccaataggttgctggagactgtggaatataatatctctggtgctgaacgaactgcccatatctcagggctaccccctagtactgattttattgtctacctctctggacttgctcccagcatccggaccaaaaccatcagtgccacagccacgacagaggccctgccccttctggaaaacctaaccatttccgacattaatccctacgggttcacagtttcctggatggcatcggagaatgcctttgacagctttctagtaacggtggtggattctgggaagctgctggacccccaggaattcacactttcaggaacccagaggaagctggagcttagaggcctcataactggcattggctatgaggttatggtctctggcttcacccaagggcatcaaaccaagcccttgagggctgagattgttacagaagccgaaccggaagttgacaaccttctggtttcagatgccaccccagacggtttccgtctgtcctggacagctgatgaaggggtcttcgacaattttgttctcaaaatcagagataccaaaaagcagtctgagccactggaaataaccctacttgcccccgaacgtaccagggacttaacaggtctcagagaggctactgaatacgaaattgaactctatggaataagcaaaggaaggcgatcccagacagtcagtgctatagcaacaacagccatgggctccccaaaggaagtcattttctcagacatcactgaaaattcggctactgtcagctggagggcacccacggcccaagtggagagcttccggattacctatgtgcccattacaggaggtacaccctccatggtaactgtggacggaaccaagactcagaccaggctggtgaaactcatacctggcgtggagtaccttgtcagcatcatcgccatgaagggctttgaggaaagtgaacctgtctcagggtcattcaccacagctctggatggcccatctggcctggtgacagccaacatcactgactcagaagccttggccaggtggcagccagccattgccactgtggacagttatgtcatctcctacacaggcgagaaagtgccagaaattacacgcacggtgtccgggaacacagtggagtatgctctgaccgacctcgagcctgccacggaatacacactgagaatctttgcagagaaagggccccagaagagctcaaccatcactgccaagttcacaacagacctcgattctccaagagacttgactgctactgaggttcagtcggaaactgccctccttacctggcgacccccccgggcatcagtcaccggttacctgctggtctatgaatcagtggatggcacagtcaaggaagtcattgtgggtccagataccacctcctacagcctggcagacctgagcccatccacccactacacagccaagatccaggcactcaatgggcccctgaggagcaatatgatccagaccatcttcaccacaattggactcctgtaccccttccccaaggactgctcccaagcaatgctgaatggagacacgacctctggcctctacaccatttatctgaatggtgataaggctcaggcgctggaagtcttctgtgacatgacctctgatgggggtggatggattgtgttcctgagacgcaaaaacggacgcgagaacttctaccaaaactggaaggcatatgctgctggatttggggaccgcagagaagaattctggcttgggctggacaacctgaacaaaatcacagcccaggggcagtacgagctccgggtggacctgcgggaccatggggagacagcctttgctgtctatgacaagttcagcgtgggagatgccaagactcgctacaagctgaaggtggaggggtacagtgggacagcaggtgactccatggcctaccacaatggcagatccttctccacctttgacaaggacacagattcagccatcaccaactgtgctctgtcctacaaaggggctttctggtacaggaactgtcaccgtgtcaacctgatggggagatatggggacaataaccacagtcagggcgttaactggttccactggaagggccacgaacactcaatccagtttgctgagatgaagctgagaccaagcaacttcagaaatcttgaaggcaggcgcaaacgggcataaattccagggaccactgggtgagagaggaataaggcccagagcgaggaaaggattttaccaaagcatcaatacaaccagcccaaccatcggtccacacctgggcatttggtgagagtcaaagctgaccatggatccctggggccaacggcaacagcatgggcctcacctcctctgtgatttctttctttgcaccaaagacatcagtctccaacatgtttctgttttgttgtttgattcagcaaaaatctcccagtgacaacatcgcaatagttttttacttctcttaggtggctctgggaatgggagaggggtaggatgtacaggggtagtttgttttagaaccagccgtattttacatgaagctgtataattaattgtcattatttttgttagcaaagattaaatgtgtcattggccagcgggngtctccgccatttgtcgctgccact

SEQ ID NO: 311779 - DNA, 7484 bp, Homo sapiens
accggccacagcctgcctactgtcacccgcctctcccgcgcgcagatacacgcccccgcctccgtgggcacaaaggcagcgctgctggggaactcgggggaacgcgcacgtgggaaccgccgcagctccacactccaggtacttcttccaaggacctaggtctctcgcccatcggaaagaaaataattctttcaagaagatcagggacaactgatttgaagtctactctgtgcttctaaatccccaattctgctgaaagtgagataccctagagccctagagccccagcagcacccagccaaacccacctccaccatgggggccatgactcagctgttggcaggtgtctttcttgctttccttgccctcgctaccgaaggtggggtcctcaagaaagtcatccggcacaagcgacagagtggggtgaacgccaccctgccagaagagaaccagccagtggtgtttaaccacgtttacaacatcaagctgccagtgggatcccagtgttcggtggatctggagtcagccagtggggagaaagacctggcaccgccttcagagcccagcgaaagctttcaggagcacacagtagatggggaaaaccagattgtcttcacacatcgcatcaacatcccccgccgggcctgtggctgtgccgcagcccctgatgttaaggagctgctgagcagactggaggagctggagaacctggtgtcttccctgagggagcaatgtactgcaggagcaggctgctgtctccagcctgccacaggccgcttggacaccaggcccttctgtagcggtcggggcaacttcagcactgaaggatgtggctgtgtctgcgaacctggctggaaaggccccaactgctctgagcccgaatgtccaggcaactgtcaccttcgaggccggtgcattgatgggcagtgcatctgtgacgacggcttcacgggcgaggactgcagccagctggcttgccccagcgactgcaatgaccagggcaagtgcgtgaatggagtctgcatctgtttcgaaggctacgccggggctgactgcagccgtgaaatctgcccagtgccctgcagtgaggagcacggcacatgtgtagatggcttgtgtgtgtgccacgatggctttgcaggcgatgactgcaacaagcctctgtgtctcaacaattgctacaaccgtggacgatgcgtggagaatgagtgcgtgtgtgatgagggtttcacgggcgaagactgcagtgagctcatctgccccaatgactgcttcgaccggggccgctgcatcaatggcacctgctactgcgaagaaggcttcacaggtgaagactgcgggaaacccacctgcccacatgcctgccacacccagggccggtgtgaggaggggcagtgtgtatgtgatgagggctttgccggtgtggactgcagcgagaagaggtgtcctgctgactgtcacaatcgtggccgctgtgtagacgggcggtgtgagtgtgatgatggtttcactggagctgactgtggggagctcaagtgtcccaatggctgcagtggccatggccgctgtgtcaatgggcagtgtgtgtgtgatgagggctatactggggaggactgcagccagctacggtgccccaatgactgtcacagtcggggccgctgtgtcgagggcaaatgtgtatgtgagcaaggcttcaagggctatgactgcagtgacatgagctgccctaatgactgtcaccagcacggccgctgtgtgaatggcatgtgtgtttgtgatgacggctacacaggggaagactgccgggatcgccaatgccccagggactgcagcaacaggggcctctgtgtggacggacagtgcgtctgtgaggacggcttcaccggccctgactgtgcagaactctcctgtccaaatgactgccatggccagggtcgctgtgtgaatgggcagtgcgtgtgccatgaaggatttatgggcaaagactgcaaggagcaaagatgtcccagtgactgtcatggccagggccgctgcgtggacggccagtgcatctgccacgagggcttcacaggcctggactgtggccagcactcctgccccagtgactgcaacaacttaggacaatgcgtctcgggccgctgcatctgcaacgagggctacagcggagaagactgctcagaggtgtctcctcccaaagacctcgttgtgacagaagtgacggaagagacggtcaacctggcctgggacaatgagatgcgggtcacagagtaccttgtcgtgtacacgcccacccacgagggtggtctggaaatgcagttccgtgtgcctggggaccagacgtccaccatcatccaggagctggagcctggtgtggagtactttatccgtgtatttgccatcctggagaacaagaagagcattcctgtcagcgccagggtggccacgtacttacctgcacctgaaggcctgaaattcaagtccatcaaggagacatctgtggaagtggagtgggatcctctagacattgcttttgaaacctgggagatcatcttccggaatatgaataaagaagatgagggagagatcaccaaaagcctgaggaggccagagacctcttaccggcaaactggtctagctcctgggcaagagtatgagatatctctgcacatagtgaaaaacaatacccggggccctggcctgaagagggtgaccaccacacgcttggatgcccccagccagatcgaggtgaaagatgtcacagacaccactgccttgatcacctggttcaagcccctggctgagatcgatggcattgagctgacctacggcatcaaagacgtgccaggagaccgtaccaccatcgatctcacagaggacgagaaccagtactccatcgggaacctgaagcctgacactgagtacgaggtgtccctcatctcccgcagaggtgacatgtcaagcaacccagccaaagagaccttcacaacaggcctcgatgctcccaggaatcttcgacgtgtttcccagacagataacagcatcaccctggaatggaggaatggcaaggcagctattgacagttacagaattaagtatgcccccatctctggaggggaccacgctgaggttgatgttccaaagagccaacaagccacaaccaaaaccacactcacaggtctgaggccgggaactgaatatgggattggagtttctgctgtgaaggaagacaaggagagcaatccagcgaccatcaacgcagccacagagttggacacgcccaaggaccttcaggtttctgaaactgcagagaccagcctgaccctgctctggaagacaccgttggccaaatttgaccgctaccgcctcaattacagtctccccacaggccagtgggtgggagtgcagcttccaagaaacaccacttcctatgtcctgagaggcctggaaccaggacaggagtacaatgtcctcctgacagccgagaaaggcagacacaagagcaagcccgcacgtgtgaaggcatccactgaacaagcccctgagctggaaaacctcaccgtgactgaggttggctgggatggcctcagactcaactggaccgcagctgaccaggcctatgagcactttatcattcaggtgcaggaggccaacaaggtggaggcagctcggaacctcaccgtgcctggcagccttcgggctgtggacataccgggcctcaaggctgctacgccttatacagtctccatctatggggtgatccagggctatagaacaccagtgctctctgctgaggcctccacaggggaaactcccaatttgggagaggtcgtggtggccgaggtgggctgggatgccctcaaactcaactggactgctccagaaggggcctatgagtactttttcattcaggtgcaggaggctgacacagtagaggcagcccagaacctcaccgtcccaggaggactgaggtccacagacctgcctgggctcaaagcagccactcattataccatcaccatccgcggggtcactcaggacttcagcacaacccctctctctgttgaagtcttgacagaggaggttccagatatgggaaacctcacagtgaccgaggttagctgggatgctctcagactgaactggaccacgccagatggaacctatgaccagtttactattcaggtccaggaggctgaccaggtggaagaggctcacaatctcacggttcctggcagcctgcgttccatggaaatcccaggcctcagggctggcactccttacacagtcaccctgcacggcgaggtcaggggccacagcactcgaccccttgctgtagaggtcgtcacagaggatctcccacagctgggagatttagccgtgtctgaggttggctgggatggcctcagactcaactggaccgcagctgacaatgcctatgagcactttgtcattcaggtgcaggaggtcaacaaagtggaggcagcccagaacctcacgttgcctggcagcctcagggctgtggacatcccgggcctcgaggctgccacgccttatagagtctccatctatggggtgatccggggctatagaacaccagtactctctgctgaggcctccacagccaaagaacctgaaattggaaacttaaatgtttctgacataactcccgagagcttcaatctctcctggatggctaccgatgggatcttcgagacctttaccattgaaattattgattccaataggttgctggagactgtggaatataatatctctggtgctgaacgaactgcccatatctcagggctaccccctagtactgattttattgtctacctctctggacttgctcccagcatccggaccaaaaccatcagtgccacagccacgacagaggccctgccccttctggaaaacctaaccatttccgacattaatccctacgggttcacagtttcctggatggcatcggagaatgcctttgacagctttctagtaacggtggtggattctgggaagctgctggacccccaggaattcacactttcaggaacccagaggaagctggagcttagaggcctcataactggcattggctatgaggttatggtctctggcttcacccaagggcatcaaaccaagcccttgagggctgagattgttacagaagccgaaccggaagttgacaaccttctggtttcagatgccaccccagacggtttccgtctgtcctggacagctgatgaaggggtcttcgacaattttgttctcaaaatcagagataccaaaaagcagtctgagccactggaaataaccctacttgcccccgaacgtaccagggacttaacaggtctcagagaggctactgaatacgaaattgaactctatggaataagcaaaggaaggcgatcccagacagtcagtgctatagcaacaacagccatgggctccccaaaggaagtcattttctcagacatcactgaaaattcggctactgtcagctggagggcacccacggcccaagtggagagcttccggattacctatgtgcccattacaggaggtacaccctccatggtaactgtggacggaaccaagactcagaccaggctggtgaaactcatacctggcgtggagtaccttgtcagcatcatcgccatgaagggctttgaggaaagtgaacctgtctcagggtcattcaccacagctctggatggcccatctggcctggtgacagccaacatcactgactcagaagccttggccaggtggcagccagccattgccactgtggacagttatgtcatctcctacacaggcgagaaagtgccagaaattacacgcacggtgtccgggaacacagtggagtatgctctgaccgacctcgagcctgccacggaatacacactgagaatctttgcagagaaagggccccagaagagctcaaccatcactgccaagttcacaacagacctcgattctccaagagacttgactgctactgaggttcagtcggaaactgccctccttacctggcgacccccccgggcatcagtcaccggttacctgctggtctatgaatcagtggatggcacagtcaaggaagtcattgtgggtccagataccacctcctacagcctggcagacctgagcccatccacccactacacagccaagatccaggcactcaatgggcccctgaggagcaatatgatccagaccatcttcaccacaattggactcctgtaccccttccccaaggactgctcccaagcaatgctgaatggagacacgacctctggcctctacaccatttatctgaatggtgataaggctcaggcgctggaagtcttctgtgacatgacctctgatgggggtggatggattgtgttcctgagacgcaaaaacggacgcgagaacttctaccaaaactggaaggcatatgctgctggatttggggaccgcagagaagaattctggcttgggctggacaacctgaacaaaatcacagcccaggggcagtacgagctccgggtggacctgcgggaccatggggagacagcctttgctgtctatgacaagttcagcgtgggagatgccaagactcgctacaagctgaaggtggaggggtacagtgggacagcaggtgactccatggcctaccacaatggcagatccttctccacctttgacaaggacacagattcagccatcaccaactgtgctctgtcctacaaaggggctttctggtacaggaactgtcaccgtgtcaacctgatggggagatatggggacaataaccacagtcagggcgttaactggttccactggaagggccacgaacactcaatccagtttgctgagatgaagctgagaccaagcaacttcagaaatcttgaaggcaggcgcaaacgggcataaattccagggaccactgggtgagagaggaataaggcccagagcgaggaaaggattttaccaaagcatcaatacaaccagcccaaccatcggtccacacctgggcatttggtgagagtcaaagctgaccatggatccctggggccaacggcaacagcatgggcctcacctcctctgtgatttctttctttgcaccaaagacatcagtctccaacatgtttctgttttgttgtttgattcagcaaaaatctcccagtgacaacatcgcaatatttgttttagaaccagccgtattttacatgaagctgtataattaattgtcattatttttgttagcaaagattaaatgtgtcattggaagccatccctttttttacatttcatacaacagaaaccagaaaagcaatactgtttccattttaaggatatgattaatattattaatataataatgatgatgatgatgatgaaaactaaggatttttcaagagatctttctttccaaaacatttctggacagtacctgattgtattttttttttaaataaaagcacaagtacttttga

SEQ ID NO: 311780 - DNA, 7290 bp, Homo sapiens
accggccacagcctgcctactgtcacccgcctctcccgcgcgcagatacacgcccccgcctccgtgggcacaaaggcagcgctgctggggaactcgggggaacgcgcacgtgggaaccgccgcagctccacactccaggtacttcttccaaggacctaggtctctcgcccatcggaaagaaaataattctttcaagaagatcagggacaactgatttgaagtctactctgtgcttctaaatccccaattctgctgaaagtgagataccctagagccctagagccccagcagcacccagccaaacccacctccaccatgggggccatgactcagctgttggcaggtgtctttcttgctttccttgccctcgctaccgaaggtggggtcctcaagaaagtcatccggcacaagcgacagagtggggtgaacgccaccctgccagaagagaaccagccagtggtgtttaaccacgtttacaacatcaagctgccagtgggatcccagtgttcggtggatctggagtcagccagtggggagaaagacctggcaccgccttcagagcccagcgaaagctttcaggagcacacagtagatggggaaaaccagattgtcttcacacatcgcatcaacatcccccgccgggcctgtggctgtgccgcagcccctgatgttaaggagctgctgagcagactggaggagctggagaacctggtgtcttccctgagggagcaatgtactgcaggagcaggctgctgtctccagcctgccacaggccgcttggacaccaggcccttctgtagcggtcggggcaacttcagcactgaaggatgtggctgtgtctgcgaacctggctggaaaggccccaactgctctgagcccgaatgtccaggcaactgtcaccttcgaggccggtgcattgatgggcagtgcatctgtgacgacggcttcacgggcgaggactgcagccagctggcttgccccagcgactgcaatgaccagggcaagtgcgtgaatggagtctgcatctgtttcgaaggctacgccggggctgactgcagccgtgaaatctgcccagtgccctgcagtgaggagcacggcacatgtgtagatggcttgtgtgtgtgccacgatggctttgcaggcgatgactgcaacaagcctctgtgtctcaacaattgctacaaccgtggacgatgcgtggagaatgagtgcgtgtgtgatgagggtttcacgggcgaagactgcagtgagctcatctgccccaatgactgcttcgaccggggccgctgcatcaatggcacctgctactgcgaagaaggcttcacaggtgaagactgcgggaaacccacctgcccacatgcctgccacacccagggccggtgtgaggaggggcagtgtgtatgtgatgagggctttgccggtgtggactgcagcgagaagaggtgtcctgctgactgtcacaatcgtggccgctgtgtagacgggcggtgtgagtgtgatgatggtttcactggagctgactgtggggagctcaagtgtcccaatggctgcagtggccatggccgctgtgtcaatgggcagtgtgtgtgtgatgagggctatactggggaggactgcagccagctacggtgccccaatgactgtcacagtcggggccgctgtgtcgagggcaaatgtgtatgtgagcaaggcttcaagggctatgactgcagtgacatgagctgccctaatgactgtcaccagcacggccgctgtgtgaatggcatgtgtgtttgtgatgacggctacacaggggaagactgccgggatcgccaatgccccagggactgcagcaacaggggcctctgtgtggacggacagtgcgtctgtgaggacggcttcaccggccctgactgtgcagaactctcctgtccaaatgactgccatggccagggtcgctgtgtgaatgggcagtgcgtgtgccatgaaggatttatgggcaaagactgcaaggagcaaagatgtcccagtgactgtcatggccagggccgctgcgtggacggccagtgcatctgccacgagggcttcacaggcctggactgtggccagcactcctgccccagtgactgcaacaacttaggacaatgcgtctcgggccgctgcatctgcaacgagggctacagcggagaagactgctcagaggtgtctcctcccaaagacctcgttgtgacagaagtgacggaagagacggtcaacctggcctgggacaatgagatgcgggtcacagagtaccttgtcgtgtacacgcccacccacgagggtggtctggaaatgcagttccgtgtgcctggggaccagacgtccaccatcatccaggagctggagcctggtgtggagtactttatccgtgtatttgccatcctggagaacaagaagagcattcctgtcagcgccagggtggccacgtacttacctgcacctgaaggcctgaaattcaagtccatcaaggagacatctgtggaagtggagtgggatcctctagacattgcttttgaaacctgggagatcatcttccggaatatgaataaagaagatgagggagagatcaccaaaagcctgaggaggccagagacctcttaccggcaaactggtctagctcctgggcaagagtatgagatatctctgcacatagtgaaaaacaatacccggggccctggcctgaagagggtgaccaccacacgcttggatgcccccagccagatcgaggtgaaagatgtcacagacaccactgccttgatcacctggttcaagcccctggctgagatcgatggcattgagctgacctacggcatcaaagacgtgccaggagaccgtaccaccatcgatctcacagaggacgagaaccagtactccatcgggaacctgaagcctgacactgagtacgaggtgtccctcatctcccgcagaggtgacatgtcaagcaacccagccaaagagaccttcacaacaggcctcgatgctcccaggaatcttcgacgtgtttcccagacagataacagcatcaccctggaatggaggaatggcaaggcagctattgacagttacagaattaagtatgcccccatctctggaggggaccacgctgaggttgatgttccaaagagccaacaagccacaaccaaaaccacactcacaggtctgaggccgggaactgaatatgggattggagtttctgctgtgaaggaagacaaggagagcaatccagcgaccatcaacgcagccacagagttggacacgcccaaggaccttcaggtttctgaaactgcagagaccagcctgaccctgctctggaagacaccgttggccaaatttgaccgctaccgcctcaattacagtctccccacaggccagtgggtgggagtgcagcttccaagaaacaccacttcctatgtcctgagaggcctggaaccaggacaggagtacaatgtcctcctgacagccgagaaaggcagacacaagagcaagcccgcacgtgtgaaggcatccactgaacaagcccctgagctggaaaacctcaccgtgactgaggttggctgggatggcctcagactcaactggaccgcagctgaccaggcctatgagcactttatcattcaggtgcaggaggccaacaaggtggaggcagctcggaacctcaccgtgcctggcagccttcgggctgtggacataccgggcctcaaggctgctacgccttatacagtctccatctatggggtgatccagggctatagaacaccagtgctctctgctgaggcctccacaggggaaactcccaatttgggagaggtcgtggtggccgaggtgggctgggatgccctcaaactcaactggactgctccagaaggggcctatgagtactttttcattcaggtgcaggaggctgacacagtagaggcagcccagaacctcaccgtcccaggaggactgaggtccacagacctgcctgggctcaaagcagccactcattataccatcaccatccgcggggtcactcaggacttcagcacaacccctctctctgttgaagtcttgacagaggaggttccagatatgggaaacctcacagtgaccgaggttagctgggatgctctcagactgaactggaccacgccagatggaacctatgaccagtttactattcaggtccaggaggctgaccaggtggaagaggctcacaatctcacggttcctggcagcctgcgttccatggaaatcccaggcctcagggctggcactccttacacagtcaccctgcacggcgaggtcaggggccacagcactcgaccccttgctgtagaggtcgtcacagaggatctcccacagctgggagatttagccgtgtctgaggttggctgggatggcctcagactcaactggaccgcagctgacaatgcctatgagcactttgtcattcaggtgcaggaggtcaacaaagtggaggcagcccagaacctcacgttgcctggcagcctcagggctgtggacatcccgggcctcgaggctgccacgccttatagagtctccatctatggggtgatccggggctatagaacaccagtactctctgctgaggcctccacagccaaagaacctgaaattggaaacttaaatgtttctgacataactcccgagagcttcaatctctcctggatggctaccgatgggatcttcgagacctttaccattgaaattattgattccaataggttgctggagactgtggaatataatatctctggtgctgaacgaactgcccatatctcagggctaccccctagtactgattttattgtctacctctctggacttgctcccagcatccggaccaaaaccatcagtgccacagccacgacagaggccctgccccttctggaaaacctaaccatttccgacattaatccctacgggttcacagtttcctggatggcatcggagaatgcctttgacagctttctagtaacggtggtggattctgggaagctgctggacccccaggaattcacactttcaggaacccagaggaagctggagcttagaggcctcataactggcattggctatgaggttatggtctctggcttcacccaagggcatcaaaccaagcccttgagggctgagattgttacagaagccgaaccggaagttgacaaccttctggtttcagatgccaccccagacggtttccgtctgtcctggacagctgatgaaggggtcttcgacaattttgttctcaaaatcagagataccaaaaagcagtctgagccactggaaataaccctacttgcccccgaacgtaccagggacttaacaggtctcagagaggctactgaatacgaaattgaactctatggaataagcaaaggaaggcgatcccagacagtcagtgctatagcaacaacagccatgggctccccaaaggaagtcattttctcagacatcactgaaaattcggctactgtcagctggagggcacccacggcccaagtggagagcttccggattacctatgtgcccattacaggaggtacaccctccatggtaactgtggacggaaccaagactcagaccaggctggtgaaactcatacctggcgtggagtaccttgtcagcatcatcgccatgaagggctttgaggaaagtgaacctgtctcagggtcattcaccacagctctggatggcccatctggcctggtgacagccaacatcactgactcagaagccttggccaggtggcagccagccattgccactgtggacagttatgtcatctcctacacaggcgagaaagtgccagaaattacacgcacggtgtccgggaacacagtggagtatgctctgaccgacctcgagcctgccacggaatacacactgagaatctttgcagagaaagggccccagaagagctcaaccatcactgccaagttcacaacagacctcgattctccaagagacttgactgctactgaggttcagtcggaaactgccctccttacctggcgacccccccgggcatcagtcaccggttacctgctggtctatgaatcagtggatggcacagtcaaggaagtcattgtgggtccagataccacctcctacagcctggcagacctgagcccatccacccactacacagccaagatccaggcactcaatgggcccctgaggagcaatatgatccagaccatcttcaccacaattggactcctgtaccccttccccaaggactgctcccaagcaatgctgaatggagacacgacctctggcctctacaccatttatctgaatggtgataaggctcaggcgctggaagtcttctgtgacatgacctctgatgggggtggatggattgtgttcctgagacgcaaaaacggacgcgagaacttctaccaaaactggaaggcatatgctgctggatttggggaccgcagagaagaattctggcttgggctggacaacctgaacaaaatcacagcccaggggcagtacgagctccgggtggacctgcgggaccatggggagacagcctttgctgtctatgacaagttcagcgtgggagatgccaagactcgctacaagctgaaggtggaggggtacagtgggacagcaggtgactccatggcctaccacaatggcagatccttctccacctttgacaaggacacagattcagccatcaccaactgtgctctgtcctacaaaggggctttctggtacaggaactgtcaccgtgtcaacctgatggggagatatggggacaataaccacagtcagggcgttaactggttccactggaagggccacgaacactcaatccagtttgctgagatgaagctgagaccaagcaacttcagaaatcttgaaggcaggcgcaaacgggcataaattccagggaccactgggtgagatgagcggatcagagtaaacaaaaggaatctcaaaggaaatttgaagaagaaactgtaaaatccaaagtgactgttgatactggagtaattcctgcctctgaagagaaagcagagactcccacagctgcagaagatgacaatgaaggagacaaaaagaagaaagataagaagaacaagaaaggagaaaaaggaagaaaaggagaaagagcagaaaaaaggacctagcaaagccactgttaaagctatgcaagaagctctggctaagcttaaagaggaagaagaacgaccgacgagagaagaggaagaacgtataaaacggcttgacgaattagaagccaagcgttaa

SEQ ID NO: 311781 - DNA, 965 bp, Homo sapiens
acgattaacccaagtctatagaagccggcgtaaagagtgttttagatcaccccctcccccataaagctaaaactcacctgagttgtaaaaaactccagttgacaccaaatagactacgaaagtggctttaacatatctgaacacacaatagtttatgctgtcagcataaactataagatccaggcactcaatgggcccctgaggagcaatatgatccagaccatcttcaccacaattggactcctgtaccccttccccaaggactgctcccaagcaatgctgaatggagacacgacctctggcctctacaccatttatctgaatggtgataaggctcaggcgctggaagtcttctgtgacatgacgaggaataaggcccagagcgaggaaaggattttaccaaagcatcaatacaaccagcccaaccatcggtccacacctgggcatttggtgagagtcaaagctgaccatggatccctggggccaacggcaacagcatgggcctcacctcctctgtgatttctttctttgcaccaaagacatcagtctccaacatgtttctgttttgttgtttgattcagcaaaaatctcccagtgacaacatcgcaatagttttttacttctcttaggtggctctgggaatgggagaggggtaggatgtacaggggtagtttgttttagaaccagccgtattttacatgaagctgtataattaattgtcattatttttgttagcaaagattaaatgtgtcattggaagccatccctttttttacatttcatacaacagaaaccagaaaagcaatactgtttccattttaaggatatgattaatattattaatataataatgatgatgatgatgatgaaaactaaggatttttcaagagatctttctttccaaaacatttctggacagtacctgattgtattttttttttaaataaaagcacaagtacttttga

SEQ ID NO: 311782 - DNA, 6250 bp, Homo sapiens
  misc_feature (6140)..(6140): n is a, c, g, or t
  misc_feature (6159)..(6159): n is a, c, g, or t
  misc_feature (6212)..(6212): n is a, c, g, or t
  misc_feature (6229)..(6230): n is a, c, g, or t
  misc_feature (6235)..(6235): n is a, c, g, or t
  misc_feature (6246)..(6247): n is a, c, g, or t
accggccacagcctgcctactgtcacccgcctctcccgcgcgcagatacacgcccccgcctccgtgggcacaaaggcagcgctgctggggaactcgggggaacgcgcacgtgggaaccgccgcagctccacactccaggtacttcttccaaggacctaggtctctcgcccatcggaaagaaaataattctttcaagaagatcagggacaactgatttgaagtctactctgtgcttctaaatccccaattctgctgaaagtgagataccctagagccctagagccccagcagcacccagccaaacccacctccaccatgggggccatgactcagctgttggcaggtgtctttcttgctttccttgccctcgctaccgaaggtggggtcctcaagaaagtcatccggcacaagcgacagagtggggtgaacgccaccctgccagaagagaaccagccagtggtgtttaaccacgtttacaacatcaagctgccagtgggatcccagtgttcggtggatctggagtcagccagtggggagaaagacctggcaccgccttcagagcccagcgaaagctttcaggagcacacagtagatggggaaaaccagattgtcttcacacatcgcatcaacatcccccgccgggcctgtggctgtgccgcagcccctgatgttaaggagctgctgagcagactggaggagctggagaacctggtgtcttccctgagggagcaatgtactgcaggagcaggctgctgtctccagcctgccacaggccgcttggacaccaggcccttctgtagcggtcggggcaacttcagcactgaaggatgtggctgtgtctgcgaacctggctggaaaggccccaactgctctgagcccgaatgtccaggcaactgtcaccttcgaggccggtgcattgatgggcagtgcatctgtgacgacggcttcacgggcgaggactgcagccagctggcttgccccagcgactgcaatgaccagggcaagtgcgtgaatggagtctgcatctgtttcgaaggctacgccggggctgactgcagccgtgaaatctgcccagtgccctgcagtgaggagcacggcacatgtgtagatggcttgtgtgtgtgccacgatggctttgcaggcgatgactgcaacaagcctctgtgtctcaacaattgctacaaccgtggacgatgcgtggagaatgagtgcgtgtgtgatgagggtttcacgggcgaagactgcagtgagctcatctgccccaatgactgcttcgaccggggccgctgcatcaatggcacctgctactgcgaagaaggcttcacaggtgaagactgcgggaaacccacctgcccacatgcctgccacacccagggccggtgtgaggaggggcagtgtgtatgtgatgagggctttgccggtgtggactgcagcgagaagaggtgtcctgctgactgtcacaatcgtggccgctgtgtagacgggcggtgtgagtgtgatgatggtttcactggagctgactgtggggagctcaagtgtcccaatggctgcagtggccatggccgctgtgtcaatgggcagtgtgtgtgtgatgagggctatactggggaggactgcagccagctacggtgccccaatgactgtcacagtcggggccgctgtgtcgagggcaaatgtgtatgtgagcaaggcttcaagggctatgactgcagtgacatgagctgccctaatgactgtcaccagcacggccgctgtgtgaatggcatgtgtgtttgtgatgacggctacacaggggaagactgccgggatcgccaatgccccagggactgcagcaacaggggcctctgtgtggacggacagtgcgtctgtgaggacggcttcaccggccctgactgtgcagaactctcctgtccaaatgactgccatggccagggtcgctgtgtgaatgggcagtgcgtgtgccatgaaggatttatgggcaaagactgcaaggagcaaagatgtcccagtgactgtcatggccagggccgctgcgtggacggccagtgcatctgccacgagggcttcacaggcctggactgtggccagcactcctgccccagtgactgcaacaacttaggacaatgcgtctcgggccgctgcatctgcaacgagggctacagcggagaagactgctcagaggtgtctcctcccaaagacctcgttgtgacagaagtgacggaagagacggtcaacctggcctgggacaatgagatgcgggtcacagagtaccttgtcgtgtacacgcccacccacgagggtggtctggaaatgcagttccgtgtgcctggggaccagacgtccaccatcatccaggagctggagcctggtgtggagtactttatccgtgtatttgccatcctggagaacaagaagagcattcctgtcagcgccagggtggccacgtacttacctgcacctgaaggcctgaaattcaagtccatcaaggagacatctgtggaagtggagtgggatcctctagacattgcttttgaaacctgggagatcatcttccggaatatgaataaagaagatgagggagagatcaccaaaagcctgaggaggccagagacctcttaccggcaaactggtctagctcctgggcaagagtatgagatatctctgcacatagtgaaaaacaatacccggggccctggcctgaagagggtgaccaccacacgcttggatgcccccagccagatcgaggtgaaagatgtcacagacaccactgccttgatcacctggttcaagcccctggctgagatcgatggcattgagctgacctacggcatcaaagacgtgccaggagaccgtaccaccatcgatctcacagaggacgagaaccagtactccatcgggaacctgaagcctgacactgagtacgaggtgtccctcatctcccgcagaggtgacatgtcaagcaacccagccaaagagaccttcacaacaggcctcgatgctcccaggaatcttcgacgtgtttcccagacagataacagcatcaccctggaatggaggaatggcaaggcagctattgacagttacagaattaagtatgcccccatctctggaggggaccacgctgaggttgatgttccaaagagccaacaagccacaaccaaaaccacactcacaggtctgaggccgggaactgaatatgggattggagtttctgctgtgaaggaagacaaggagagcaatccagcgaccatcaacgcagccacagagttggacacgcccaaggaccttcaggtttctgaaactgcagagaccagcctgaccctgctctggaagacaccgttggccaaatttgaccgctaccgcctcaattacagtctccccacaggccagtgggtgggagtgcagcttccaagaaacaccacttcctatgtcctgagaggcctggaaccaggacaggagtacaatgtcctcctgacagccgagaaaggcagacacaagagcaagcccgcacgtgtgaaggcatccactgaacaagcccctgagctggaaaacctcaccgtgactgaggttggctgggatggcctcagactcaactggaccgcagctgaccaggcctatgagcactttatcattcaggtgcaggaggccaacaaggtggaggcagctcggaacctcaccgtgcctggcagccttcgggctgtggacataccgggcctcaaggctgctacgccttatacagtctccatctatggggtgatccagggctatagaacaccagtgctctctgctgaggcctccacaggggaaactcccaatttgggagaggtcgtggtggccgaggtgggctgggatgccctcaaactcaactggactgctccagaaggggcctatgagtactttttcattcaggtgcaggaggctgacacagtagaggcagcccagaacctcaccgtcccaggaggactgaggtccacagacctgcctgggctcaaagcagccactcattataccatcaccatccgcggggtcactcaggacttcagcacaacccctctctctgttgaagtcttgacagaggaggttccagatatgggaaacctcacagtgaccgaggttagctgggatgctctcagactgaactggaccacgccagatggaacctatgaccagtttactattcaggtccaggaggctgaccaggtggaagaggctcacaatctcacggttcctggcagcctgcgttccatggaaatcccaggcctcagggctggcactccttacacagtcaccctgcacggcgaggtcaggggccacagcactcgaccccttgctgtagaggtcgtcacagaggatctcccacagctgggagatttagccgtgtctgaggttggctgggatggcctcagactcaactggaccgcagctgacaatgcctatgagcactttgtcattcaggtgcaggaggtcaacaaagtggaggcagcccagaacctcacgttgcctggcagcctcagggctgtggacatcccgggcctcgaggctgccacgccttatagagtctccatctatggggtgatccggggctatagaacaccagtactctctgctgaggcctccacagccaaagaacctgaaattggaaacttaaatgtttctgacataactcccgagagcttcaatctctcctggatggctaccgatgggatcttcgagacctttaccattgaaattattgattccaataggttgctggagactgtggaatataatatctctggtgctgaacgaactgcccatatctcagggctaccccctagtactgattttattgtctacctctctggacttgctcccagcatccggaccaaaaccatcagtgccacagccacgacagaagccgaaccggaagttgacaaccttctggtttcagatgccaccccagacggtttccgtctgtcctggacagctgatgaaggggtcttcgacaattttgttctcaaaatcagagataccaaaaagcagtctgagccactggaaataaccctacttgcccccgaacgtaccagggacttaacaggtctcagagaggctactgaatacgaaattgaactctatggaataagcaaaggaaggcgatcccagacagtcagtgctatagcaacaacagccatgggctccccaaaggaagtcattttctcagacatcactgaaaattcggctactgtcagctggagggcacccacggcccaagtggagagcttccggattacctatgtgcccattacaggaggtacaccctccatggtaactgtggacggaaccaagactcagaccaggctggtgaaactcatacctggcgtggagtaccttgtcagcatcatcgccatgaagggctttgaggaaagtgaacctgtctcagggtcattcaccacagctctggatggcccatctggcctggtgacagccaacatcactgactcagaagccttggccaggtggcagccagccattgccactgtggacagttatgtcatctcctacacaggcgagaaagtgccagaaattacacgcacggtgtccgggaacacagtggagtatgctctgaccgacctcgagcctgccacggaatacacactgagaatctttgcagagaaagggccccagaagagctcaaccatcactgccaagttcacaacagacctcgattctccaagagacttgactgctactgaggttcagtcggaaactgccctccttacctggcgacccccccgggcatcagtcaccggttacctgctggtctatgaatcagtggatggcacagtcaaggaagtcattgtgggtccagataccacctcctacagcctggcagacctgagcccatccacccactacacagccaagatccaggcactcaatgggcccctgaggagcaatatgatccagaccatcttcaccacaattggactcctgtaccccttccccaaggactgctcccaagcaatgctgaatggagacacgacctctggcctctacaccatttatctgaatggtgataaggctcaggcgctggaagtcttctgtgacatgacctctgatgggggtggatggattgtgttcctgagacgcaaaaacggacncgagaacttcaatcagggnaagatcttcaagtgaacatctcttgccatcacctagctgcctgcacctgcccntcagggagatgggggtnnttaanggaaactgaannttg

SEQ ID NO: 311783 - DNA, 5470 bp, Homo sapiens
accggccacagcctgcctactgtcacccgcctctcccgcgcgcagatacacgcccccgcctccgtgggcacaaaggcagcgctgctggggaactcgggggaacgcgcacgtgggaaccgccgcagctccacactccaggtacttcttccaaggacctaggtctctcgcccatcggaaagaaaataattctttcaagaagatcagggacaactgatttgaagtctactctgtgcttctaaatccccaattctgctgaaagtgagataccctagagccctagagccccagcagcacccagccaaacccacctccaccatgggggccatgactcagctgttggcaggtgtctttcttgctttccttgccctcgctaccgaaggtggggtcctcaagaaagtcatccggcacaagcgacagagtggggtgaacgccaccctgccagaagagaaccagccagtggtgtttaaccacgtttacaacatcaagctgccagtgggatcccagtgttcggtggatctggagtcagccagtggggagaaagacctggcaccgccttcagagcccagcgaaagctttcaggagcacacagtagatggggaaaaccagattgtcttcacacatcgcatcaacatcccccgccgggcctgtggctgtgccgcagcccctgatgttaaggagctgctgagcagactggaggagctggagaacctggtgtcttccctgagggagcaatgtactgcaggagcaggctgctgtctccagcctgccacaggccgcttggacaccaggcccttctgtagcggtcggggcaacttcagcactgaaggatgtggctgtgtctgcgaacctggctggaaaggccccaactgctctgagcccgaatgtccaggcaactgtcaccttcgaggccggtgcattgatgggcagtgcatctgtgacgacggcttcacgggcgaggactgcagccagctggcttgccccagcgactgcaatgaccagggcaagtgcgtgaatggagtctgcatctgtttcgaaggctacgccggggctgactgcagccgtgaaatctgcccagtgccctgcagtgaggagcacggcacatgtgtagatggcttgtgtgtgtgccacgatggctttgcaggcgatgactgcaacaagcctctgtgtctcaacaattgctacaaccgtggacgatgcgtggagaatgagtgcgtgtgtgatgagggtttcacgggcgaagactgcagtgagctcatctgccccaatgactgcttcgaccggggccgctgcatcaatggcacctgctactgcgaagaaggcttcacaggtgaagactgcgggaaacccacctgcccacatgcctgccacacccagggccggtgtgaggaggggcagtgtgtatgtgatgagggctttgccggtgtggactgcagcgagaagaggtgtcctgctgactgtcacaatcgtggccgctgtgtagacgggcggtgtgagtgtgatgatggtttcactggagctgactgtggggagctcaagtgtcccaatggctgcagtggccatggccgctgtgtcaatgggcagtgtgtgtgtgatgagggctatactggggaggactgcagccagctacggtgccccaatgactgtcacagtcggggccgctgtgtcgagggcaaatgtgtatgtgagcaaggcttcaagggctatgactgcagtgacatgagctgccctaatgactgtcaccagcacggccgctgtgtgaatggcatgtgtgtttgtgatgacggctacacaggggaagactgccgggatcgccaatgccccagggactgcagcaacaggggcctctgtgtggacggacagtgcgtctgtgaggacggcttcaccggccctgactgtgcagaactctcctgtccaaatgactgccatggccagggtcgctgtgtgaatgggcagtgcgtgtgccatgaaggatttatgggcaaagactgcaaggagcaaagatgtcccagtgactgtcatggccagggccgctgcgtggacggccagtgcatctgccacgagggcttcacaggcctggactgtggccagcactcctgccccagtgactgcaacaacttaggacaatgcgtctcgggccgctgcatctgcaacgagggctacagcggagaagactgctcagaggtgtctcctcccaaagacctcgttgtgacagaagtgacggaagagacggtcaacctggcctgggacaatgagatgcgggtcacagagtaccttgtcgtgtacacgcccacccacgagggtggtctggaaatgcagttccgtgtgcctggggaccagacgtccaccatcatccaggagctggagcctggtgtggagtactttatccgtgtatttgccatcctggagaacaagaagagcattcctgtcagcgccagggtggccacgtacttacctgcacctgaaggcctgaaattcaagtccatcaaggagacatctgtggaagtggagtgggatcctctagacattgcttttgaaacctgggagatcatcttccggaatatgaataaagaagatgagggagagatcaccaaaagcctgaggaggccagagacctcttaccggcaaactggtctagctcctgggcaagagtatgagatatctctgcacatagtgaaaaacaatacccggggccctggcctgaagagggtgaccaccacacgcttggatgcccccagccagatcgaggtgaaagatgtcacagacaccactgccttgatcacctggttcaagcccctggctgagatcgatggcattgagctgacctacggcatcaaagacgtgccaggagaccgtaccaccatcgatctcacagaggacgagaaccagtactccatcgggaacctgaagcctgacactgagtacgaggtgtccctcatctcccgcagaggtgacatgtcaagcaacccagccaaagagaccttcacaacaggcctcgatgctcccaggaatcttcgacgtgtttcccagacagataacagcatcaccctggaatggaggaatggcaaggcagctattgacagttacagaattaagtatgcccccatctctggaggggaccacgctgaggttgatgttccaaagagccaacaagccacaaccaaaaccacactcacaggtctgaggccgggaactgaatatgggattggagtttctgctgtgaaggaagacaaggagagcaatccagcgaccatcaacgcagccacagagttggacacgcccaaggaccttcaggtttctgaaactgcagagaccagcctgaccctgctctggaagacaccgttggccaaatttgaccgctaccgcctcaattacagtctccccacaggccagtgggtgggagtgcagcttccaagaaacaccacttcctatgtcctgagaggcctggaaccaggacaggagtacaatgtcctcctgacagccgagaaaggcagacacaagagcaagcccgcacgtgtgaaggcatccactgaacaagcccctgagctggaaaacctcaccgtgactgaggttggctgggatggcctcagactcaactggaccgcagctgaccaggcctatgagcactttatcattcaggtgcaggaggccaacaaggtggaggcagctcggaacctcaccgtgcctggcagccttcgggctgtggacataccgggcctcaaggctgctacgccttatacagtctccatctatggggtgatccagggctatagaacaccagtgctctctgctgaggcctccacaggggaaactcccaatttgggagaggtcgtggtggccgaggtgggctgggatgccctcaaactcaactggactgctccagaaggggcctatgagtactttttcattcaggtgcaggaggctgacacagtagaggcagcccagaacctcaccgtcccaggaggactgaggtccacagacctgcctgggctcaaagcagccactcattataccatcaccatccgcggggtcactcaggacttcagcacaacccctctctctgttgaagtcttgacagaggaggttccagatatgggaaacctcacagtgaccgaggttagctgggatgctctcagactgaactggaccacgccagatggaacctatgaccagtttactattcaggtccaggaggctgaccaggtggaagaggctcacaatctcacggttcctggcagcctgcgttccatggaaatcccaggcctcagggctggcactccttacacagtcaccctgcacggcgaggtcaggggccacagcactcgaccccttgctgtagaggtcgtcacagaggatctcccacagctgggagatttagccgtgtctgaggttggctgggatggcctcagactcaactggaccgcagctgacaatgcctatgagcactttgtcattcaggtgcaggaggtcaacaaagtggaggcagcccagaacctcacgttgcctggcagcctcagggctgtggacatcccgggcctcgaggctgccacgccttatagagtctccatctatggggtgatccggggctatagaacaccagtactctctgctgaggcctccacagccaaagaacctgaaattggaaacttaaatgtttctgacataactcccgagagcttcaatctctcctggatggctaccgatgggatcttcgagacctttaccattgaaattattgattccaataggttgctggagactgtggaatataatatctctggtgctgaacgaactgcccatatctcagggctaccccctagtactgattttattgtctacctctctggacttgctcccagcatccggaccaaaaccatcagtgccacagccacgacagaggccctgccccttctggaaaacctaaccatttccgacattaatccctacgggttcacagtttcctggatggcatcggagaatgcctttgacagctttctagtaacggtggtggattctgggaagctgctggacccccaggaattcacactttcaggaacccagaggaagctggagcttagaggcctcataactggcattggctatgaggttatggtctctggcttcacccaagggcatcaaaccaagcccttgagggctgagattgttacaggtatttcaaatcaagtgagccatttgttcctcttcctggtccccttctgtgtaatctgtctaccggatcgccatgactttaacatctttgttcacattccctacttaatccataaatgtagtctactgtttcaccttctccccacactccctcttgtcatatgtacttaatgaacactccccactcccaccccagaaatgagaaggtcgaaatatttctgctttgtattcaaaatcctttagaccttgtcttgtccatagctcttgtgtgcttacctcatatcatcgtcccttgtgatcaacc

SEQ ID NO: 311784 - DNA, 4075 bp, Homo sapiens
accggccacagcctgcctactgtcacccgcctctcccgcgcgcagatacacgcccccgcctccgtgggcacaaaggcagcgctgctggggaactcgggggaacgcgcacgtgggaaccgccgcagctccacactccaggtacttcttccaaggacctaggtctctcgcccatcggaaagaaaataattctttcaagaagatcagggacaactgatttgaagtctactctgtgcttctaaatccccaattctgctgaaagtgagataccctagagccctagagccccagcagcacccagccaaacccacctccaccatgggggccatgactcagctgttggcaggtgtctttcttgctttccttgccctcgctaccgaaggtggggtcctcaagaaagtcatccggcacaagcgacagagtggggtgaacgccaccctgccagaagagaaccagccagtggtgtttaaccacgtttacaacatcaagctgccagtgggatcccagtgttcggtggatctggagtcagccagtggggagaaagacctggcaccgccttcagagcccagcgaaagctttcaggagcacacagtagatggggaaaaccagattgtcttcacacatcgcatcaacatcccccgccgggcctgtggctgtgccgcagcccctgatgttaaggagctgctgagcagactggaggagctggagaacctggtgtcttccctgagggagcaatgtactgcaggagcaggctgctgtctccagcctgccacaggccgcttggacaccaggcccttctgtagcggtcggggcaacttcagcactgaaggatgtggctgtgtctgcgaacctggctggaaaggccccaactgctctgagcccgaatgtccaggcaactgtcaccttcgaggccggtgcattgatgggcagtgcatctgtgacgacggcttcacgggcgaggactgcagccagctggcttgccccagcgactgcaatgaccagggcaagtgcgtgaatggagtctgcatctgtttcgaaggctacgccggggctgactgcagccgtgaaatctgcccagtgccctgcagtgaggagcacggcacatgtgtagatggcttgtgtgtgtgccacgatggctttgcaggcgatgactgcaacaagcctctgtgtctcaacaattgctacaaccgtggacgatgcgtggagaatgagtgcgtgtgtgatgagggtttcacgggcgaagactgcagtgagctcatctgccccaatgactgcttcgaccggggccgctgcatcaatggcacctgctactgcgaagaaggcttcacaggtgaagactgcgggaaacccacctgcccacatgcctgccacacccagggccggtgtgaggaggggcagtgtgtatgtgatgagggctttgccggtgtggactgcagcgagaagaggtgtcctgctgactgtcacaatcgtggccgctgtgtagacgggcggtgtgagtgtgatgatggtttcactggagctgactgtggggagctcaagtgtcccaatggctgcagtggccatggccgctgtgtcaatgggcagtgtgtgtgtgatgagggctatactggggaggactgcagccagctacggtgccccaatgactgtcacagtcggggccgctgtgtcgagggcaaatgtgtatgtgagcaaggcttcaagggctatgactgcagtgacatgagctgccctaatgactgtcaccagcacggccgctgtgtgaatggcatgtgtgtttgtgatgacggctacacaggggaagactgccgggatcgccaatgccccagggactgcagcaacaggggcctctgtgtggacggacagtgcgtctgtgaggacggcttcaccggccctgactgtgcagaactctcctgtccaaatgactgccatggccagggtcgctgtgtgaatgggcagtgcgtgtgccatgaaggatttatgggcaaagactgcaaggagcaaagatgtcccagtgactgtcatggccagggccgctgcgtggacggccagtgcatctgccacgagggcttcacaggcctggactgtggccagcactcctgccccagtgactgcaacaacttaggacaatgcgtctcgggccgctgcatctgcaacgagggctacagcggagaagactgctcagaggtgtctcctcccaaagacctcgttgtgacagaagtgacggaagagacggtcaacctggcctgggacaatgagatgcgggtcacagagtaccttgtcgtgtacacgcccacccacgagggtggtctggaaatgcagttccgtgtgcctggggaccagacgtccaccatcatccaggagctggagcctggtgtggagtactttatccgtgtatttgccatcctggagaacaagaagagcattcctgtcagcgccagggtggccacgtacttacctgcacctgaaggcctgaaattcaagtccatcaaggagacatctgtggaagtggagtgggatcctctagacattgcttttgaaacctgggagatcatcttccggaatatgaataaagaagatgagggagagatcaccaaaagcctgaggaggccagagacctcttaccggcaaactggtctagctcctgggcaagagtatgagatatctctgcacatagtgaaaaacaatacccggggccctggcctgaagagggtgaccaccacacgcttggatgcccccagccagatcgaggtgaaagatgtcacagacaccactgccttgatcacctggttcaagcccctggctgagatcgatggcattgagctgacctacggcatcaaagacgtgccaggagaccgtaccaccatcgatctcacagaggacgagaaccagtactccatcgggaacctgaagcctgacactgagtacgaggtgtccctcatctcccgcagaggtgacatgtcaagcaacccagccaaagagaccttcacaacaggcctcgatgctcccaggaatcttcgacgtgtttcccagacagataacagcatcaccctggaatggaggaatggcaaggcagctattgacagttacagaattaagtatgcccccatctctggaggggaccacgctgaggttgatgttccaaagagccaacaagccacaaccaaaaccacactcacaggtctgaggccgggaactgaatatgggattggagtttctgctgtgaaggaagacaaggagagcaatccagcgaccatcaacgcagccacagagttggacacgcccaaggaccttcaggtttctgaaactgcagagaccagcctgaccctgctctggaagacaccgttggccaaatttgaccgctaccgcctcaattacagtctccccacaggccagtgggtgggagtgcagcttccaagaaacaccacttcctatgtcctgagaggcctggaaccaggacaggagtacaatgtcctcctgacagccgagaaaggcagacacaagagcaagcccgcacgtgtgaaggcatccactgaacaagcccctgagctggaaaacctcaccgtgactgaggttggctgggatggcctcagactcaactggaccgcagctgaccaggcctatgagcactttatcattcaggtgcaggaggccaacaaggtggaggcagctcggaacctcaccgtgcctggcagccttcgggctgtggacataccgggcctcaaggctgctacgccttatacagtctccatctatggggtgatccagggctatagaacaccagtgctctctgctgaggcctccacaggggaaactcccaatttgggagaggtcgtggtggccgaggtgggctgggatgccctcaaactcaactggactgctccagaaggggcctatgagtactttttcattcaggtgcaggaggctgacacagtagaggcagcccagaacctcaccgtcccaggaggactgaggtccacagacctgccaagcactagtgtcctgccaagcactagtgtcctgccaagcactagtgtcctgccaagcactagtgtcctgccaagcactagtgtcctgccaa

SEQ ID NO: 311785 - DNA, 3452 bp, Homo sapiens
accggccacagcctgcctactgtcacccgcctctcccgcgcgcagatacacgcccccgcctccgtgggcacaaaggcagcgctgctggggaactcgggggaacgcgcacgtgggaaccgccgcagctccacactccaggtacttcttccaaggacctaggtctctcgcccatcggaaagaaaataattctttcaagaagatcagggacaactgatttgaagtctactctgtgcttctaaatccccaattctgctgaaagtgagataccctagagccctagagccccagcagcacccagccaaacccacctccaccatgggggccatgactcagctgttggcaggtgtctttcttgctttccttgccctcgctaccgaaggtggggtcctcaagaaagtcatccggcacaagcgacagagtggggtgaacgccaccctgccagaagagaaccagccagtggtgtttaaccacgtttacaacatcaagctgccagtgggatcccagtgttcggtggatctggagtcagccagtggggagaaagacctggcaccgccttcagagcccagcgaaagctttcaggagcacacagtagatggggaaaaccagattgtcttcacacatcgcatcaacatcccccgccgggcctgtggctgtgccgcagcccctgatgttaaggagctgctgagcagactggaggagctggagaacctggtgtcttccctgagggagcaatgtactgcaggagcaggctgctgtctccagcctgccacaggccgcttggacaccaggcccttctgtagcggtcggggcaacttcagcactgaaggatgtggctgtgtctgcgaacctggctggaaaggccccaactgctctgagcccgaatgtccaggcaactgtcaccttcgaggccggtgcattgatgggcagtgcatctgtgacgacggcttcacgggcgaggactgcagccagctggcttgccccagcgactgcaatgaccagggcaagtgcgtgaatggagtctgcatctgtttcgaaggctacgccggggctgactgcagccgtgaaatctgcccagtgccctgcagtgaggagcacggcacatgtgtagatggcttgtgtgtgtgccacgatggctttgcaggcgatgactgcaacaagcctctgtgtctcaacaattgctacaaccgtggacgatgcgtggagaatgagtgcgtgtgtgatgagggtttcacgggcgaagactgcagtgagctcatctgccccaatgactgcttcgaccggggccgctgcatcaatggcacctgctactgcgaagaaggcttcacaggtgaagactgcgggaaacccacctgcccacatgcctgccacacccagggccggtgtgaggaggggcagtgtgtatgtgatgagggctttgccggtgtggactgcagcgagaagaggtgtcctgctgactgtcacaatcgtggccgctgtgtagacgggcggtgtgagtgtgatgatggtttcactggagctgactgtggggagctcaagtgtcccaatggctgcagtggccatggccgctgtgtcaatgggcagtgtgtgtgtgatgagggctatactggggaggactgcagccagctacggtgccccaatgactgtcacagtcggggccgctgtgtcgagggcaaatgtgtatgtgagcaaggcttcaagggctatgactgcagtgacatgagctgccctaatgactgtcaccagcacggccgctgtgtgaatggcatgtgtgtttgtgatgacggctacacaggggaagactgccgggatcgccaatgccccagggactgcagcaacaggggcctctgtgtggacggacagtgcgtctgtgaggacggcttcaccggccctgactgtgcagaactctcctgtccaaatgactgccatggccagggtcgctgtgtgaatgggcagtgcgtgtgccatgaaggatttatgggcaaagactgcaaggagcaaagatgtcccagtgactgtcatggccagggccgctgcgtggacggccagtgcatctgccacgagggcttcacaggcctggactgtggccagcactcctgccccagtgactgcaacaacttaggacaatgcgtctcgggccgctgcatctgcaacgagggctacagcggagaagactgctcagaggtgtctcctcccaaagacctcgttgtgacagaagtgacggaagagacggtcaacctggcctgggacaatgagatgcgggtcacagagtaccttgtcgtgtacacgcccacccacgagggtggtctggaaatgcagttccgtgtgcctggggaccagacgtccaccatcatccaggagctggagcctggtgtggagtactttatccgtgtatttgccatcctggagaacaagaagagcattcctgtcagcgccagggtggccacgtacttacctgcacctgaaggcctgaaattcaagtccatcaaggagacatctgtggaagtggagtgggatcctctagacattgcttttgaaacctgggagatcatcttccggaatatgaataaagaagatgagggagagatcaccaaaagcctgaggaggccagagacctcttaccggcaaactggtctagctcctgggcaagagtatgagatatctctgcacatagtgaaaaacaatacccggggccctggcctgaagagggtgaccaccacacgcttggatgcccccagccagatcgaggtgaaagatgtcacagacaccactgccttgatcacctggttcaagcccctggctgagatcgatggcattgagctgacctacggcatcaaagacgtgccaggagaccgtaccaccatcgatctcacagaggacgagaaccagtactccatcgggaacctgaagcctgacactgagtacgaggtgtccctcatctcccgcagaggtgacatgtcaagcaacccagccaaagagaccttcacaacaggcctcgatgctcccaggaatcttcgacgtgtttcccagacagataacagcatcaccctggaatggaggaatggcaaggcagctattgacagttacagaattaagtatgcccccatctctggaggggaccacgctgaggttgatgttccaaagagccaacaagccacaaccaaaaccacactcacaggtctgaggccgggaactgaatatgggattggagtttctgctgtgaaggaagacaaggagagcaatccagcgaccatcaacgcagccacagagttggacacgcccaaggaccttcaggtttctgaaactgcagagaccagcctgaccctgctctggaagacaccgttggccaaatttgaccgctaccgcctcaattacagtctccccacaggccagtggggagactgtaattgaggcggtagcggatcaaattaggccaacggatgtctaccggacga

SEQ ID NO: 311786 - DNA, 7299 bp, Homo sapiens
cgcccggctccgcccagggtctgcggggaacggaaaccgaaagtgcgcggcgccgggcggggccaccgacctgcctgggccgaagccccagcactcgccggcggcagtgaaaggacgcgccggagccggttttccagataacagaaagtaacgtgaaggaattcaggtgactcagacatggaggagagaagacctcatctggatgccaggcccaggaattcccataccaaccacagaggccctgtggatggagagttaccaccaagagctagaaatcaggccaataacccaccagccaatgctctccgaggaggagccagccaccctggaaggcatcctagggccaacaaccatcctgctgcttactggcagagggaagagagatttagggccatgggcaggaacccacatcaaggaaggaggaaccaggaggggcatgccagcgacgaagctagagaccaaagacatgaccaggagaatgacaccaggtggagaaatggcaaccaggactgtaggaaccgcagaccaccatggtccaatgacaacttccagcagtggcggactccccaccagaagcctacagaacagccacagcaggcgaagaaactgggctacaagttcttagaaagtcttctgcagaaagacccttctgaggtggtcatcacacttgccacaagtttagggctgaaagagctcctttctcattcttccatgaaatctaacttccttgagctcatctgtcaggttcttcggaaggcttgtagctccaaaatggatcgccagagtgttctccatgtactgggcatattgaaaaactccaaatttctcaaagtctgcctgcctgcttatgtggtagggatgatcactgaacccatccctgacatccgaaaccagtatccagagcacataagcaacatcatctccctcctccaggaccttgtaagtgtcttccctgccagctctgtgcaggaaacttccatgctggtttccctcctgccaacctctcttaatgctctgagagcctctggtgttgacatagaagaggaaacggagaagaacctggaaaaggtacagactatcattgaacatctgcaggaaaagaggcgagagggcactttgagagtggatacctacactctagtgcagcctgaggcagaagaccatgttgagagctaccgaaccatgcccatttaccctacctacaatgaagtgcacttggatgagaggcccttccttcgccccaatatcatttctggaaaatacgacagcactgctatctatctggatacccacttccggctcctgcgagaagatttcgtcagacctttacgggaaggtattttggaacttctccaaagctttgaagaccagggcctgaggaagagaaagtttgatgacatccgaatctactttgacaccaggattatcacccccatgtgttcatcatcaggcatagtctacaaggtgcagtttgacacaaaaccactgaagtttgttcgctggcagaattccaaacgattgctctatgggtctttggtatgcatgtccaaggacaacttcgagacatttctttttgccaccgtatctaacagggagcaggaagatctctgccgaggaattgtccagctctgcttcaatgagcaaagccaacagctgctagcagaggtccagccctctgactctttcctcatggtagagacaactgcatactttgaggcctacaggcacgtcctggaaggactccaggaggtccaggaggaagatgttcccttccagaggaatatcgtggagtgtaactctcatgtgaaggagccaaggtacttgctaatggggggcagatatgactttacccccttaatagagaatccttcagccactggggaatttctaagaaatgtcgagggtttgagacatcccagaattaatgtcttagatcctggccagtggccctcaaaagaagccctgaagctggatgactcccagatggaagccttgcagtttgctctcacaagggaactggctattattcaaggacctcctggaacaggcaaaacctatgtgggtctaaaaattgttcaggccctcctaaccaacgagtctgtttggcaaattagcctccagaagttccccatcttggttgtgtgttatactaatcatgctttggaccagtttctggaaggcatctacaattgtcagaagaccagcattgtgcgggtgggtggaaggagcaacagtgaaatcctgaagcagttcaccctaagggagctgaggaacaagcgggaattccgccgcaacctccccatgcacctccgaagggcctacatgagtatcatgacacagatgaaggagtcagagcaagagcttcatgaaggagccaagaccctggagtgcaccatgcgtggtgtcctacgggaacagtacctgcagaagtacatctcaccccagcactgggaaagtctcatgaatggaccagtgcaggatagtgaatggatttgcttccagcactggaagcattccatgatgctggagtggctaggtcttggtgtcggttctttcacgcaaagtgtttctccagcaggacctgagaatacagcccaggcagaaggggatgaggaggaagaaggggaggaggagagttcgctgatagagatcgcagaggaagctgacctgattcaagcagaccgggtgattgaggaggaagaggtggtgaggccccagcggcggaagaaggaagagagtggagcagaccaggagttggctaaaatgcttctggccatgaggctagaccattgtggcactgggacagcagctggacaggagcaagccacaggagagtggcagacccagcgcaaccagaaaaagaaaatgaaaaaaagagtgaaggatgagcttcgcaaactgaacaccatgactgcagccgaggccaacgagatcgaggatgtttggcacctggacctcagttctcgctggcagctttataggctctggctacagttgtaccaggctgacacccgccggaagatcctcagctatgaacgccagtaccgcacatcagcagaaagaatggccgagctgagactccaggaagacctgcacattcttaaagatgcccaggttgtaggaatgacaaccacaggtgctgccaaataccgccagatcctacagaaggtggagccgaggattgtcatagtggaagaagctgcggaagtccttgaggcccataccattgccacattgagcaaagcttgccagcacctcattttgattggggaccaccagcagctgcgccccagtgccaacgtgtatgatctggccaagaacttcaaccttgaggtgtccctttttgaacggctagtgaaagtaaacattccctttgtccgtctgaattaccagcaccgtatgtgccctgaaattgcccgccttttgaccccccacatttaccaggatctggagaatcatccatctgttcttaagtatgagaagattaagggggtgtcttccaaccttttctttgtagaacacaactttcctgaacaggaaatccaagagggcaaaagccatcagaaccagcatgaggctcactttgtggtagagctgtgcaagtacttcctgtgccaggaatacctgccttcccagatcaccatcctcactacctataccgggcagctcttctgcctgcgcaaactgatgcctgccaagacatttgctggcgtcagggtccatgttgtggacaaataccaaggggaagagaatgacatcatcctcctctcgctagtgcggagcaaccaagaaggcaaggtgggttttctgcagatatccaaccgcatctgtgtggccttgtcccgagccaagaagggaatgtactgcatcggaaacatgcagatgctggccaaggtgcccctgtggagcaagatcattcatacacttcgagagaacaatcaaataggccccatgctccggctctgctgccagaaccaccctgaaacccacaccttagtatccaaagcttctgacttccaaaaagtacccgaaggaggctgcagcctgccctgcgagttccgcctgggctgtgggcatgtctgcacccgtgcctgccacccttatgactcttcacacaaggagttccaatgcatgaagccatgccagaaggtcatctgtcaggaagggcaccggtgtccccttgtttgcttccaggagtgtcagccttgtcaggtgaaggtgcccaaaaccattcctcggtgcggccatgaacaaatggtcccttgttccgtgcctgagtcagatttctgctgccaggagccttgctccaagtctctgagatgtgggcacagatgcagccacccatgtggtgaggactgtgtgcagttgtgttcagaaatggtcaccataaaactcaagtgtgggcacagtcaaccggtaaaatgtggtcatgtggaaggcctcctgtatggtggtctgctagtcaagtgtaccacaaagtgtggcactatcttggactgcgggcatccttgcccaggctcctgccacagctgcttcgaagggcgtttccatgaacgctgtcagcagccctgcaagcgcctgcttatctgctcacacaagtgccaggaaccatgcattggtgagtgcccaccctgccagcggacctgtcagaaccgctgtgtccacagccagtgcaagaagaaatgtggggagctgtgtagtccctgcgtggaaccctgtgtctggcgctgccagcactaccagtgcaccaaactctgctctgagccctgcaaccgacccccatgctatgtgccttgtactaagctgctagtttgtggccacccctgcattggtctctgtggggagccatgccccaagaaatgccggatctgccacatggatgaggtcacccaaatattctttggctttgaggatgagcctgatgcccgctttgtgcagctggaagactgcagccacatctttgaggtgcaagccctagaccgctacatgaatgaacagaaggatgatgaagtcgccatcagattgaaagtctgccctatctgccaggtgcccatccgcaaaaacctgaggtatggaactagcataaaacagcggctagaagagattgaaatcatcaaggaaaagatccagggctcagcaggggaaatagcaaccagccaggaacggcttaaggccctgctggagaggaagagcctcctccaccagctgcttcctgaagacttcctgatgttaaaggagaagctggcccagaaaaatctgtcagtgaaggacctgggtctggttgagaattacatcagcttctatgaccacctggccagcctgtgggattccctgaaaaagatgcatgtcttagaagagaaaagagtgaggactcgactagaacaggtccatgagtggctggccaagaagcgcttgagcttcactagccaggaactaagtgacctccgaagtgaaatccagaggctcacatacctggtgaaccttctgacccgctacaagatagcagagaagaaggtgaaagatagcatagcagtagaggtctatagtgtccagaatatccttgagaaaacatgtaagttcacccaagaggatgaacaacttgtgcaggaaaagatggaagctctgaaagccacccttccctgctctggcctgggcatctcagaggaagagcgagtgcagattgtcagtgccataggttatcctcgtggtcactggttcaagtgccgcaatggccatatctatgtgattggcgattgtgggggagccatggagaggggcacgtgtcctgactgtaaggaagtgattggtggcacaaatcatactctggaaagaagcaaccagcttgcttctgaaatggatggagcccagcatgctgcctggtctgacacggccaacaacctgatgaactttgaggagatccaggggatgatgtaggaagatggtacaccactgccttttgccctcgccactgaatgactggggccagctccctaatgaaggaactgaagtttgttttttattatcatcctttttaggctgggcgcagtggcttacgcctgtaatcccagcactttgggaggccgaggcaggcggatcacgaggtcaggagttcgagaccagcctgaccaacatggcgaaaccccgtctctactaaaaatacaaaaattagctgggcgttatggcgggcgcctgtaatcccagctacttgggaggctgaggcagaagaatcgcttaaacccaggaggcggaggttgcagtgagctgagatcatgccattgcactccagtctgggcgacaggagcaagactctgtctcaaaaaaaaaaaatcattctttttagtcttagcacctacttaaggatccacttttagggctcacccacatttgtttctagatttacccctgcgctagagtaagcactttatctccagaactgagagcaaagttaacaaatctcaccccttctctcctgcaaattagtggacagactccctggaacatgtttggggcttccacctagggccacctagtggtatctctgggtctttacttggtcagatgtttattctacattgttccccaggaacagagtatgagctcattgatgcagaccgattctaattgccaggccctaatttgcagactaactctcataataaacagaggcccatagttgtttatgaactgcttatcccttaaaggagcacaagaacccctccctgccctccttgggcaccctgcctccaggagatggaggcacgtgataagacaaaagactgcaccaactcaccctgacacagttacatagtcactgagagtggggaagatgggacagcccacatgctgcataagatgggccttatgcagcaggcccaggtcgtcattaaggagtgacccctttcctgtaacctgcactttgggatggtagaagtttctttacctgctgacaggtttggtggcactgctggttacccctgggccctgaatggagctaaaatcacatttggtaccagcagcacctatcccaagtgtgatccttcatcccaacactccctcttggagctgttccctgggtagagctagcatgccagcagcttctgcaggctccaaacccaggccagaagccagacccaggcctgctgcctgcatctgcattccctccttccagtgttccttagaacagacatttaggtatctcaggtcctttctaagtgtccctttcctatgtatgcatttcctttttttgtctttactatgcactttagcttataaagccaattaaaaacgatgattgagaaa

SEQ ID NO: 311787 - DNA, 481 bp, Homo sapiens
gttgtactccaccggcgaggtgtactccaccggccggttgtactccagcggaaggttgtactccagccggcagggtgctactcccggagggactcacatggcatgcgtcaccggaacaagaaacaggctatggtcaaagatgtttaatgataactagtgctagtactagtataaatgctttccacgtatttactcctgacaagccaacaatcctataaagagataccattattattcccattttatagaaggtgatactgagggacacagaggttaggtcatttaccttactaggtcccacaacctagtaagaggtagagtagggctttgaagccaggcaaactggctccagagtccttgtttagccactctacagtggaagagctgttgggagaatgtaagacacttgacattaatcagtgatgccagccctttttcttacgtgctgtgacccctgccttgggcttaaaaccaagcctgc

SEQ ID NO: 311788 - DNA, 7390 bp, Homo sapiens
cgcccggctccgcccagggtctgcggggaacggaaaccgaaagtgcgcggcgccgggcggggccaccgacctgcctgggccgaagccccagcactcgccggcggcagtgaaaggacgcgccggagccgggtgagtggccccgcaactgcccctgcccctgattcttccttgcctcgccgcgaaccccggcgcccgcgccgacccgccactgcctctgcccttttccagataacagaaagtaacgtgaaggaattcaggtgactcagacatggaggagagaagacctcatctggatgccaggcccaggaattcccataccaaccacagaggccctgtggatggagagttaccaccaagagctagaaatcaggccaataacccaccagccaatgctctccgaggaggagccagccaccctggaaggcatcctagggccaacaaccatcctgctgcttactggcagagggaagagagatttagggccatgggcaggaacccacatcaaggaaggaggaaccaggaggggcatgccagcgacgaagctagagaccaaagacatgaccaggagaatgacaccaggtggagaaatggcaaccaggactgtaggaaccgcagaccaccatggtccaatgacaacttccagcagtggcggactccccaccagaagcctacagaacagccacagcaggcgaagaaactgggctacaagttcttagaaagtcttctgcagaaagacccttctgaggtggtcatcacacttgccacaagtttagggctgaaagagctcctttctcattcttccatgaaatctaacttccttgagctcatctgtcaggttcttcggaaggcttgtagctccaaaatggatcgccagagtgttctccatgtactgggcatattgaaaaactccaaatttctcaaagtctgcctgcctgcttatgtggtagggatgatcactgaacccatccctgacatccgaaaccagtatccagagcacataagcaacatcatctccctcctccaggaccttgtaagtgtcttccctgccagctctgtgcaggaaacttccatgctggtttccctcctgccaacctctcttaatgctctgagagcctctggtgttgacatagaagaggaaacggagaagaacctggaaaaggtacagactatcattgaacatctgcaggaaaagaggcgagagggcactttgagagtggatacctacactctagtgcagcctgaggcagaagaccatgttgagagctaccgaaccatgcccatttaccctacctacaatgaagtgcacttggatgagaggcccttccttcgccccaatatcatttctggaaaatacgacagcactgctatctatctggatacccacttccggctcctgcgagaagatttcgtcagacctttacgggaaggtattttggaacttctccaaagctttgaagaccagggcctgaggaagagaaagtttgatgacatccgaatctactttgacaccaggattatcacccccatgtgttcatcatcaggcatagtctacaaggtgcagtttgacacaaaaccactgaagtttgttcgctggcagaattccaaacgattgctctatgggtctttggtatgcatgtccaaggacaacttcgagacatttctttttgccaccgtatctaacagggagcaggaagatctctgccgaggaattgtccagctctgcttcaatgagcaaagccaacagctgctagcagaggtccagccctctgactctttcctcatggtagagacaactgcatactttgaggcctacaggcacgtcctggaaggactccaggaggtccaggaggaagatgttcccttccagaggaatatcgtggagtgtaactctcatgtgaaggagccaaggtacttgctaatggggggcagatatgactttacccccttaatagagaatccttcagccactggggaatttctaagaaatgtcgagggtttgagacatcccagaattaatgtcttagatcctggccagtggccctcaaaagaagccctgaagctggatgactcccagatggaagccttgcagtttgctctcacaagggaactggctattattcaaggacctcctggaacaggcaaaacctatgtgggtctaaaaattgttcaggccctcctaaccaacgagtctgtttggcaaattagcctccagaagttccccatcttggttgtgtgttatactaatcatgctttggaccagtttctggaaggcatctacaattgtcagaagaccagcattgtgcgggtgggtggaaggagcaacagtgaaatcctgaagcagttcaccctaagggagctgaggaacaagcgggaattccgccgcaacctccccatgcacctccgaagggcctacatgagtatcatgacacagatgaaggagtcagagcaagagcttcatgaaggagccaagaccctggagtgcaccatgcgtggtgtcctacgggaacagtacctgcagaagtacatctcaccccagcactgggaaagtctcatgaatggaccagtgcaggatagtgaatggatttgcttccagcactggaagcattccatgatgctggagtggctaggtcttggtgtcggttctttcacgcaaagtgtttctccagcaggacctgagaatacagcccaggcagaaggggatgaggaggaagaaggggaggaggagagttcgctgatagagatcgcagaggaagctgacctgattcaagcagaccgggtgattgaggaggaagaggtggtgaggccccagcggcggaagaaggaagagagtggagcagaccaggagttggctaaaatgcttctggccatgaggctagaccattgtggcactgggacagcagctggacaggagcaagccacaggagagtggcagacccagcgcaaccagaaaaagaaaatgaaaaaaagagtgaaggatgagcttcgcaaactgaacaccatgactgcagccgaggccaacgagatcgaggatgtttggcacctggacctcagttctcgctggcagctttataggctctggctacagttgtaccaggctgacacccgccggaagatcctcagctatgaacgccagtaccgcacatcagcagaaagaatggccgagctgagactccaggaagacctgcacattcttaaagatgcccaggttgtaggaatgacaaccacaggtgctgccaaataccgccagatcctacagaaggtggagccgaggattgtcatagtggaagaagctgcggaagtccttgaggcccataccattgccacattgagcaaagcttgccagcacctcattttgattggggaccaccagcagctgcgccccagtgccaacgtgtatgatctggccaagaacttcaaccttgaggtgtccctttttgaacggctagtgaaagtaaacattccctttgtccgtctgaattaccagcaccgtatgtgccctgaaattgcccgccttttgaccccccacatttaccaggatctggagaatcatccatctgttcttaagtatgagaagattaagggggtgtcttccaaccttttctttgtagaacacaactttcctgaacaggaaatccaagagggcaaaagccatcagaaccagcatgaggctcactttgtggtagagctgtgcaagtacttcctgtgccaggaatacctgccttcccagatcaccatcctcactacctataccgggcagctcttctgcctgcgcaaactgatgcctgccaagacatttgctggcgtcagggtccatgttgtggacaaataccaaggggaagagaatgacatcatcctcctctcgctagtgcggagcaaccaagaaggcaaggtgggttttctgcagatatccaaccgcatctgtgtggccttgtcccgagccaagaagggaatgtactgcatcggaaacatgcagatgctggccaaggtgcccctgtggagcaagatcattcatacacttcgagagaacaatcaaataggccccatgctccggctctgctgccagaaccaccctgaaacccacaccttagtatccaaagcttctgacttccaaaaagtacccgaaggaggctgcagcctgccctgcgagttccgcctgggctgtgggcatgtctgcacccgtgcctgccacccttatgactcttcacacaaggagttccaatgcatgaagccatgccagaaggtcatctgtcaggaagggcaccggtgtccccttgtttgcttccaggagtgtcagccttgtcaggtgaaggtgcccaaaaccattcctcggtgcggccatgaacaaatggtcccttgttccgtgcctgagtcagatttctgctgccaggagccttgctccaagtctctgagatgtgggcacagatgcagccacccatgtggtgaggactgtgtgcagttgtgttcagaaatggtcaccataaaactcaagtgtgggcacagtcaaccggtaaaatgtggtcatgtggaaggcctcctgtatggtggtctgctagtcaagtgtaccacaaagtgtggcactatcttggactgcgggcatccttgcccaggctcctgccacagctgcttcgaagggcgtttccatgaacgctgtcagcagccctgcaagcgcctgcttatctgctcacacaagtgccaggaaccatgcattggtgagtgcccaccctgccagcggacctgtcagaaccgctgtgtccacagccagtgcaagaagaaatgtggggagctgtgtagtccctgcgtggaaccctgtgtctggcgctgccagcactaccagtgcaccaaactctgctctgagccctgcaaccgacccccatgctatgtgccttgtactaagctgctagtttgtggccacccctgcattggtctctgtggggagccatgccccaagaaatgccggatctgccacatggatgaggtcacccaaatattctttggctttgaggatgagcctgatgcccgctttgtgcagctggaagactgcagccacatctttgaggtgcaagccctagaccgctacatgaatgaacagaaggatgatgaagtcgccatcagattgaaagtctgccctatctgccaggtgcccatccgcaaaaacctgaggtatggaactagcataaaacagcggctagaagagattgaaatcatcaaggaaaagatccagggctcagcaggggaaatagcaaccagccaggaacggcttaaggccctgctggagaggaagagcctcctccaccagctgcttcctgaagacttcctgatgttaaaggagaagctggcccagaaaaatctgtcagtgaaggacctgggtctggttgagaattacatcagcttctatgaccacctggccagcctgtgggattccctgaaaaagatgcatgtcttagaagagaaaagagtgaggactcgactagaacaggtccatgagtggctggccaagaagcgcttgagcttcactagccaggaactaagtgacctccgaagtgaaatccagaggctcacatacctggtgaaccttctgacccgctacaagatagcagagaagaaggtgaaagatagcatagcagtagaggtctatagtgtccagaatatccttgagaaaacatgtaagttcacccaagaggatgaacaacttgtgcaggaaaagatggaagctctgaaagccacccttccctgctctggcctgggcatctcagaggaagagcgagtgcagattgtcagtgccataggttatcctcgtggtcactggttcaagtgccgcaatggccatatctatgtgattggcgattgtgggggagccatggagaggggcacgtgtcctgactgtaaggaagtgattggtggcacaaatcatactctggaaagaagcaaccagcttgcttctgaaatggatggagcccagcatgctgcctggtctgacacggccaacaacctgatgaactttgaggagatccaggggatgatgtaggaagatggtacaccactgccttttgccctcgccactgaatgactggggccagctccctaatgaaggaactgaagtttgttttttattatcatcctttttaggctgggcgcagtggcttacgcctgtaatcccagcactttgggaggccgaggcaggcggatcacgaggtcaggagttcgagaccagcctgaccaacatggcgaaaccccgtctctactaaaaatacaaaaattagctgggcgttatggcgggcgcctgtaatcccagctacttgggaggctgaggcagaagaatcgcttaaacccaggaggcggaggttgcagtgagctgagatcatgccattgcactccagtctgggcgacaggagcaagactctgtctcaaaaaaaaaaaatcattctttttagtcttagcacctacttaaggatccacttttagggctcacccacatttgtttctagatttacccctgcgctagagtaagcactttatctccagaactgagagcaaagttaacaaatctcaccccttctctcctgcaaattagtggacagactccctggaacatgtttggggcttccacctagggccacctagtggtatctctgggtctttacttggtcagatgtttattctacattgttccccaggaacagagtatgagctcattgatgcagaccgattctaattgccaggccctaatttgcagactaactctcataataaacagaggcccatagttgtttatgaactgcttatcccttaaaggagcacaagaacccctccctgccctccttgggcaccctgcctccaggagatggaggcacgtgataagacaaaagactgcaccaactcaccctgacacagttacatagtcactgagagtggggaagatgggacagcccacatgctgcataagatgggccttatgcagcaggcccaggtcgtcattaaggagtgacccctttcctgtaacctgcactttgggatggtagaagtttctttacctgctgacaggtttggtggcactgctggttacccctgggccctgaatggagctaaaatcacatttggtaccagcagcacctatcccaagtgtgatccttcatcccaacactccctcttggagctgttccctgggtagagctagcatgccagcagcttctgcaggctccaaacccaggccagaagccagacccaggcctgctgcctgcatctgcattccctccttccagtgttccttagaacagacatttaggtatctcaggtcctttctaagtgtccctttcctatgtatgcatttcctttttttgtctttactatgcactttagcttataaagccaattaaaaacgatgattgagaaa

SEQ ID NO: 311789 - DNA, 8107 bp, Homo sapiens
cgcccggctccgcccagggtctgcggggaacggaaaccgaaagtgcgcggcgccgggcggggccaccgacctgcctgggccgaagccccagcactcgccggcggcagtgaaaggacgcgccggagccgggtgagtggccccgcaactgcccctgcccctgattcttccttgcctcgccgcgaaccccggcgcccgcgccgacccgccactgcctctgcccttttccagataacagaaagtaacgtgaaggaattcaggtgactcagacatggaggagagaagacctcatctggatgccaggcccaggaattcccataccaaccacagaggccctgtggatggagagttaccaccaagagctagaaatcaggccaataacccaccagccaatgctctccgaggaggagccagccaccctggaaggcatcctagggccaacaaccatcctgctgcttactggcagagggaagagagatttagggccatgggcaggaacccacatcaaggaaggaggaaccaggaggggcatgccagcgacgaagctagagaccaaagacatgaccaggagaatgacaccaggtggagaaatggcaaccaggactgtaggaaccgcagaccaccatggtccaatgacaacttccagcagtggcggactccccaccagaagcctacagaacagccacagcaggcgaagaaactgggctacaagttcttagaaagtcttctgcagaaagacccttctgaggtggtcatcacacttgccacaagtttagggctgaaagagctcctttctcattcttccatgaaatctaacttccttgagctcatctgtcaggttcttcggaaggcttgtagctccaaaatggatcgccagagtgttctccatgtactgggcatattgaaaaactccaaatttctcaaagtctgcctgcctgcttatgtggtagggatgatcactgaacccatccctgacatccgaaaccagtatccagagcacataagcaacatcatctccctcctccaggaccttgtaagtgtcttccctgccagctctgtgcaggaaacttccatgctggtttccctcctgccaacctctcttaatgctctgagagcctctggtgttgacatagaagaggaaacggagaagaacctggaaaaggtacagactatcattgaacatctgcaggaaaagaggcgagagggcactttgagagtggatacctacactctagtgcagcctgaggcagaagaccatgttgagagctaccgaaccatgcccatttaccctacctacaatgaagtgcacttggatgagaggcccttccttcgccccaatatcatttctggaaaatacgacagcactgctatctatctggatacccacttccggctcctgcgagaagatttcgtcagacctttacgggaaggtattttggaacttctccaaagctttgaagaccagggcctgaggaagagaaagtttgatgacatccgaatctactttgacaccaggattatcacccccatgtgttcatcatcaggcatagtctacaaggtgcagtttgacacaaaaccactgaagtttgttcgctggcagaattccaaacgattgctctatgggtctttggtatgcatgtccaaggacaacttcgagacatttctttttgccaccgtatctaacagggagcaggaagatctctgccgaggaattgtccagctctgcttcaatgagcaaagccaacagctgctagcagaggtccagccctctgactctttcctcatggtagagacaactgcatactttgaggcctacaggcacgtcctggaaggactccaggaggtccaggaggaagatgttcccttccagaggaatatcgtggagtgtaactctcatgtgaaggagccaaggtacttgctaatggggggcagatatgactttacccccttaatagagaatccttcagccactggggaatttctaagaaatgtcgagggtttgagacatcccagaattaatgtcttagatcctggccagtggccctcaaaagaagccctgaagctggatgactcccagatggaagccttgcagtttgctctcacaagggaactggctattattcaaggacctcctggaacaggcaaaacctatgtgggtctaaaaattgttcaggccctcctaaccaacgagtctgtttggcaaattagcctccagaagttccccatcttggttgtgtgttatactaatcatgctttggaccagtttctggaaggcatctacaattgtcagaagaccagcattgtgcgggtgggtggaaggagcaacagtgaaatcctgaagcagttcaccctaagggagctgaggaacaagcgggaattccgccgcaacctccccatgcacctccgaagggcctacatgagtatcatgacacagatgaaggagtcagagcaagagcttcatgaaggagccaagaccctggagtgcaccatgcgtggtgtcctacgggaacagtacctgcagaagtacatctcaccccagcactgggaaagtctcatgaatggaccagtgcaggatagtgaatggatttgcttccagcactggaagcattccatgatgctggagtggctaggtcttggtgtcggttctttcacgcaaagtgtttctccagcaggacctgagaatacagcccaggcagaaggggatgaggaggaagaaggggaggaggagagttcgctgatagagatcgcagaggaagctgacctgattcaagcagaccgggtgattgaggaggaagaggtggtgaggccccagcggcggaagaaggaagagagtggagcagaccaggagttggctaaaatgcttctggccatgaggctagaccattgtggcactgggacagcagctggacaggagcaagccacaggagagtggcagcctgacagtaccctgcctggtattgatgtctgcagacccagcgcaaccagaaaaagaaaatgaaaaaaagagtgaaggatgagcttcgcaaactgaacaccatgactgcagccgaggccaacgagatcgaggatgtttggcacctggacctcagttctcgctggcagctttataggctctggctacagttgtaccaggctgacacccgccggaagatcctcagctatgaacgccagtaccgcacatcagcagaaagaatggccgagctgagactccaggaagacctgcacattcttaaagatgcccaggttgtaggaatgacaaccacaggtaagaaactgtggagaaatttgcctgttgcatctaagttcacttctggtgccagattatctaaggacaggtaaagaggagcttctttggtaggttagaggaaaataccatgaaaagctactgaaagcacccatattttgagaactcttggtgaaattcactcactttcgccaggcgcagtggctcacgcctataatcccaacactttgggaggccaaggcaggtggatcacctgaggtcataagtttgcaatcagcctggccaacatggtgaaatctcgtctctactaaaaatacaaaaattagctgggtgtagtggtgggtgcctgtaatcctggctactcgggaggctggggcacaagaatcacttgaacctgggaggtggaggttgcagtcagctgagatcgcaccactgcactccagcctgggtgacagagtgagactgtctcaaagaaaaaaaaaaaagaaaaaagaaattcactcactttctcctgctgggtttgaaactccaacagtgaccaacacagttttaatgttctggagaccacccagaacactataaggaccagctgtcgctgatgcaggttcagggaagatacagaagtggattcccagaggcccagtggccctgtgggtcctgtgcctcagctcagaggagcctttctcttctttcctcacttgaggtgctgccaaataccgccagatcctacagaaggtggagccgaggattgtcatagtggaagaagctgcggaagtccttgaggcccataccattgccacattgagcaaagcttgccagcacctcattttgattggggaccaccagcagctgcgccccagtgccaacgtgtatgatctggccaagaacttcaaccttgaggtgtccctttttgaacggctagtgaaagtaaacattccctttgtccgtctgaattaccagcaccgtatgtgccctgaaattgcccgccttttgaccccccacatttaccaggatctggagaatcatccatctgttcttaagtatgagaagattaagggggtgtcttccaaccttttctttgtagaacacaactttcctgaacaggaaatccaagagggcaaaagccatcagaaccagcatgaggctcactttgtggtagagctgtgcaagtacttcctgtgccaggaatacctgccttcccagatcaccatcctcactacctataccgggcagctcttctgcctgcgcaaactgatgcctgccaagacatttgctggcgtcagggtccatgttgtggacaaataccaaggggaagagaatgacatcatcctcctctcgctagtgcggagcaaccaagaaggcaaggtgggttttctgcagatatccaaccgcatctgtgtggccttgtcccgagccaagaagggaatgtactgcatcggaaacatgcagatgctggccaaggtgcccctgtggagcaagatcattcatacacttcgagagaacaatcaaataggccccatgctccggctctgctgccagaaccaccctgaaacccacaccttagtatccaaagcttctgacttccaaaaagtacccgaaggaggctgcagcctgccctgcgagttccgcctgggctgtgggcatgtctgcacccgtgcctgccacccttatgactcttcacacaaggagttccaatgcatgaagccatgccagaaggtcatctgtcaggaagggcaccggtgtccccttgtttgcttccaggagtgtcagccttgtcaggtgaaggtgcccaaaaccattcctcggtgcggccatgaacaaatggtcccttgttccgtgcctgagtcagatttctgctgccaggagccttgctccaagtctctgagatgtgggcacagatgcagccacccatgtggtgaggactgtgtgcagttgtgttcagaaatggtcaccataaaactcaagtgtgggcacagtcaaccggtaaaatgtggtcatgtggaaggcctcctgtatggtggtctgctagtcaagtgtaccacaaagtgtggcactatcttggactgcgggcatccttgcccaggctcctgccacagctgcttcgaagggcgtttccatgaacgctgtcagcagccctgcaagcgcctgcttatctgctcacacaagtgccaggaaccatgcattggtgagtgcccaccctgccagcggacctgtcagaaccgctgtgtccacagccagtgcaagaagaaatgtggggagctgtgtagtccctgcgtggaaccctgtgtctggcgctgccagcactaccagtgcaccaaactctgctctgagccctgcaaccgacccccatgctatgtgccttgtactaagctgctagtttgtggccacccctgcattggtctctgtggggagccatgccccaagaaatgccggatctgccacatggatgaggtcacccaaatattctttggctttgaggatgagcctgatgcccgctttgtgcagctggaagactgcagccacatctttgaggtgcaagccctagaccgctacatgaatgaacagaaggatgatgaagtcgccatcagattgaaagtctgccctatctgccaggtgcccatccgcaaaaacctgaggtatggaactagcataaaacagcggctagaagagattgaaatcatcaaggaaaagatccagggctcagcaggggaaatagcaaccagccaggaacggcttaaggccctgctggagaggaagagcctcctccaccagctgcttcctgaagacttcctgatgttaaaggagaagctggcccagaaaaatctgtcagtgaaggacctgggtctggttgagaattacatcagcttctatgaccacctggccagcctgtgggattccctgaaaaagatgcatgtcttagaagagaaaagagtgaggactcgactagaacaggtccatgagtggctggccaagaagcgcttgagcttcactagccaggaactaagtgacctccgaagtgaaatccagaggctcacatacctggtgaaccttctgacccgctacaagatagcagagaagaaggtgaaagatagcatagcagtagaggtctatagtgtccagaatatccttgagaaaacatgtaagttcacccaagaggatgaacaacttgtgcaggaaaagatggaagctctgaaagccacccttccctgctctggcctgggcatctcagaggaagagcgagtgcagattgtcagtgccataggttatcctcgtggtcactggttcaagtgccgcaatggccatatctatgtgattggcgattgtgggggagccatggagaggggcacgtgtcctgactgtaaggaagtgattggtggcacaaatcatactctggaaagaagcaaccagcttgcttctgaaatggatggagcccagcatgctgcctggtctgacacggccaacaacctgatgaactttgaggagatccaggggatgatgtaggaagatggtacaccactgccttttgccctcgccactgaatgactggggccagctccctaatgaaggaactgaagtttgttttttattatcatcctttttaggctgggcgcagtggcttacgcctgtaatcccagcactttgggaggccgaggcaggcggatcacgaggtcaggagttcgagaccagcctgaccaacatggcgaaaccccgtctctactaaaaatacaaaaattagctgggcgttatggcgggcgcctgtaatcccagctacttgggaggctgaggcagaagaatcgcttaaacccaggaggcggaggttgcagtgagctgagatcatgccattgcactccagtctgggcgacaggagcaagactctgtctcaaaaaaaaaaaatcattctttttagtcttagcacctacttaaggatccacttttagggctcacccacatttgtttctagatttacccctgcgctagagtaagcactttatctccagaactgagagcaaagttaacaaatctcaccccttctctcctgcaaattagtggacagactccctggaacatgtttggggcttccacctagggccacctagtggtatctctgggtctttacttggtcagatgtttattctacattgttccccaggaacagagtatgagctcattgatgcagaccgattctaattgccaggccctaatttgcagactaactctcataataaacagaggcccatagttgtttatgaactgcttatcccttaaaggagcacaagaacccctccctgccctccttgggcaccctgcctccaggagatggaggcacgtgataagacaaaagactgcaccaactcaccctgacacagttacatagtcactgagagtggggaagatgggacagcccacatgctgcataagatgggccttatgcagcaggcccaggtcgtcattaaggagtgacccctttcctgtaacctgcactttgggatggtagaagtttctttacctgctgacaggtttggtggcactgctggttacccctgggccctgaatggagctaaaatcacatttggtaccagcagcacctatcccaagtgtgatccttcatcccaacactccctcttggagctgttccctgggtagagctagcatgccagcagcttctgcaggctccaaacccaggccagaagccagacccaggcctgctgcctgcatctgcattccctccttccagtgttccttagaacagacatttaggtatctcaggtcctttctaagtgtccctttcctatgtatgcatttcctttttttgtctttactatgcactttagcttataaagccaattaaaaacgatgattgagaaa

SEQ ID NO: 311790 - DNA, 6697 bp, Homo sapiens
  misc_feature (5406)..(5406): n is a, c, g, or t
cgcccggctccgcccagggtctgcggggaacggaaaccgaaagtgcgcggcgccgggcggggccaccgacctgcctgggccgaagccccagcactcgccggcggcagtgaaaggacgcgccggagccgggtgagtggccccgcaactgcccctgcccctgattcttccttgcctcgccgcgaaccccggcgcccgcgccgacccgccactgcctctgcccttttccagataacagaaagtaacgtgaaggaattcaggtgactcagacatggaggagagaagacctcatctggatgccaggcccaggaattcccataccaaccacagaggccctgtggatggagagttaccaccaagagctagaaatcaggccaataacccaccagccaatgctctccgaggaggagccagccaccctggaaggcatcctagggccaacaaccatcctgctgcttactggcagagggaagagagatttagggccatgggcaggaacccacatcaaggaaggaggaaccaggaggggcatgccagcgacgaagctagagaccaaagacatgaccaggagaatgacaccaggtggagaaatggcaaccaggactgtaggaaccgcagaccaccatggtccaatgacaacttccagcagtggcggactccccaccagaagcctacagaacagccacagcaggcgaagaaactgggctacaagttcttagaaagtcttctgcagaaagacccttctgaggtggtcatcacacttgccacaagtttagggctgaaagagctcctttctcattcttccatgaaatctaacttccttgagctcatctgtcaggttcttcggaaggcttgtagctccaaaatggatcgccagagtgttctccatgtactgggcatattgaaaaactccaaatttctcaaagtctgcctgcctgcttatgtggtagggatgatcactgaacccatccctgacatccgaaaccagtatccagagcacataagcaacatcatctccctcctccaggaccttgtaagtgtcttccctgccagctctgtgcaggaaacttccatgctggtttccctcctgccaacctctcttaatgctctgagagcctctggtgttgacatagaagaggaaacggagaagaacctggaaaaggtacagactatcattgaacatctgcaggaaaagaggcgagagggcactttgagagtggatacctacactctagtgcagcctgaggcagaagaccatgttgagagctaccgaaccatgcccatttaccctacctacaatgaagtgcacttggatgagaggcccttccttcgccccaatatcatttctggaaaatacgacagcactgctatctatctggatacccacttccggctcctgcgagaagatttcgtcagacctttacgggaaggtattttggaacttctccaaagctttgaagaccagggcctgaggaagagaaagtttgatgacatccgaatctactttgacaccaggattatcacccccatgtgttcatcatcaggcatagtctacaaggtgcagtttgacacaaaaccactgaagtttgttcgctggcagaattccaaacgattgctctatgggtctttggtatgcatgtccaaggacaacttcgagacatttctttttgccaccgtatctaacagggagcaggaagatctctgccgaggaattgtccagctctgcttcaatgagcaaagccaacagctgctagcagaggtccagccctctgactctttcctcatggtagagacaactgcatactttgaggcctacaggcacgtcctggaaggactccaggaggtccaggaggaagatgttcccttccagaggaatatcgtggagtgtaactctcatgtgaaggagccaaggtacttgctaatggggggcagatatgactttacccccttaatagagaatccttcagccactggggaatttctaagaaatgtcgagggtttgagacatcccagaattaatgtcttagatcctggccagtggccctcaaaagaagccctgaagctggatgactcccagatggaagccttgcagtttgctctcacaagggaactggctattattcaaggacctcctggaacaggcaaaacctatgtgggtctaaaaattgttcaggccctcctaaccaacgagtctgtttggcaaattagcctccagaagttccccatcttggttgtgtgttatactaatcatgctttggaccagtttctggaaggcatctacaattgtcagaagaccagcattgtgcgggtgggtggaaggagcaacagtgaaatcctgaagcagttcaccctaagggagctgaggaacaagcgggaattccgccgcaacctccccatgcacctccgaagggcctacatgagtatcatgacacagatgaaggagtcagagcaagagcttcatgaaggagccaagaccctggagtgcaccatgcgtggtgtcctacgggaacagtacctgcagaagtacatctcaccccagcactgggaaagtctcatgaatggaccagtgcaggatagtgaatggatttgcttccagcactggaagcattccatgatgctggagtggctaggtcttggtgtcggttctttcacgcaaagtgtttctccagcaggacctgagaatacagcccaggcagaaggggatgaggaggaagaaggggaggaggagagttcgctgatagagatcgcagaggaagctgacctgattcaagcagaccgggtgattgaggaggaagaggtggtgaggccccagcggcggaagaaggaagagagtggagcagaccaggagttggctaaaatgcttctggccatgaggctagaccattgtggcactgggacagcagctggacaggagcaagccacaggagagtggcagcctgacagtaccctgcctggtattgatgtctgcagacccagcgcaaccagaaaaagaaaatgaaaaaaagagtgaaggatgagcttcgcaaactgaacaccatgactgcagccgaggccaacgagatcgaggatgtttggcacctggacctcagttctcgctggcagctttataggctctggctacagttgtaccaggctgacacccgccggaagatcctcagctatgaacgccagtaccgcacatcagcagaaagaatggccgagctgagactccaggaagacctgcacattcttaaagatgcccaggttgtaggaatgacaaccacaggtaagaaactgtggagaaatttgcctgttgcatctaagttcacttctggtgccagattatctaaggacaggtaaagaggagcttctttggtaggttagaggaaaataccatgaaaagctactgaaagcacccatattttgagaactcttggtgaaattcactcactttcgccaggcgcagtggctcacgcctataatcccaacactttgggaggccaaggcaggtggatcacctgaggtcataagtttgcaatcagcctggccaacatggtgaaatctcgtctctactaaaaatacaaaaattagctgggtgtagtggtgggtgcctgtaatcctggctactcgggaggctggggcacaagaatcacttgaacctgggaggtggaggttgcagtcagctgagatcgcaccactgcactccagcctgggtgacagagtgagactgtctcaaagaaaaaaaaaaaagaaaaaagaaattcactcactttctcctgctgggtttgaaactccaacagtgaccaacacagttttaatgttctggagaccacccagaacactataaggaccagctgtcgctgatgcaggttcagggaagatacagaagtggattcccagaggcccagtggccctgtgggtcctgtgcctcagctcagaggagcctttctcttctttcctcacttgaggtgctgccaaataccgccagatcctacagaaggtggagccgaggattgtcatagtggaagaagctgcggaagtccttgaggcccataccattgccacattgagcaaagcttgccagcacctcattttgattggggaccaccagcagctgcgccccagtgccaacgtgtatgatctggccaagaacttcaaccttgaggtgtccctttttgaacggctagtgaaagtaaacattccctttgtccgtctgaattaccagcaccgtatgtgccctgaaattgcccgccttttgaccccccacatttaccaggatctggagaatcatccatctgttcttaagtatgagaagattaaggtgagtctgtcttacccgatctttcttggatggtgtcagcaacctaaaaaggctataatttcctcaagataaaaaagcttttcagcggccaggcgcggtggctcacacctgtaatcccagcactttgggaagctgaggtgggcagatcacttgaggtcagagttcgagaccagcctaactaacatggtgaaaccctgtctctactaaaatacaaaaactagctgagcatggtggcaagcacctgtaatcccagctactcagaaggctgaggtgggagaattgcttgaacccaggaggtggaggttgcagtgagctgagatcgtgccatgctactgcactccaggctgggcagcggagagagactccctgtcaaaaaaaaaaagaaagccttcagaagggagtagagccagctttttaaaagctggttactgggagaaaattgaaatacagaccagggttttttaatcccaattctgcctgttagccatgtaaccttaagcaagttatataagaattctggccaggcgcggtggcttacgcctgtaatcccagagctttgtgaggccgaggcgggcgaatcacaaggtcaagggatcaagaccatcctggccaacatggtgaaatcccatctctactaaaaatacaaaaattagctgggtgcggtggcatgtgcctggctgggtgtggtggctcatgcctataatctcagcactttcggaggccaagatgggtggatcacctgaggtcaggagttggagactagcctggccaacatggtgaaaccccgtctctactaaaaatacaaaaattaactgggcatggtggtgggcgcctgtaatcccagctacttgggaggctgaggcgagaggatcgcttgaacctgggaagtggaggttgtggtgagccaacaagaccgtgccactgtacttcagcctacgcaacaagagtgaactctgtctcaaaaaaaaaaaattgtcagctgaggccaagagttcaaaaccaggctggggcacatagcaagactgtctctttttttaaaataaataaataaattctgagtatcaggttcttctggacaataagaataatggctcctgccatatccttcntttgttttttattatcatcctttttaggctgggcgcagtggcttacgcctgtaatcccagcactttgggaggccgaggcaggcggatcacgaggtcaggagttcgagaccagcctgaccaacatggcgaaaccccgtctctactaaaaatacaaaaattagctgggcgttatggcgggcgcctgtaatcccagctacttgggaggctgaggcagaagaatcgcttaaacccaggaggcggaggttgcagtgagctgagatcatgccattgcactccagtctgggcgacaggagcaagactctgtctcaaaaaaaaaaaatcattctttttagtcttagcacctacttaaggatccacttttagggctcacccacatttgtttctagatttacccctgcgctagagtaagcactttatctccagaactgagagcaaagttaacaaatctcaccccttctctcctgcaaattagtggacagactccctggaacatgtttggggcttccacctagggccacctagtggtatctctgggtctttacttggtcagatgtttattctacattgttccccaggaacagagtatgagctcattgatgcagaccgattctaattgccaggccctaatttgcagactaactctcataataaacagaggcccatagttgtttatgaactgcttatcccttaaaggagcacaagaacccctccctgccctccttgggcaccctgcctccaggagatggaggcacgtgataagacaaaagactgcaccaactcaccctgacacagttacatagtcactgagagtggggaagatgggacagcccacatgctgcataagatgggccttatgcagcaggcccaggtcgtcattaaggagtgacccctttcctgtaacctgcactttgggatggtagaagtttctttacctgctgacaggtttggtggcactgctggttacccctgggccctgaatggagctaaaatcacatttggtaccagcagcacctatcccaagtgtgatccttcatcccaacactccctcttggagctgttccctgggtagagctagcatgccagcagcttctgcaggctccaaacccaggccagaagccagacccaggcctgctgcctgcatctgcattccctccttccagtgttccttagaacagacatttaggtatctcaggtcctttctaagtgtccctttcctatgtatgcatttcctttttttgtctttactatgcactttagcttataaagccaattaaaaacgatgattgagaaa

SEQ ID NO: 311791 - DNA, 4982 bp, Homo sapiens
  misc_feature (1)..(1): n is a, c, g, or t
  misc_feature (11)..(11): n is a, c, g, or t
  misc_feature (22)..(22): n is a, c, g, or t
  misc_feature (26)..(26): n is a, c, g, or t
  misc_feature (35)..(35): n is a, c, g, or t
  misc_feature (38)..(38): n is a, c, g, or t
ngaggccaaangggtttttaanaaanagtggaggnttnagaccagggtttatgaggaccaagaccctggagtgcaccatgcgtggtgtcctacgggaacagtacctgcagaagtacatctcaccccagcactgggaaagtctcatgaatggaccagtgcaggatagtgaatggatttgcttccagcactggaagcattccatgatgctggagtggctaggtcttggtgtcggttctttcacgcaaagtgtttctccagcaggacctgagaatacagcccaggcagaaggggatgaggaggaagaaggggaggaggagagttcgctgatagagatcgcagaggaagctgacctgattcaagcagaccgggtgattgaggaggaagaggtggtgaggccccagcggcggaagaaggaagagagtggagcagaccaggagttggctaaaatgcttctggccatgaggctagaccattgtggcactgggacagcagctggacaggagcaagccacaggagagtggcagacccagcgcaaccagaaaaagaaaatgaaaaaaagagtgaaggatgagcttcgcaaactgaacaccatgactgcagccgaggccaacgagatcgaggatgtttggcacctggacctcagttctcgctggcagctttataggctctggctacagttgtaccaggctgacacccgccggaagatcctcagctatgaacgccagtaccgcacatcagcagaaagaatggccgagctgagactccaggaagacctgcacattcttaaagatgcccaggttgtaggaatgacaaccacaggtgctgccaaataccgccagatcctacagaaggtggagccgaggattgtcatagtggaagaagctgcggaagtccttgaggcccataccattgccacattgagcaaagcttgccagcacctcattttgattggggaccaccagcagctgcgccccagtgccaacgtgtatgatctggccaagaacttcaaccttgaggtgtccctttttgaacggctagtgaaagtaaacattccctttgtccgtctgaattaccagcaccgtatgtgccctgaaattgcccgccttttgaccccccacatttaccaggatctggagaatcatccatctgttcttaagtatgagaagattaagggggtgtcttccaaccttttctttgtagaacacaactttcctgaacaggaaatccaagagggcaaaagccatcagaaccagcatgaggctcactttgtggtagagctgtgcaagtacttcctgtgccaggaatacctgccttcccagatcaccatcctcactacctataccgggcagctcttctgcctgcgcaaactgatgcctgccaagacatttgctggcgtcagggtccatgttgtggacaaataccaaggggaagagaatgacatcatcctcctctcgctagtgcggagcaaccaagaaggcaaggtgggttttctgcagatatccaaccgcatctgtgtggccttgtcccgagccaagaagggaatgtactgcatcggaaacatgcagatgctggccaaggtgcccctgtggagcaagatcattcatacacttcgagagaacaatcaaataggccccatgctccggctctgctgccagaaccaccctgaaacccacaccttagtatccaaagcttctgacttccaaaaagtacccgaaggaggctgcagcctgccctgcgagttccgcctgggctgtgggcatgtctgcacccgtgcctgccacccttatgactcttcacacaaggagttccaatgcatgaagccatgccagaaggtcatctgtcaggaagggcaccggtgtccccttgtttgcttccaggagtgtcagccttgtcaggtgaaggtgcccaaaaccattcctcggtgcggccatgaacaaatggtcccttgttccgtgcctgagtcagatttctgctgccaggagccttgctccaagtctctgagatgtgggcacagatgcagccacccatgtggtgaggactgtgtgcagttgtgttcagaaatggtcaccataaaactcaagtgtgggcacagtcaaccggtaaaatgtggtcatgtggaaggcctcctgtatggtggtctgctagtcaagtgtaccacaaagtgtggcactatcttggactgcgggcatccttgcccaggctcctgccacagctgcttcgaagggcgtttccatgaacgctgtcagcagccctgcaagcgcctgcttatctgctcacacaagtgccaggaaccatgcattggtgagtgcccaccctgccagcggacctgtcagaaccgctgtgtccacagccagtgcaagaagaaatgtggggagctgtgtagtccctgcgtggaaccctgtgtctggcgctgccagcactaccagtgcaccaaactctgctctgagccctgcaaccgacccccatgctatgtgccttgtactaagctgctagtttgtggccacccctgcattggtctctgtggggagccatgccccaagaaatgccggatctgccacatggatgaggtcacccaaatattctttggctttgaggatgagcctgatgcccgctttgtgcagctggaagactgcagccacatctttgaggtgcaagccctagaccgctacatgaatgaacagaaggatgatgaagtcgccatcagattgaaagtctgccctatctgccaggtgcccatccgcaaaaacctgaggtatggaactagcataaaacagcggctagaagagattgaaatcatcaaggaaaagatccagggctcagcaggggaaatagcaaccagccaggaacggcttaaggccctgctggagaggaagagcctcctccaccagctgcttcctgaagacttcctgatgttaaaggagaagctggcccagaaaaatctgtcagtgaaggacctgggtctggttgagaattacatcagcttctatgaccacctggccagcctgtgggattccctgaaaaagatgcatgtcttagaagagaaaagagtgaggactcgactagaacaggtccatgagtggctggccaagaagcgcttgagcttcactagccaggaactaagtgacctccgaagtgaaatccagaggctcacatacctggtgaaccttctgacccgctacaagatagcagagaagaaggtgaaagatagcatagcagtagaggtctatagtgtccagaatatccttgagaaaacatgtaagttcacccaagaggatgaacaacttgtgcaggaaaagatggaagctctgaaagccacccttccctgctctggcctgggcatctcagaggaagagcgagtgcagattgtcagtgccataggttatcctcgtggtcactggttcaagtgccgcaatggccatatctatgtgattggcgattgtgggggagccatggagaggggcacgtgtcctgactgtaaggaagtgattggtggcacaaatcatactctggaaagaagcaaccagcttgcttctgaaatggatggagcccagcatgctgcctggtctgacacggccaacaacctgatgaactttgaggagatccaggggatgatgtaggaagatggtacaccactgccttttgccctcgccactgaatgactggggccagctccctaatgaaggaactgaagtttgttttttattatcatcctttttaggctgggcgcagtggcttacgcctgtaatcccagcactttgggaggccgaggcaggcggatcacgaggtcaggagttcgagaccagcctgaccaacatggcgaaaccccgtctctactaaaaatacaaaaattagctgggcgttatggcgggcgcctgtaatcccagctacttgggaggctgaggcagaagaatcgcttaaacccaggaggcggaggttgcagtgagctgagatcatgccattgcactccagtctgggcgacaggagcaagactctgtctcaaaaaaaaaaaatcattctttttagtcttagcacctacttaaggatccacttttagggctcacccacatttgtttctagatttacccctgcgctagagtaagcactttatctccagaactgagagcaaagttaacaaatctcaccccttctctcctgcaaattagtggacagactccctggaacatgtttggggcttccacctagggccacctagtggtatctctgggtctttacttggtcagatgtttattctacattgttccccaggaacagagtatgagctcattgatgcagaccgattctaattgccaggccctaatttgcagactaactctcataataaacagaggcccatagttgtttatgaactgcttatcccttaaaggagcacaagaacccctccctgccctccttgggcaccctgcctccaggagatggaggcacgtgataagacaaaagactgcaccaactcaccctgacacagttacatagtcactgagagtggggaagatgggacagcccacatgctgcataagatgggccttatgcagcaggcccaggtcgtcattaaggagtgacccctttcctgtaacctgcactttgggatggtagaagtttctttacctgctgacaggtttggtggcactgctggttacccctgggccctgaatggagctaaaatcacatttggtaccagcagcacctatcccaagtgtgatccttcatcccaacactccctcttggagctgttccctgggtagagctagcatgccagcagcttctgcaggctccaaacccaggccagaagccagacccaggcctgctgcctgcatctgcattccctccttccagtgttccttagaacagacatttaggtatctcaggtcctttctaagtgtccctttcctatgtatgcatttcctttttttgtctttactatgcactttagcttataaagccaattaaaaacgatgattgagaaa

SEQ ID NO: 311792 - DNA, 5812 bp, Homo sapiens
cgcccggctccgcccagggtctgcggggaacggaaaccgaaagtgcgcggcgccgggcggggccaccgacctgcctgggccgaagccccagcactcgccggcggcagtgaaaggacgcgccggagccgggtgagtggccccgcaactgcccctgcccctgattcttccttgcctcgccgcgaaccccggcgcccgcgccgacccgccactgcctctgcccttttccagataacagaaagtaacgtgaaggaattcaggtgactcagacatggaggagagaagacctcatctggatgccaggcccaggaattcccataccaaccacagaggccctgtggatggagagttaccaccaagagctagaaatcaggccaataacccaccagccaatgctctccgaggaggagccagccaccctggaaggcatcctagggccaacaaccatcctgctgcttactggcagagggaagagagatttagggccatgggcaggaacccacatcaaggaaggaggaaccaggaggggcatgccagcgacgaagctagagaccaaagacatgaccaggagaatgacaccaggtggagaaatggcaaccaggactgtaggaaccgcagaccaccatggtccaatgacaacttccagcagtggcggactccccaccagaagcctacagaacagccacagcaggcgaagaaactgggctacaagttcttagaaagtcttctgcagaaagacccttctgaggtggtcatcacacttgccacaagtttagggctgaaagagctcctttctcattcttccatgaaatctaacttccttgagctcatctgtcaggttcttcggaaggcttgtagctccaaaatggatcgccagagtgttctccatgtactgggcatattgaaaaactccaaatttctcaaagtctgcctgcctgcttatgtggtagggatgatcactgaacccatccctgacatccgaaaccagtatccagagcacataagcaacatcatctccctcctccaggaccttgtaagtgtcttccctgccagctctgtgcaggaaacttccatgctggtttccctcctgccaacctctcttaatgctctgagagcctctggtgttgacatagaagaggaaacggagaagaacctggaaaaggtacagactatcattgaacatctgcaggaaaagaggcgagagggcactttgagagtggatacctacactctagtgcagcctgaggcagaagaccatgttgagagctaccgaaccatgcccatttaccctacctacaatgaagtgcacttggatgagaggcccttccttcgccccaatatcatttctggaaaatacgacagcactgctatctatctggatacccacttccggctcctgcgagaagatttcgtcagacctttacgggaaggtattttggaacttctccaaagctttgaagaccagggcctgaggaagagaaagtttgatgacatccgaatctactttgacaccaggattatcacccccatgtgttcatcatcaggcatagtctacaaggtgcagtttgacacaaaaccactgaagtttgttcgctggcagaattccaaacgattgctctatgggtctttggtatgcatgtccaaggacaacttcgagacatttctttttgccaccgtatctaacagggagcaggaagatctctgccgaggaattgtccagctctgcttcaatgagcaaagccaacagctgctagcagaggtccagccctctgactctttcctcatggtagagacaactgcatactttgaggcctacaggcacgtcctggaaggactccaggaggtccaggaggaagatgttcccttccagaggaatatcgtggagtgtaactctcatgtgaaggagccaaggtacttgctaatggggggcagatatgactttacccccttaatagagaatccttcagccactggggaatttctaagaaatgtcgagggtttgagacatcccagaattaatgtcttagatcctggccagtggccctcaaaagaagccctgaagctggatgactcccagatggaagccttgcagtttgctctcacaagggaactggctattattcaaggacctcctggaacaggcaaaacctatgtgggtctaaaaattgttcaggccctcctaaccaacgagtctgtttggcaaattagcctccagaagttccccatcttggttgtgtgttatactaatcatgctttggaccagtttctggaaggcatctacaattgtcagaagaccagcattgtgcgggtgggtggaaggagcaacagtgaaatcctgaagcagttcaccctaagggagctgaggaacaagcgggaattccgccgcaacctccccatgcacctccgaagggcctacatgagtatcatgacacagatgaaggagtcagagcaagagcttcatgaaggagccaagaccctggagtgcaccatgcgtggtgtcctacgggaacagtacctgcagaagtacatctcaccccagcactgggaaagtctcatgaatggaccagtgcaggatagtgaatggatttgcttccagcactggaagcattccatgatgctggagtggctaggtcttggtgtcggttctttcacgcaaagtgtttctccagcaggacctgagaatacagcccaggcagaaggggatgaggaggaagaaggggaggaggagagttcgctgatagagatcgcagaggaagctgacctgattcaagcagaccgggtgattgaggaggaagaggtggtgaggccccagcggcggaagaaggaagagagtggagcagaccaggagttggctaaaatgcttctggccatgaggctagaccattgtggcactgggacagcagctggacaggagcaagccacaggagagtggcagcctgacagtaccctgcctggtattgatgtctgcagacccagcgcaaccagaaaaagaaaatgaaaaaaagagtgaaggatgagcttcgcaaactgaacaccatgactgcagccgaggccaacgagatcgaggatgtttggcacctggacctcagttctcgctggcagctttataggctctggctacagttgtaccaggctgacacccgccggaagatcctcagctatgaacgccagtaccgcacatcagcagaaagaatggccgagctgagactccaggaagacctgcacattcttaaagatgcccaggttgtaggaatgacaaccacaggtgctgccaaataccgccagatcctacagaaggtggagccgaggattgtcatagtggaagaagctgcggaagtccttgaggcccataccattgccacattgagcaaagcttgccagcacctcattttgattggggaccaccagcagctgcgccccagtgccaacgtgtatgatctggccaagaacttcaaccttgaggtgtccctttttgaacggctagtgaaagtaaacattccctttgtccgtctgaattaccagcaccgtatgtgccctgaaattgcccgccttttgaccccccacatttaccaggatctggagaatcatccatctgttcttaagtatgagaagattaagggggtgtcttccaaccttttctttgtagaacacaactttcctgaacaggaaatccaagagggcaaaagccatcagaaccagcatgaggctcactttgtggtagagctgtgcaagtacttcctgtgccaggaatacctgccttcccagatcaccatcctcactacctataccgggcagctcttctgcctgcgcaaactgatgcctgccaagacatttgctggcgtcagggtccatgttgtggacaaataccaaggggaagagaatgacatcatcctcctctcgctagtgcggagcaaccaagaaggcaaggtgggttttctgcagatatccaaccgcatctgtgtggccttgtcccgagccaagaagggaatgtactgcatcggaaacatgcagatgctggccaaggtgcccctgtggagcaagatcattcatacacttcgagagaacaatcaaataggccccatgctccggctctgctgccagaaccaccctgaaacccacaccttagtatccaaagcttctgacttccaaaaagtacccgaaggaggctgcagcctgccctgcgagttccgcctgggctgtgggcatgtctgcacccgtgcctgccacccttatgactcttcacacaaggagttccaatgcatgaagccatgccagaaggtcatctgtcaggaagggcaccggtgtccccttgtttgcttccaggagtgtcagccttgtcaggtgaaggtgcccaaaaccattcctcggtgcggccatgaacaaatggtcccttgttccgtgcctgagtcagatttctgctgccaggagccttgctccaagtctctgagatgtgggcacagatgcagccacccatgtggtgaggactgtgtgcagttgtgttcagaaatggtcaccataaaactcaagtgtgggcacagtcaaccggtaaaatgtggtcatgtggaaggcctcctgtatggtggtctgctagtcaagtgtaccacaaagtgtggcactatcttggactgcgggcatccttgcccaggctcctgccacagctgcttcgaagggcgtttccatgaacgctgtcagcagccctgcaagcgcctgcttatctgctcacacaagtgccaggaaccatgcattggtgagtgcccaccctgccagcggacctgtcagaaccgctgtgtccacagccagtgcaagaagaaatgtggggagctgtgtagtccctgcgtggaaccctgtgtctggcgctgccagcactaccagtgcaccaaactctgctctgagccctgcaaccgacccccatgctatgtgccttgtactaagctgctagtttgtggccacccctgcattggtctctgtggggagccatgccccaagaaatgccggatctgccacatggatgaggtcacccaaatattctttggctttgaggatgagcctgatgcccgctttgtgcagctggaagactgcagccacatctttgaggtgcaagccctagaccgctacatgaatgaacagaaggatgatgaagtcgccatcagattgaaagtctgccctatctgccaggtgcccatccgcaaaaacctgaggtatggaactagcataaaacagcggctagaagagattgaaatcatcaaggaaaagatccagggctcagcaggggaaatagcaaccagccaggaacggcttaaggccctgctggagaggaagagcctcctccaccagctgcttcctgaagacttcctgatgttaaaggagaagctggcccagaaaaatctgtcagtgaaggacctgggtctggttgagaattacatcagcttctatgaccacctggccagcctgtgggattccctgaaaaagatgcatgtcttagaagagaaaagagtgaggactcgactagaacaggtccatgagtggctggccaagaagcgcttgagcttcactagccaggaactaagtgacctccgaagtgaaatccagaggctcacatacctggtgaaccttctgacccgctacaagatagcagagaagaaggtgaaagatagcatagcagtagaggtctatagtgtccagaatatccttgagaaactgtagttaccagaggtgacaatgtgcggaagaggagttgaagcacttcgttgggcgggttaaggaacatttatgttgggtatagggctgggggagggcatataggagagggaccggg

SEQ ID NO: 311793 - DNA, 3559 bp, Homo sapiens
cgcccggctccgcccagggtctgcggggaacggaaaccgaaagtgcgcggcgccgggcggggccaccgacctgcctgggccgaagccccagcactcgccggcggcagtgaaaggacgcgccggagccgggtgagtggccccgcaactgcccctgcccctgattcttccttgcctcgccgcgaaccccggcgcccgcgccgacccgccactgcctctgcccttttccagataacagaaagtaacgtgaaggaattcaggtgactcagacatggaggagagaagacctcatctggatgccaggcccaggaattcccataccaaccacagaggccctgtggatggagagttaccaccaagagctagaaatcaggccaataacccaccagccaatgctctccgaggaggagccagccaccctggaaggcatcctagggccaacaaccatcctgctgcttactggcagagggaagagagatttagggccatgggcaggaacccacatcaaggaaggaggaaccaggaggggcatgccagcgacgaagctagagaccaaagacatgaccaggagaatgacaccaggtggagaaatggcaaccaggactgtaggaaccgcagaccaccatggtccaatgacaacttccagcagtggcggactccccaccagaagcctacagaacagccacagcaggcgaagaaactgggctacaagttcttagaaagtcttctgcagaaagacccttctgaggtggtcatcacacttgccacaagtttagggctgaaagagctcctttctcattcttccatgaaatctaacttccttgagctcatctgtcaggttcttcggaaggcttgtagctccaaaatggatcgccagagtgttctccatgtactgggcatattgaaaaactccaaatttctcaaagtctgcctgcctgcttatgtggtagggatgatcactgaacccatccctgacatccgaaaccagtatccagagcacataagcaacatcatctccctcctccaggaccttgtaagtgtcttccctgccagctctgtgcaggaaacttccatgctggtttccctcctgccaacctctcttaatgctctgagagcctctggtgttgacatagaagaggaaacggagaagaacctggaaaaggtacagactatcattgaacatctgcaggaaaagaggcgagagggcactttgagagtggatacctacactctagtgcagcctgaggcagaagaccatgttgagagctaccgaaccatgcccatttaccctacctacaatgaagtgcacttggatgagaggcccttccttcgccccaatatcatttctggaaaatacgacagcactgctatctatctggatacccacttccggctcctgcgagaagatttcgtcagacctttacgggaaggtattttggaacttctccaaagctttgaagaccagggcctgaggaagagaaagtttgatgacatccgaatctactttgacaccaggattatcacccccatgtgttcatcatcaggcatagtctacaaggtgcagtttgacacaaaaccactgaagtttgttcgctggcagaattccaaacgattgctctatgggtctttggtatgcatgtccaaggacaacttcgagacatttctttttgccaccgtatctaacagggagcaggaagatctctgccgaggaattgtccagctctgcttcaatgagcaaagccaacagctgctagcagaggtccagccctctgactctttcctcatggtagagacaactgcatactttgaggcctacaggcacgtcctggaaggactccaggaggtccaggaggaagatgttcccttccagaggaatatcgtggagtgtaactctcatgtgaaggagccaaggtacttgctaatggggggcagatatgactttacccccttaatagagaatccttcagccactggggaatttctaagaaatgtcgagggtttgagacatcccagaattaatgtcttagatcctggccagtggccctcaaaagaagccctgaagctggatgactcccagatggaagccttgcagtttgctctcacaagggaactggctattattcaaggacctcctggaacaggcaaaacctatgtgggtctaaaaattgttcaggccctcctaaccaacgagtctgtttggcaaattagcctccagaagttccccatcttggttgtgtgttatactaatcatgctttggaccagtttctggaaggcatctacaattgtcagaagaccagcattgtgcgggtgggtggaaggagcaacagtgaaatcctgaagcagttcaccctaagggagctgaggaacaagcgggaattccgccgcaacctccccatgcacctccgaagggcctacatgagtatcatgacacagatgaaggagtcagagcaagagcttcatgaaggagccaagaccctggagtgcaccatgcgtggtgtcctacgggaacagtacctgcagaagtacatctcaccccagcactgggaaagtctcatgaatggaccagtgcaggatagtgaatggatttgcttccagcactggaagcattccatgatgctggagtggctaggtcttggtgtcggttctttcacgcaaagtgtttctccagcaggacctgagaatacagcccaggcagaaggggatgaggaggaagaaggggaggaggagagttcgctgatagagatcgcagaggaagctgacctgattcaagcagaccgggtgattgaggaggaagaggtggtgaggccccagcggcggaagaaggaagagagtggagcagaccaggagttggctaaaatgcttctggccatgaggctagaccattgtggcactgggacagcagctggacaggagcaagccacaggagagtggcagcctgacagtaccctgcctggtattgatgtctgcagacccagcgcaaccagaaaaagaaaatgaaaaaaagagtgaaggatgagcttcgcaaactgaacaccatgactgcagccgaggccaacgagatcgaggatgtttggcacctggacctcagttctcgctggcagctttataggtactgtgttccacatctagccaacccatgtagggagttcctcttctgttcctagaacattctccacctccaagaccttcaacgatgttaactaattattgattgagcaccaccactgagctgagtgatagggatacagccatgggatagaatagacactttgctctactttcatggagcttatagagtctatccagggtaacaaattaattattaccttcgtggagcctatggagtctatccagggtaacaaattaatcacgtaattccacaaataaaaagttacaaatgggtataaaaactcagaaagaaaagaacagagaggtaacaggcacaatgactcacacctgtaatctcaccactttgggaggctgaggctagaggatctcttgaggcccagggttcaagaccagcctgggcaacatagtgagacctcatctctacaggaaaaa

SEQ ID NO: 311794 - DNA, 2712 bp, Homo sapiens
  misc_feature (1421)..(1421): n is a, c, g, or t
gaaaaatagagatgagggctcactatgttgccaggctggtcttgaaatcctgacctgaagtgatcctcctgccttggcttcccaaagtgatgggattacagatacaagccatcacaactggccctccctaaattttctaacagcaaccttatctttaaagaaattgtccgtgtgtgctctgcccatgtttctaatgacatgcatgtgttttttcagcaccgtatgtgccctgaaattgcccgccttttgaccccccacatttaccaggatctggagaatcatccatctgttcttaagtatgagaagattaaggtgagtctgtcttacccgatctttcttggatggtgtcagcaacctaaaaaggctataatttcctcaagataaaaaagcttttcagcggccaggcgcggtggctcacacctgtaatcccagcactttgggaagctgaggtgggcagatcacttgaggtcagagttcgagaccagcctaactaacatggtgaaaccctgtctctactaaaatacaaaaactagctgagcatggtggcaagcacctgtaatcccagctactcagaaggctgaggtgggagaattgcttgaacccaggaggtggaggttgcagtgagctgagatcgtgccatgctactgcactccaggctgggcagcggagagagactccctgtcaaaaaaaaaaagaaagccttcagaagggagtagagccagctttttaaaagctggttactgggagaaaattgaaatacagaccagggttttttaatcccaattctgcctgttagccatgtaaccttaagcaagttatataagaattctggccaggcgcggtggcttacgcctgtaatcccagagctttgtgaggccgaggcgggcgaatcacaaggtcaagggatcaagaccatcctggccaacatggtgaaatcccatctctactaaaaatacaaaaattagctgggtgcggtggcatgtgcctggctgggtgtggtggctcatgcctataatctcagcactttcggaggccaagatgggtggatcacctgaggtcaggagttggagactagcctggccaacatggtgaaaccccgtctctactaaaaatacaaaaattaactgggcatggtggtgggcgcctgtaatcccagctacttgggaggctgaggcgagaggatcgcttgaacctgggaagtggaggttgtggtgagccaacaagaccgtgccactgtacttcagcctacgcaacaagagtgaactctgtctcaaaaaaaaaaaattgtcagctgaggccaagagttcaaaaccaggctggggcacatagcaagactgtctctttttttaaaataaataaataaattctgagtatcaggttcttctggacaataagaataatggctcctgccatatccttcntttgttttttattatcatcctttttaggctgggcgcagtggcttacgcctgtaatcccagcactttgggaggccgaggcaggcggatcacgaggtcaggagttcgagaccagcctgaccaacatggcgaaaccccgtctctactaaaaatacaaaaattagctgggcgttatggcgggcgcctgtaatcccagctacttgggaggctgaggcagaagaatcgcttaaacccaggaggcggaggttgcagtgagctgagatcatgccattgcactccagtctgggcgacaggagcaagactctgtctcaaaaaaaaaaaatcattctttttagtcttagcacctacttaaggatccacttttagggctcacccacatttgtttctagatttacccctgcgctagagtaagcactttatctccagaactgagagcaaagttaacaaatctcaccccttctctcctgcaaattagtggacagactccctggaacatgtttggggcttccacctagggccacctagtggtatctctgggtctttacttggtcagatgtttattctacattgttccccaggaacagagtatgagctcattgatgcagaccgattctaattgccaggccctaatttgcagactaactctcataataaacagaggcccatagttgtttatgaactgcttatcccttaaaggagcacaagaacccctccctgccctccttgggcaccctgcctccaggagatggaggcacgtgataagacaaaagactgcaccaactcaccctgacacagttacatagtcactgagagtggggaagatgggacagcccacatgctgcataagatgggccttatgcagcaggcccaggtcgtcattaaggagtgacccctttcctgtaacctgcactttgggatggtagaagtttctttacctgctgacaggtttggtggcactgctggttacccctgggccctgaatggagctaaaatcacatttggtaccagcagcacctatcccaagtgtgatccttcatcccaacactccctcttggagctgttccctgggtagagctagcatgccagcagcttctgcaggctccaaacccaggccagaagccagacccaggcctgctgcctgcatctgcattccctccttccagtgttccttagaacagacatttaggtatctcaggtcctttctaagtgtccctttcctatgtatgcatttcctttttttgtctttactatgcactttagcttataaagccaattaaaaacgatgattgagaaa

SEQ ID NO: 311795 - DNA, 1396 bp, Homo sapiens
cgcccggctccgcccagggtctgcggggaacggaaaccgaaagtgcgcggcgccgggcggggccaccgacctgcctgggccgaagccccagcactcgccggcggcagtgaaaggacgcgccggagccgggtgagtggccccgcaactgcccctgcccctgattcttccttgcctcgccgcgaaccccggcgcccgcgccgacccgccactgcctctgcccttttccagataacagaaagtaacgtgaaggaattcaggtgactcagacatggaggagagaagacctcatctggatgccaggcccaggaattcccataccaaccacagaggccctgtggatggagagttaccaccaagactgagatcatgccattgcactccagtctgggcgacaggagcaagactctgtctcaaaaaaaaaaaatcattctttttagtcttagcacctacttaaggatccacttttagggctcacccacatttgtttctagatttacccctgcgctagagtaagcactttatctccagaactgagagcaaagttaacaaatctcaccccttctctcctgcaaattagtggacagactccctggaacatgtttggggcttccacctagggccacctagtggtatctctgggtctttacttggtcagatgtttattctacattgttccccaggaacagagtatgagctcattgatgcagaccgattctaattgccaggccctaatttgcagactaactctcataataaacagaggcccatagttgtttatgaactgcttatcccttaaaggagcacaagaacccctccctgccctccttgggcaccctgcctccaggagatggaggcacgtgataagacaaaagactgcaccaactcaccctgacacagttacatagtcactgagagtggggaagatgggacagcccacatgctgcataagatgggccttatgcagcaggcccaggtcgtcattaaggagtgacccctttcctgtaacctgcactttgggatggtagaagtttctttacctgctgacaggtttggtggcactgctggttacccctgggccctgaatggagctaaaatcacatttggtaccagcagcacctatcccaagtgtgatccttcatcccaacactccctcttggagctgttccctgggtagagctagcatgccagcagcttctgcaggctccaaacccaggccagaagccagacccaggcctgctgcctgcatctgcattccctccttccagtgttccttagaacagacatttaggtatctcaggtcctttctaagtgtccctttcctatgtatgcatttcctttttttgtctttactatgcactttagcttataaagccaattaaaaacgatgattgagaaa

SEQ ID NO: 311796 - DNA, 440 bp, Homo sapiens
taccacccccatgactttcatggcatgcattttaggaacaagaaacaggctatggtcaaagatgtttaatgataactagtgctagtactagtataaatgctttccacgtatttactcctgacaagccaacaatcctataaagagataccattattattcccattttatagaaggtgatactgagggacacagaggttaggtcatttaccttactaggtcccacaacctagtaagaggtagagtagggctttgaagccaggcaaactggctccagagtccttgtttagccactctacagtggaagagctgttgggagaatgtaagacacttgacattaatcagtgatgccagccctttttcttacgtgctgtgacccctgccttgggcttaaaaccaagcctgcctcctgacagtaccctgcctggtattgatgtctgcag

SEQ ID NO: 311797 - DNA, 251 bp, Homo sapiens
gtaagacaaaattttttagagtacataagatctgctttgtaagataagcaagggacggagccttcactctaggtttctagaatgtcttcttatttacttattttattttccaacttttattttaggtttaggggtacatgtgcaggtttgttacatgtgtaaattgccatgttgcagaggtttggtgtacagattattttgtcatccaggtaatgagcatagtacctgataggtagttttttgttgtcgtc

SEQ ID NO: 311798 - DNA, 496 bp, Homo sapiens
gaaagagacataatcttttattttcataacttgctgtggccccaaaatgaagcacacaatgactaactaaagaactaaagatagtgatgttgagtggacaaaaagctttccaaggtctctctctggagcagagtaagtggccagtgcatgtcaagagaggaagaaaaaaacaagtgccatgagtgaaccttttaacatgtcacttcttttccctgtcagggggtgtcttccaaccttttctttgtagaacacaactttcctgaacaggaaatccaagagggcaaaagccatcagaaccagcatgaggctcactttgtggtagagctgtgcaagtacttcctgtgccaggaatacctgccttcccagatcaccatcctcactacctataccgggcagctcttctgcctgcgcaaactgatgcctgccaagacatttgctggcgtcagggtccatgttgtggacaaataccaaggggaagagaatgacatcatcctcc

SEQ ID NO: 311799 - DNA, 464 bp, Homo sapiens
  misc_feature (20)..(20): n is a, c, g, or t
ttgaagtcagtctggccaancttgccagatccacaaatatcgcgatatttgtggtggccatgaggctagaccattgtggcactgggacagcagctggacaggagcaagccacaggagagtggcagacccagcgcaaccagaaaaagaaaatgaaaaaaagagtgaaggatgagcttcgcaaactgaacaccatgactgcagccgaggccaacgagatcgaggatgtttggcacctggacctcagttctcgctggcagctttataggctctggctacagttgtaccaggctgacacccgccggaagatcctcagctatgaacgccagtaccgcacatcagcagaaagaatggccgagctgagactccaggaagacctgcacattcttaaagatgcccaggttgtaggaatgacaaccacaggtgctgccaaataccgccagaaccacaaatatcggggtgcgagc

SEQ ID NO: 311800 - DNA, 7425 bp, Homo sapiens
cgcccggctccgcccagggtctgcggggaacggaaaccgaaagtgcgcggcgccgggcggggccaccgacctgcctgggccgaagccccagcactcgccggcggcagtgaaaggacgcgccggagccgggtgagtggccccgcaactgcccctgcccctgattcttccttgcctcgccgcgaaccccggcgcccgcgccgacccgccactgcctctgcccttttccagataacagaaagtaacgtgaaggaattcaggtgactcagacatggaggagagaagacctcatctggatgccaggcccaggaattcccataccaaccacagaggccctgtggatggagagttaccaccaagagctagaaatcaggccaataacccaccagccaatgctctccgaggaggagccagccaccctggaaggcatcctagggccaacaaccatcctgctgcttactggcagagggaagagagatttagggccatgggcaggaacccacatcaaggaaggaggaaccaggaggggcatgccagcgacgaagctagagaccaaagacatgaccaggagaatgacaccaggtggagaaatggcaaccaggactgtaggaaccgcagaccaccatggtccaatgacaacttccagcagtggcggactccccaccagaagcctacagaacagccacagcaggcgaagaaactgggctacaagttcttagaaagtcttctgcagaaagacccttctgaggtggtcatcacacttgccacaagtttagggctgaaagagctcctttctcattcttccatgaaatctaacttccttgagctcatctgtcaggttcttcggaaggcttgtagctccaaaatggatcgccagagtgttctccatgtactgggcatattgaaaaactccaaatttctcaaagtctgcctgcctgcttatgtggtagggatgatcactgaacccatccctgacatccgaaaccagtatccagagcacataagcaacatcatctccctcctccaggaccttgtaagtgtcttccctgccagctctgtgcaggaaacttccatgctggtttccctcctgccaacctctcttaatgctctgagagcctctggtgttgacatagaagaggaaacggagaagaacctggaaaaggtacagactatcattgaacatctgcaggaaaagaggcgagagggcactttgagagtggatacctacactctagtgcagcctgaggcagaagaccatgttgagagctaccgaaccatgcccatttaccctacctacaatgaagtgcacttggatgagaggcccttccttcgccccaatatcatttctggaaaatacgacagcactgctatctatctggatacccacttccggctcctgcgagaagatttcgtcagacctttacgggaaggtattttggaacttctccaaagctttgaagaccagggcctgaggaagagaaagtttgatgacatccgaatctactttgacaccaggattatcacccccatgtgttcatcatcaggcatagtctacaaggtgcagtttgacacaaaaccactgaagtttgttcgctggcagaattccaaacgattgctctatgggtctttggtatgcatgtccaaggacaacttcgagacatttctttttgccaccgtatctaacagggagcaggaagatctctgccgaggaattgtccagctctgcttcaatgagcaaagccaacagctgctagcagaggtccagccctctgactctttcctcatggtagagacaactgcatactttgaggcctacaggcacgtcctggaaggactccaggaggtccaggaggaagatgttcccttccagaggaatatcgtggagtgtaactctcatgtgaaggagccaaggtacttgctaatggggggcagatatgactttacccccttaatagagaatccttcagccactggggaatttctaagaaatgtcgagggtttgagacatcccagaattaatgtcttagatcctggccagtggccctcaaaagaagccctgaagctggatgactcccagatggaagccttgcagtttgctctcacaagggaactggctattattcaaggacctcctggaacaggcaaaacctatgtgggtctaaaaattgttcaggccctcctaaccaacgagtctgtttggcaaattagcctccagaagttccccatcttggttgtgtgttatactaatcatgctttggaccagtttctggaaggcatctacaattgtcagaagaccagcattgtgcgggtgggtggaaggagcaacagtgaaatcctgaagcagttcaccctaagggagctgaggaacaagcgggaattccgccgcaacctccccatgcacctccgaagggcctacatgagtatcatgacacagatgaaggagtcagagcaagagcttcatgaaggagccaagaccctggagtgcaccatgcgtggtgtcctacgggaacagtacctgcagaagtacatctcaccccagcactgggaaagtctcatgaatggaccagtgcaggatagtgaatggatttgcttccagcactggaagcattccatgatgctggagtggctaggtcttggtgtcggttctttcacgcaaagtgtttctccagcaggacctgagaatacagcccaggcagaaggggatgaggaggaagaaggggaggaggagagttcgctgatagagatcgcagaggaagctgacctgattcaagcagaccgggtgattgaggaggaagaggtggtgaggccccagcggcggaagaaggaagagagtggagcagaccaggagttggctaaaatgcttctggccatgaggctagaccattgtggcactgggacagcagctggacaggagcaagccacaggagagtggcagcctgacagtaccctgcctggtattgatgtctgcagacccagcgcaaccagaaaaagaaaatgaaaaaaagagtgaaggatgagcttcgcaaactgaacaccatgactgcagccgaggccaacgagatcgaggatgtttggcacctggacctcagttctcgctggcagctttataggctctggctacagttgtaccaggctgacacccgccggaagatcctcagctatgaacgccagtaccgcacatcagcagaaagaatggccgagctgagactccaggaagacctgcacattcttaaagatgcccaggttgtaggaatgacaaccacaggtgctgccaaataccgccagatcctacagaaggtggagccgaggattgtcatagtggaagaagctgcggaagtccttgaggcccataccattgccacattgagcaaagcttgccagcacctcattttgattggggaccaccagcagctgcgccccagtgccaacgtgtatgatctggccaagaacttcaaccttgaggtgtccctttttgaacggctagtgaaagtaaacattccctttgtccgtctgaattaccagcaccgtatgtgccctgaaattgcccgccttttgaccccccacatttaccaggatctggagaatcatccatctgttcttaagtatgagaagattaagggggtgtcttccaaccttttctttgtagaacacaactttcctgaacaggaaatccaagagggcaaaagccatcagaaccagcatgaggctcactttgtggtagagctgtgcaagtacttcctgtgccaggaatacctgccttcccagatcaccatcctcactacctataccgggcagctcttctgcctgcgcaaactgatgcctgccaagacatttgctggcgtcagggtccatgttgtggacaaataccaaggggaagagaatgacatcatcctcctctcgctagtgcggagcaaccaagaaggcaaggtgggttttctgcagatatccaaccgcatctgtgtggccttgtcccgagccaagaagggaatgtactgcatcggaaacatgcagatgctggccaaggtgcccctgtggagcaagatcattcatacacttcgagagaacaatcaaataggccccatgctccggctctgctgccagaaccaccctgaaacccacaccttagtatccaaagcttctgacttccaaaaagtacccgaaggaggctgcagcctgccctgcgagttccgcctgggctgtgggcatgtctgcacccgtgcctgccacccttatgactcttcacacaaggagttccaatgcatgaagccatgccagaaggtcatctgtcaggaagggcaccggtgtccccttgtttgcttccaggagtgtcagccttgtcaggtgaaggtgcccaaaaccattcctcggtgcggccatgaacaaatggtcccttgttccgtgcctgagtcagatttctgctgccaggagccttgctccaagtctctgagatgtgggcacagatgcagccacccatgtggtgaggactgtgtgcagttgtgttcagaaatggtcaccataaaactcaagtgtgggcacagtcaaccggtaaaatgtggtcatgtggaaggcctcctgtatggtggtctgctagtcaagtgtaccacaaagtgtggcactatcttggactgcgggcatccttgcccaggctcctgccacagctgcttcgaagggcgtttccatgaacgctgtcagcagccctgcaagcgcctgcttatctgctcacacaagtgccaggaaccatgcattggtgagtgcccaccctgccagcggacctgtcagaaccgctgtgtccacagccagtgcaagaagaaatgtggggagctgtgtagtccctgcgtggaaccctgtgtctggcgctgccagcactaccagtgcaccaaactctgctctgagccctgcaaccgacccccatgctatgtgccttgtactaagctgctagtttgtggccacccctgcattggtctctgtggggagccatgccccaagaaatgccggatctgccacatggatgaggtcacccaaatattctttggctttgaggatgagcctgatgcccgctttgtgcagctggaagactgcagccacatctttgaggtgcaagccctagaccgctacatgaatgaacagaaggatgatgaagtcgccatcagattgaaagtctgccctatctgccaggtgcccatccgcaaaaacctgaggtatggaactagcataaaacagcggctagaagagattgaaatcatcaaggaaaagatccagggctcagcaggggaaatagcaaccagccaggaacggcttaaggccctgctggagaggaagagcctcctccaccagctgcttcctgaagacttcctgatgttaaaggagaagctggcccagaaaaatctgtcagtgaaggacctgggtctggttgagaattacatcagcttctatgaccacctggccagcctgtgggattccctgaaaaagatgcatgtcttagaagagaaaagagtgaggactcgactagaacaggtccatgagtggctggccaagaagcgcttgagcttcactagccaggaactaagtgacctccgaagtgaaatccagaggctcacatacctggtgaaccttctgacccgctacaagatagcagagaagaaggtgaaagatagcatagcagtagaggtctatagtgtccagaatatccttgagaaaacatgtaagttcacccaagaggatgaacaacttgtgcaggaaaagatggaagctctgaaagccacccttccctgctctggcctgggcatctcagaggaagagcgagtgcagattgtcagtgccataggttatcctcgtggtcactggttcaagtgccgcaatggccatatctatgtgattggcgattgtgggggagccatggagaggggcacgtgtcctgactgtaaggaagtgattggtggcacaaatcatactctggaaagaagcaaccagcttgcttctgaaatggatggagcccagcatgctgcctggtctgacacggccaacaacctgatgaactttgaggagatccaggggatgatgtaggaagatggtacaccactgccttttgccctcgccactgaatgactggggccagctccctaatgaaggaactgaagtttgttttttattatcatcctttttaggctgggcgcagtggcttacgcctgtaatcccagcactttgggaggccgaggcaggcggatcacgaggtcaggagttcgagaccagcctgaccaacatggcgaaaccccgtctctactaaaaatacaaaaattagctgggcgttatggcgggcgcctgtaatcccagctacttgggaggctgaggcagaagaatcgcttaaacccaggaggcggaggttgcagtgagctgagatcatgccattgcactccagtctgggcgacaggagcaagactctgtctcaaaaaaaaaaaatcattctttttagtcttagcacctacttaaggatccacttttagggctcacccacatttgtttctagatttacccctgcgctagagtaagcactttatctccagaactgagagcaaagttaacaaatctcaccccttctctcctgcaaattagtggacagactccctggaacatgtttggggcttccacctagggccacctagtggtatctctgggtctttacttggtcagatgtttattctacattgttccccaggaacagagtatgagctcattgatgcagaccgattctaattgccaggccctaatttgcagactaactctcataataaacagaggcccatagttgtttatgaactgcttatcccttaaaggagcacaagaacccctccctgccctccttgggcaccctgcctccaggagatggaggcacgtgataagacaaaagactgcaccaactcaccctgacacagttacatagtcactgagagtggggaagatgggacagcccacatgctgcataagatgggccttatgcagcaggcccaggtcgtcattaaggagtgacccctttcctgtaacctgcactttgggatggtagaagtttctttacctgctgacaggtttggtggcactgctggttacccctgggccctgaatggagctaaaatcacatttggtaccagcagcacctatcccaagtgtgatccttcatcccaacactccctcttggagctgttccctgggtagagctagcatgccagcagcttctgcaggctccaaacccaggccagaagccagacccaggcctgctgcctgcatctgcattccctccttccagtgttccttagaacagacatttaggtatctcaggtcctttctaagtgtccctttcctatgtatgcatttcctttttttgtctttactatgcactttagcttataaagccaattaaaaacgatgattgagaaa

SEQ ID NO: 311801 - DNA, 7184 bp, Homo sapiens
cgcccggctccgcccagggtctgcggggaacggaaaccgaaagtgcgcggcgccgggcggggccaccgacctgcctgggccgaagccccagcactcgccggcggcagtgaaaggacgcgccggagccggttttccagataacagaaagtaacgtgaaggaattcaggtgactcagacatggaggagagaagacctcatctggatgccaggcccaggaattcccataccaaccacagaggccctgtggatggagagttaccaccaagagctagaaatcaggccaataacccaccagccaatgctctccgaggaggagccagccaccctggaaggcatcctagggccaacaaccatcctgctgcttactggcagagggaagagagatttagggccatgggcaggaacccacatcaaggaaggaggaaccaggaggggcatgccagcgacgaagctagagaccaaagacatgaccaggagaatgacaccaggtggagaaatggcaaccaggactgtaggaaccgcagaccaccatggtccaatgacaacttccagcagtggcggactccccaccagaagcctacagaacagccacagcaggcgaagaaactgggctacaagttcttagaaagtcttctgcagaaagacccttctgaggtggtcatcacacttgccacaagtttagggctgaaagagctcctttctcattcttccatgaaatctaacttccttgagctcatctgtcaggttcttcggaaggcttgtagctccaaaatggatcgccagagtgttctccatgtactgggcatattgaaaaactccaaatttctcaaagtctgcctgcctgcttatgtggtagggatgatcactgaacccatccctgacatccgaaaccagtatccagagcacataagcaacatcatctccctcctccaggaccttgtaagtgtcttccctgccagctctgtgcaggaaacttccatgctggtttccctcctgccaacctctcttaatgctctgagagcctctggtgttgacatagaagaggaaacggagaagaacctggaaaaggtacagactatcattgaacatctgcaggaaaagaggcgagagggcactttgagagtggatacctacactctagtgcagcctgaggcagaagaccatgttgagagctaccgaaccatgcccatttaccctacctacaatgaagtgcacttggatgagaggcccttccttcgccccaatatcatttctggaaaatacgacagcactgctatctatctggatacccacttccggctcctgcgagaagatttcgtcagacctttacgggaaggtattttggaacttctccaaagctttgaagaccagggcctgaggaagagaaagtttgatgacatccgaatctactttgacaccaggattatcacccccatgtgttcatcatcaggcatagtctacaaggtgcagtttgacacaaaaccactgaagtttgttcgctggcagaattccaaacgattgctctatgggtctttggtatgcatgtccaaggacaacttcgagacatttctttttgccaccgtatctaacagggagcaggaagatctctgccgaggaattgtccagctctgcttcaatgagcaaagccaacagctgctagcagaggtccagccctctgactctttcctcatggtagagacaactgcatactttgaggcctacaggcacgtcctggaaggactccaggaggtccaggaggaagatgttcccttccagaggaatatcgtggagtgtaactctcatgtgaaggagccaaggtacttgctaatggggggcagatatgactttacccccttaatagagaatccttcagccactggggaatttctaagaaatgtcgagggtttgagacatcccagaattaatgtcttagatcctggccagtggccctcaaaagaagccctgaagctggatgactcccagatggaagccttgcagtttgctctcacaagggaactggctattattcaaggacctcctggaacaggcaaaacctatgtgggtctaaaaattgttcaggccctcctaaccaacgagtctgtttggcaaattagcctccagaagttccccatcttggttgtgtgttatactaatcatgctttggaccagtttctggaaggcatctacaattgtcagaagaccagcattgtgcgggtgggtggaaggagcaacagtgaaatcctgaagcagttcaccctaagggagctgaggaacaagcgggaattccgccgcaacctccccatgcacctccgaagggcctacatgagtatcatgacacagatgaaggagtcagagcaagagcttcatgaaggagccaagaccctggagtgcaccatgcgtggtgtcctacgggaacagtacctgcagaagtacatctcaccccagcactgggaaagtctcatgaatggaccagtgcagcccaggcagaaggggatgaggaggaagaaggggaggaggagagttcgctgatagagatcgcagaggaagctgacctgattcaagcagaccgggtgattgaggaggaagaggtggtgaggccccagcggcggaagaaggaagagagtggagcagaccaggagttggctaaaatgcttctggccatgaggctagaccattgtggcactgggacagcagctggacaggagcaagccacaggagagtggcagacccagcgcaaccagaaaaagaaaatgaaaaaaagagtgaaggatgagcttcgcaaactgaacaccatgactgcagccgaggccaacgagatcgaggatgtttggcacctggacctcagttctcgctggcagctttataggctctggctacagttgtaccaggctgacacccgccggaagatcctcagctatgaacgccagtaccgcacatcagcagaaagaatggccgagctgagactccaggaagacctgcacattcttaaagatgcccaggttgtaggaatgacaaccacaggtgctgccaaataccgccagatcctacagaaggtggagccgaggattgtcatagtggaagaagctgcggaagtccttgaggcccataccattgccacattgagcaaagcttgccagcacctcattttgattggggaccaccagcagctgcgccccagtgccaacgtgtatgatctggccaagaacttcaaccttgaggtgtccctttttgaacggctagtgaaagtaaacattccctttgtccgtctgaattaccagcaccgtatgtgccctgaaattgcccgccttttgaccccccacatttaccaggatctggagaatcatccatctgttcttaagtatgagaagattaagggggtgtcttccaaccttttctttgtagaacacaactttcctgaacaggaaatccaagagggcaaaagccatcagaaccagcatgaggctcactttgtggtagagctgtgcaagtacttcctgtgccaggaatacctgccttcccagatcaccatcctcactacctataccgggcagctcttctgcctgcgcaaactgatgcctgccaagacatttgctggcgtcagggtccatgttgtggacaaataccaaggggaagagaatgacatcatcctcctctcgctagtgcggagcaaccaagaaggcaaggtgggttttctgcagatatccaaccgcatctgtgtggccttgtcccgagccaagaagggaatgtactgcatcggaaacatgcagatgctggccaaggtgcccctgtggagcaagatcattcatacacttcgagagaacaatcaaataggccccatgctccggctctgctgccagaaccaccctgaaacccacaccttagtatccaaagcttctgacttccaaaaagtacccgaaggaggctgcagcctgccctgcgagttccgcctgggctgtgggcatgtctgcacccgtgcctgccacccttatgactcttcacacaaggagttccaatgcatgaagccatgccagaaggtcatctgtcaggaagggcaccggtgtccccttgtttgcttccaggagtgtcagccttgtcaggtgaaggtgcccaaaaccattcctcggtgcggccatgaacaaatggtcccttgttccgtgcctgagtcagatttctgctgccaggagccttgctccaagtctctgagatgtgggcacagatgcagccacccatgtggtgaggactgtgtgcagttgtgttcagaaatggtcaccataaaactcaagtgtgggcacagtcaaccggtaaaatgtggtcatgtggaaggcctcctgtatggtggtctgctagtcaagtgtaccacaaagtgtggcactatcttggactgcgggcatccttgcccaggctcctgccacagctgcttcgaagggcgtttccatgaacgctgtcagcagccctgcaagcgcctgcttatctgctcacacaagtgccaggaaccatgcattggtgagtgcccaccctgccagcggacctgtcagaaccgctgtgtccacagccagtgcaagaagaaatgtggggagctgtgtagtccctgcgtggaaccctgtgtctggcgctgccagcactaccagtgcaccaaactctgctctgagccctgcaaccgacccccatgctatgtgccttgtactaagctgctagtttgtggccacccctgcattggtctctgtggggagccatgccccaagaaatgccggatctgccacatggatgaggtcacccaaatattctttggctttgaggatgagcctgatgcccgctttgtgcagctggaagactgcagccacatctttgaggtgcaagccctagaccgctacatgaatgaacagaaggatgatgaagtcgccatcagattgaaagtctgccctatctgccaggtgcccatccgcaaaaacctgaggtatggaactagcataaaacagcggctagaagagattgaaatcatcaaggaaaagatccagggctcagcaggggaaatagcaaccagccaggaacggcttaaggccctgctggagaggaagagcctcctccaccagctgcttcctgaagacttcctgatgttaaaggagaagctggcccagaaaaatctgtcagtgaaggacctgggtctggttgagaattacatcagcttctatgaccacctggccagcctgtgggattccctgaaaaagatgcatgtcttagaagagaaaagagtgaggactcgactagaacaggtccatgagtggctggccaagaagcgcttgagcttcactagccaggaactaagtgacctccgaagtgaaatccagaggctcacatacctggtgaaccttctgacccgctacaagatagcagagaagaaggtgaaagatagcatagcagtagaggtctatagtgtccagaatatccttgagaaaacatgtaagttcacccaagaggatgaacaacttgtgcaggaaaagatggaagctctgaaagccacccttccctgctctggcctgggcatctcagaggaagagcgagtgcagattgtcagtgccataggttatcctcgtggtcactggttcaagtgccgcaatggccatatctatgtgattggcgattgtgggggagccatggagaggggcacgtgtcctgactgtaaggaagtgattggtggcacaaatcatactctggaaagaagcaaccagcttgcttctgaaatggatggagcccagcatgctgcctggtctgacacggccaacaacctgatgaactttgaggagatccaggggatgatgtaggaagatggtacaccactgccttttgccctcgccactgaatgactggggccagctccctaatgaaggaactgaagtttgttttttattatcatcctttttaggctgggcgcagtggcttacgcctgtaatcccagcactttgggaggccgaggcaggcggatcacgaggtcaggagttcgagaccagcctgaccaacatggcgaaaccccgtctctactaaaaatacaaaaattagctgggcgttatggcgggcgcctgtaatcccagctacttgggaggctgaggcagaagaatcgcttaaacccaggaggcggaggttgcagtgagctgagatcatgccattgcactccagtctgggcgacaggagcaagactctgtctcaaaaaaaaaaaatcattctttttagtcttagcacctacttaaggatccacttttagggctcacccacatttgtttctagatttacccctgcgctagagtaagcactttatctccagaactgagagcaaagttaacaaatctcaccccttctctcctgcaaattagtggacagactccctggaacatgtttggggcttccacctagggccacctagtggtatctctgggtctttacttggtcagatgtttattctacattgttccccaggaacagagtatgagctcattgatgcagaccgattctaattgccaggccctaatttgcagactaactctcataataaacagaggcccatagttgtttatgaactgcttatcccttaaaggagcacaagaacccctccctgccctccttgggcaccctgcctccaggagatggaggcacgtgataagacaaaagactgcaccaactcaccctgacacagttacatagtcactgagagtggggaagatgggacagcccacatgctgcataagatgggccttatgcagcaggcccaggtcgtcattaaggagtgacccctttcctgtaacctgcactttgggatggtagaagtttctttacctgctgacaggtttggtggcactgctggttacccctgggccctgaatggagctaaaatcacatttggtaccagcagcacctatcccaagtgtgatccttcatcccaacactccctcttggagctgttccctgggtagagctagcatgccagcagcttctgcaggctccaaacccaggccagaagccagacccaggcctgctgcctgcatctgcattccctccttccagtgttccttagaacagacatttaggtatctcaggtcctttctaagtgtccctttcctatgtatgcatttcctttttttgtctttactatgcactttagcttataaagccaattaaaaacgatgattgagaaa

SEQ ID NO: 311802 - DNA, 7680 bp, Homo sapiens
cgcccggctccgcccagggtctgcggggaacggaaaccgaaagtgcgcggcgccgggcggggccaccgacctgcctgggccgaagccccagcactcgccggcggcagtgaaaggacgcgccggagccgggtgagtggccccgcaactgcccctgcccctgattcttccttgcctcgccgcgaaccccggcgcccgcgccgacccgccactgcctctgcccttttccagataacagaaagtaacgtgaaggaattcaggtgactcagacatggaggagagaagacctcatctggatgccaggcccaggaattcccataccaaccacagaggccctgtggatggagagttaccaccaagagctagaaatcaggccaataacccaccagccaatgctctccgaggaggagccagccaccctggaaggcatcctagggccaacaaccatcctgctgcttactggcagagggaagagagatttagggccatgggcaggaacccacatcaaggaaggaggaaccaggaggggcatgccagcgacgaagctagagaccaaagacatgaccaggagaatgacaccaggtggagaaatggcaaccaggactgtaggaaccgcagaccaccatggtccaatgacaacttccagcagtggcggactccccaccagaagcctacagaacagccacagcaggcgaagaaactgggctacaagttcttagaaagtcttctgcagaaagacccttctgaggtggtcatcacacttgccacaagtttagggctgaaagagctcctttctcattcttccatgaaatctaacttccttgagctcatctgtcaggttcttcggaaggcttgtagctccaaaatggatcgccagagtgttctccatgtactgggcatattgaaaaactccaaatttctcaaagtctgcctgcctgcttatgtggtagggatgatcactgaacccatccctgacatccgaaaccagtatccagagcacataagcaacatcatctccctcctccaggaccttgtaagtgtcttccctgccagctctgtgcaggaaacttccatgctggtttccctcctgccaacctctcttaatgctctgagagcctctggtgttgacatagaagaggaaacggagaagaacctggaaaaggtacagactatcattgaacatctgcaggaaaagaggcgagagggcactttgagagtggatacctacactctagtgcagcctgaggcagaagaccatgttgagagctaccgaaccatgcccatttaccctacctacaatgaagtgcacttggatgagaggcccttccttcgccccaatatcatttctggaaaatacgacagcactgctatctatctggatacccacttccggctcctgcgagaagatttcgtcagacctttacgggaaggtattttggaacttctccaaagctttgaagaccagggcctgaggaagagaaagtttgatgacatccgaatctactttgacaccaggattatcacccccatgtgttcatcatcaggcatagtctacaaggtgcagtttgacacaaaaccactgaagtttgttcgctggcagaattccaaacgattgctctatgggtctttggtatgcatgtccaaggacaacttcgagacatttctttttgccaccgtatctaacagggagcaggaagatctctgccgaggaattgtccagctctgcttcaatgagcaaagccaacagctgctagcagaggtccagccctctgactctttcctcatggtagagacaactgcatactttgaggcctacaggcacgtcctggaaggactccaggaggtccaggaggaagatgttcccttccagaggaatatcgtggagtgtaactctcatgtgaaggagccaaggtacttgctaatggggggcagatatgactttacccccttaatagagaatccttcagccactggggaatttctaagaaatgtcgagggtttgagacatcccagaattaatgtcttagatcctggccagtggccctcaaaagaagccctgaagctggatgactcccagatggaagccttgcagtttgctctcacaagggaactggctattattcaaggacctcctggaacaggcaaaacctatgtgggtctaaaaattgttcaggccctcctaaccaacgagtctgtttggcaaattagcctccagaagttccccatcttggttgtgtgttatactaatcatgctttggaccagtttctggaaggcatctacaattgtcagaagaccagcattgtgcgggtgggtggaaggagcaacagtgaaatcctgaagcagttcaccctaagggagctgaggaacaagcgggaattccgccgcaacctccccatgcacctccgaagggcctacatgagtatcatgacacagatgaaggagtcagagcaagagcttcatgaaggagccaagaccctggagtgcaccatgcgtggtgtcctacgggaacagtacctgcagaagtacatctcaccccagcactgggaaagtctcatgaatggaccagtgcaggatagtgaatggatttgcttccagcactggaagcattccatgatgctggagtggctaggtcttggtgtcggttctttcacgcaaagtgtttctccagcaggacctgagaatacagcccaggcagaaggggatgaggaggaagaaggggaggaggagagttcgctgatagagatcgcagaggaagctgacctgattcaagcagaccgggtgattgaggaggaagaggtggtgaggccccagcggcggaagaaggaagagagtggagcagaccaggagttggctaaaatgcttctggccatgaggctagaccattgtggcactgggacagcagctggacaggagcaagccacaggagagtggcagcctgacagtaccctgcctggtattgatgtctgcagacccagcgcaaccagaaaaagaaaatgaaaaaaagagtgaaggatgagcttcgcaaactgaacaccatgactgcagccgaggccaacgagatcgaggatgtttggcacctggacctcagttctcgctggcagctttataggctctggctacagttgtaccaggctgacacccgccggaagatcctcagctatgaacgccagtaccgcacatcagcagaaagaatggccgagctgagactccaggaagacctgcacattcttaaagatgcccaggttgtaggaatgacaaccacaggtgctgccaaataccgccagatcctacagaaggtggagccgaggattgtcatagtggaagaagctgcggaagtccttgaggcccataccattgccacattgagcaaagcttgccagcacctcattttgattggggaccaccagcagctgcgccccagtgccaacgtgtatgatctggccaagaacttcaaccttgaggtgtccctttttgaacggctagtgaaagtaaacattccctttgtccgtctgaattaccagcaccgtatgtgccctgaaattgcccgccttttgaccccccacatttaccaggatctggagaatcatccatctgttcttaagtatgagaagattaagggggtgtcttccaaccttttctttgtagaacacaactttcctgaacaggaaatccaagagggcaaaagccatcagaaccagcatgaggctcactttgtggtagagctgtgcaagtacttcctgtgccaggaatacctgccttcccagatcaccatcctcactacctataccgggcagctcttctgcctgcgcaaactgatgcctgccaagacatttgctggcgtcagggtccatgttgtggacaaataccaaggggaagagaatgacatcatcctcctctcgctagtgcggagcaaccaagaaggcaaggtgggttttctgcagatatccaaccgcatctgtgtggccttgtcccgagccaagaagggaatgtactgcatcggaaacatgcagatgctggccaaggtgcccctgtggagcaagatcattcatacacttcgagagaacaatcaaataggccccatgctccggctctgctgccagaaccaccctgaaacccacaccttagtatccaaagcttctgacttccaaaaagtacccgaaggaggctgcagcctgccctgcgagttccgcctgggctgtgggcatgtctgcacccgtgcctgccacccttatgactcttcacacaaggagttccaatgcatgaagccatgccagaaggtcatctgtcaggaagggcaccggtgtccccttgtttgcttccaggagtgtcagccttgtcaggtgaaggtgcccaaaaccattcctcggtgcggccatgaacaaatggtcccttgttccgtgcctgagtcagatttctgctgccaggagccttgctccaagtctctgagatgtgggcacagatgcagccacccatgtggtgaggactgtgtgcagttgtgttcagaaatggtcaccataaaactcaagtgtgggcacagtcaaccggtaaaatgtggtcatgtggaaggcctcctgtatggtggtctgctagtcaagtgtaccacaaagtgtggcactatcttggactgcgggcatccttgcccaggctcctgccacagctgcttcgaagggcgtttccatgaacgctgtcagcagccctgcaagcgcctgcttatctgctcacacaagtgccaggaaccatgcattggtgagtgcccaccctgccagcggacctgtcagaaccgctgtgtccacagccagtgcaagaagaaatgtggggagctgtgtagtccctgcgtggaaccctgtgtctggcgctgccagcactaccagtgcaccaaactctgctctgagccctgcaaccgacccccatgctatgtgccttgtactaagctgctagtttgtggccacccctgcattggtctctgtggggagccatgccccaagaaatgccggatctgccacatggatgaggtcacccaaatattctttggctttgaggatgagcctgatgcccgctttgtgcagctggaagactgcagccacatctttgaggtgcaagccctagaccgctacatgaatgaacagaaggatgatgaagtcgccatcagattgaaagtctgccctatctgccaggtgcccatccgcaaaaacctgaggtatggaactagcataaaacagcggctagaagagattgaaatcatcaaggaaaagatccagggctcagcaggggaaatagcaaccagccaggaacggcttaaggccctgctggagaggaagagcctcctccaccagctgcttcctgaagacttcctgatgttaaaggagaagctggcccagaaaaatctgtcagtgaaggacctgggtctggttgagaattacatcagcttctatgaccacctggccagcctgtgggattccctgaaaaagatgcatgtcttagaagagaaaagagtgaggactcgactagaacaggtccatgagtggctggccaagaagcgcttgagcttcactagccaggaactaagtgacctccgaagtgaaatccagaggctcacatacctggtgaaccttctgacccgctacaagatagcagagaagaaggtgaaagatagcatagcagtagaggtctatagtgtccagaatatccttgagaaaacatgtaagttcacccaagaggatgaacaacttgtgcaggaaaagatggaagctctgaaagccacccttccctgctctggcctgggcatctcagaggaagagcgagtgcagattgtcagtgccataggttatcctcgtggtcactggttcaagtgccgcaatggccatatctatgtgattggcgattgtgggggagccatggagaggggcacgtgtcctgactgtaaggaagtgattggtggcacaaatcatactctggaaagaagcaaccagcttgcttctgaaatggatggagcccagcatgctgcctggtctgacacggccaacaacctgatgaactttgaggagatccaggggatgatgtaggaagatggtacaccactgccttttgccctcgccactgaatgactggggccagctccctaatgaaggaactgaagtttgttttttattatcatcctttttaggctgggcgcagtggcttacgcctgtaatcccagcactttgggaggccgaggcaggcggatcacgaggtcaggagttcgagaccagcctgaccaacatggcgaaaccccgtctctactaaaaatacaaaaattagctgggcgttatggcgggcgcctgtaatcccagctacttgggaggctgaggcagaagaatcgcttaaacccaggaggcggaggttgcagtgagctgagatcatgccattgcactccagtctgggcgacaggagcaagactctgtctcaaaaaaaaaaaatcattctttttagtcttagcacctacttaaggatccacttttagggctcacccacatttgtttctagatttacccctgcgctagagtaagcactttatctccagaactgagagcaaagttaacaaatctcaccccttctctcctgcaaattagtggacagactccctggaacatgtttggggcttccacctagggccacctagtggtatctctgggtctttacttggtcagatgtttattctacattgttccccaggaacagagtatgagctcattgatgcagaccgattctaattgccaggccctaatttgcagactaactctcataataaacagaggcccatagttgtttatgaactgcttatcccttaaaggagcacaagaacccctccctgccctccttgggcaccctgcctccaggagatggaggcacgtgataagacaaaagactgcaccaactcaccctgacacagttacatagtcactgagagtggggaagatgggacagcccacatgctgcataagatgggccttatgcagcaggcccaggtcgtcattaaggagtgacccctttcctgtaacctgcactttgggatggtagaagtttctttacctgctgacaggtttggtggcactgctggttacccctgggccctgaatggagctaaaatcacatttggtaccagcagcacctatcccaagtgtgatccttcatcccaacactccctcttggagctgttccctgggtagagctagcatgccagcagcttctgcaggctccaaacccaggccagaagccagacccaggcctgctgcctgcatctgcattccctccttccagtgttccttagaacagacatttaggtatctcaggtcctttctaagtgtccctttcctatgtatgcatttcctttttttgtctttactatgcactttagcttataaagccaattaaaaacgatgattgagaaacaaaaaaaagaagggagaaaaaagaagaaacagacaagaggaacaaaaaaatacaggggaggaggaaaaaaacaggaccaaagaaaaacggggccacaaggggagcaaaacagcggaaaacccagacaccacagaaagaacgtacgcaacaacaggggaggaagaaaacagcgggaacacacaacaaagaggaagacaaagaagaaacatgcgcaggaagcgacggagaaaacccggcaacagaaaacgagggga

SEQ ID NO: 311803 - DNA, 4583 bp, Homo sapiens
  misc_feature (20)..(20): n is a, c, g, or t
ttgaagtcagtctggccaancttgccagatccacaaatatcgcgatatttgtggtggccatgaggctagaccattgtggcactgggacagcagctggacaggagcaagccacaggagagtggcagacccagcgcaaccagaaaaagaaaatgaaaaaaagagtgaaggatgagcttcgcaaactgaacaccatgactgcagccgaggccaacgagatcgaggatgtttggcacctggacctcagttctcgctggcagctttataggctctggctacagttgtaccaggctgacacccgccggaagatcctcagctatgaacgccagtaccgcacatcagcagaaagaatggccgagctgagactccaggaagacctgcacattcttaaagatgcccaggttgtaggaatgacaaccacaggtgctgccaaataccgccagatcctacagaaggtggagccgaggattgtcatagtggaagaagctgcggaagtccttgaggcccataccattgccacattgagcaaagcttgccagcacctcattttgattggggaccaccagcagctgcgccccagtgccaacgtgtatgatctggccaagaacttcaaccttgaggtgtccctttttgaacggctagtgaaagtaaacattccctttgtccgtctgaattaccagcaccgtatgtgccctgaaattgcccgccttttgaccccccacatttaccaggatctggagaatcatccatctgttcttaagtatgagaagattaagggggtgtcttccaaccttttctttgtagaacacaactttcctgaacaggaaatccaagagggcaaaagccatcagaaccagcatgaggctcactttgtggtagagctgtgcaagtacttcctgtgccaggaatacctgccttcccagatcaccatcctcactacctataccgggcagctcttctgcctgcgcaaactgatgcctgccaagacatttgctggcgtcagggtccatgttgtggacaaataccaaggggaagagaatgacatcatcctcctctcgctagtgcggagcaaccaagaaggcaaggtgggttttctgcagatatccaaccgcatctgtgtggccttgtcccgagccaagaagggaatgtactgcatcggaaacatgcagatgctggccaaggtgcccctgtggagcaagatcattcatacacttcgagagaacaatcaaataggccccatgctccggctctgctgccagaaccaccctgaaacccacaccttagtatccaaagcttctgacttccaaaaagtacccgaaggaggctgcagcctgccctgcgagttccgcctgggctgtgggcatgtctgcacccgtgcctgccacccttatgactcttcacacaaggagttccaatgcatgaagccatgccagaaggtcatctgtcaggaagggcaccggtgtccccttgtttgcttccaggagtgtcagccttgtcaggtgaaggtgcccaaaaccattcctcggtgcggccatgaacaaatggtcccttgttccgtgcctgagtcagatttctgctgccaggagccttgctccaagtctctgagatgtgggcacagatgcagccacccatgtggtgaggactgtgtgcagttgtgttcagaaatggtcaccataaaactcaagtgtgggcacagtcaaccggtaaaatgtggtcatgtggaaggcctcctgtatggtggtctgctagtcaagtgtaccacaaagtgtggcactatcttggactgcgggcatccttgcccaggctcctgccacagctgcttcgaagggcgtttccatgaacgctgtcagcagccctgcaagcgcctgcttatctgctcacacaagtgccaggaaccatgcattggtgagtgcccaccctgccagcggacctgtcagaaccgctgtgtccacagccagtgcaagaagaaatgtggggagctgtgtagtccctgcgtggaaccctgtgtctggcgctgccagcactaccagtgcaccaaactctgctctgagccctgcaaccgacccccatgctatgtgccttgtactaagctgctagtttgtggccacccctgcattggtctctgtggggagccatgccccaagaaatgccggatctgccacatggatgaggtcacccaaatattctttggctttgaggatgagcctgatgcccgctttgtgcagctggaagactgcagccacatctttgaggtgcaagccctagaccgctacatgaatgaacagaaggatgatgaagtcgccatcagattgaaagtctgccctatctgccaggtgcccatccgcaaaaacctgaggtatggaactagcataaaacagcggctagaagagattgaaatcatcaaggaaaagatccagggctcagcaggggaaatagcaaccagccaggaacggcttaaggccctgctggagaggaagagcctcctccaccagctgcttcctgaagacttcctgatgttaaaggagaagctggcccagaaaaatctgtcagtgaaggacctgggtctggttgagaattacatcagcttctatgaccacctggccagcctgtgggattccctgaaaaagatgcatgtcttagaagagaaaagagtgaggactcgactagaacaggtccatgagtggctggccaagaagcgcttgagcttcactagccaggaactaagtgacctccgaagtgaaatccagaggctcacatacctggtgaaccttctgacccgctacaagatagcagagaagaaggtgaaagatagcatagcagtagaggtctatagtgtccagaatatccttgagaaaacatgtaagttcacccaagaggatgaacaacttgtgcaggaaaagatggaagctctgaaagccacccttccctgctctggcctgggcatctcagaggaagagcgagtgcagattgtcagtgccataggttatcctcgtggtcactggttcaagtgccgcaatggccatatctatgtgattggcgattgtgggggagccatggagaggggcacgtgtcctgactgtaaggaagtgattggtggcacaaatcatactctggaaagaagcaaccagcttgcttctgaaatggatggagcccagcatgctgcctggtctgacacggccaacaacctgatgaactttgaggagatccaggggatgatgtaggaagatggtacaccactgccttttgccctcgccactgaatgactggggccagctccctaatgaaggaactgaagtttgttttttattatcatcctttttaggctgggcgcagtggcttacgcctgtaatcccagcactttgggaggccgaggcaggcggatcacgaggtcaggagttcgagaccagcctgaccaacatggcgaaaccccgtctctactaaaaatacaaaaattagctgggcgttatggcgggcgcctgtaatcccagctacttgggaggctgaggcagaagaatcgcttaaacccaggaggcggaggttgcagtgagctgagatcatgccattgcactccagtctgggcgacaggagcaagactctgtctcaaaaaaaaaaaatcattctttttagtcttagcacctacttaaggatccacttttagggctcacccacatttgtttctagatttacccctgcgctagagtaagcactttatctccagaactgagagcaaagttaacaaatctcaccccttctctcctgcaaattagtggacagactccctggaacatgtttggggcttccacctagggccacctagtggtatctctgggtctttacttggtcagatgtttattctacattgttccccaggaacagagtatgagctcattgatgcagaccgattctaattgccaggccctaatttgcagactaactctcataataaacagaggcccatagttgtttatgaactgcttatcccttaaaggagcacaagaacccctccctgccctccttgggcaccctgcctccaggagatggaggcacgtgataagacaaaagactgcaccaactcaccctgacacagttacatagtcactgagagtggggaagatgggacagcccacatgctgcataagatgggccttatgcagcaggcccaggtcgtcattaaggagtgacccctttcctgtaacctgcactttgggatggtagaagtttctttacctgctgacaggtttggtggcactgctggttacccctgggccctgaatggagctaaaatcacatttggtaccagcagcacctatcccaagtgtgatccttcatcccaacactccctcttggagctgttccctgggtagagctagcatgccagcagcttctgcaggctccaaacccaggccagaagccagacccaggcctgctgcctgcatctgcattccctccttccagtgttccttagaacagacatttaggtatctcaggtcctttctaagtgtccctttcctatgtatgcatttcctttttttgtctttactatgcactttagcttataaagccaattaaaaacgatgattgagaaa

SEQ ID NO: 311804 - DNA, 4039 bp, Homo sapiens
cgcccggctccgcccagggtctgcggggaacggaaaccgaaagtgcgcggcgccgggcggggccaccgacctgcctgggccgaagccccagcactcgccggcggcagtgaaaggacgcgccggagccgggtgagtggccccgcaactgcccctgcccctgattcttccttgcctcgccgcgaaccccggcgcccgcgccgacccgccactgcctctgcccttttccagataacagaaagtaacgtgaaggaattcaggtgactcagacatggaggagagaagacctcatctggatgccaggcccaggaattcccataccaaccacagaggccctgtggatggagagttaccaccaagagctagaaatcaggccaataacccaccagccaatgctctccgaggaggagccagccaccctggaaggcatcctagggccaacaaccatcctgctgcttactggcagagggaagagagatttagggccatgggcaggaacccacatcaaggaaggaggaaccaggaggggcatgccagcgacgaagctagagaccaaagacatgaccaggagaatgacaccaggtggagaaatggcaaccaggactgtaggaaccgcagaccaccatggtccaatgacaacttccagcagtggcggactccccaccagaagcctacagaacagccacagcaggcgaagaaactgggctacaagttcttagaaagtcttctgcagaaagacccttctgaggtggtcatcacacttgccacaagtttagggctgaaagagctcctttctcattcttccatgaaatctaacttccttgagctcatctgtcaggttcttcggaaggcttgtagctccaaaatggatcgccagagtgttctccatgtactgggcatattgaaaaactccaaatttctcaaagtctgcctgcctgcttatgtggtagggatgatcactgaacccatccctgacatccgaaaccagtatccagagcacataagcaacatcatctccctcctccaggaccttgtaagtgtcttccctgccagctctgtgcaggaaacttccatgctggtttccctcctgccaacctctcttaatgctctgagagcctctggtgttgacatagaagaggaaacggagaagaacctggaaaaggtacagactatcattgaacatctgcaggaaaagaggcgagagggcactttgagagtggatacctacactctagtgcagcctgaggcagaagaccatgttgagagctaccgaaccatgcccatttaccctacctacaatgaagtgcacttggatgagaggcccttccttcgccccaatatcatttctggaaaatacgacagcactgctatctatctggatacccacttccggctcctgcgagaagatttcgtcagacctttacgggaaggtattttggaacttctccaaagctttgaagaccagggcctgaggaagagaaagtttgatgacatccgaatctactttgacaccaggattatcacccccatgtgttcatcatcaggcatagtctacaaggtgcagtttgacacaaaaccactgaagtttgttcgctggcagaattccaaacgattgctctatgggtctttggtatgcatgtccaaggacaacttcgagacatttctttttgccaccgtatctaacagggagcaggaagatctctgccgaggaattgtccagctctgcttcaatgagcaaagccaacagctgctagcagaggtccagccctctgactctttcctcatggtagagacaactgcatactttgaggcctacaggcacgtcctggaaggactccaggaggtccaggaggaagatgttcccttccagaggaatatcgtggagtgtaactctcatgtgaaggagccaaggtacttgctaatggggggcagatatgactttacccccttaatagagaatccttcagccactggggaatttctaagaaatgtcgagggtttgagacatcccagaattaatgtcttagatcctggccagtggccctcaaaagaagccctgaagctggatgactcccagatggaagccttgcagtttgctctcacaagggaactggctattattcaaggacctcctggaacaggcaaaacctatgtgggtctaaaaattgttcaggccctcctaaccaacgagtctgtttggcaaattagcctccagaagttccccatcttggttgtgtgttatactaatcatgctttggaccagtttctggaaggcatctacaattgtcagaagaccagcattgtgcgggtgggtggaaggagcaacagtgaaatcctgaagcagttcaccctaagggagctgaggaacaagcgggaattccgccgcaacctccccatgcacctccgaagggcctacatgagtatcatgacacagatgaaggagtcagagcaagagcttcatgaaggagccaagaccctggagtgcaccatgcgtggtgtcctacgggaacagtacctgcagaagtacatctcaccccagcactgggaaagtctcatgaatggaccagtgcaggatagtgaatggatttgcttccagcactggaagcattccatgatgctggagtggctaggtcttggtgtcggttctttcacgcaaagtgtttctccagcaggacctgagaatacagcccaggcagaaggggatgaggaggaagaaggggaggaggagagttcgctgatagagatcgcagaggaagctgacctgattcaagcagaccgggtgattgaggaggaagaggtggtgaggccccagcggcggaagaaggaagagagtggagcagaccaggagttggctaaaatgcttctggccatgaggctagaccattgtggcactgggacagcagctggacaggagcaagccacaggagagtggcagcctgacagtaccctgcctggtattgatgtctgcagacccagcgcaaccagaaaaagaaaatgaaaaaaagagtgaaggatgagcttcgcaaactgaacaccatgactgcagccgaggccaacgagatcgaggatgtttggcacctggacctcagttctcgctggcagctttataggctctggctacagttgtaccaggctgacacccgccggaagatcctcagctatgaacgccagtaccgcacatcagcagaaagaatggccgagctgagactccaggaagacctgcacattcttaaagatgcccaggttgtaggaatgacaaccacaggtgctgccaaataccgccagatcctacagaaggtggagccgaggattgtcatagtggaagaagctgcggaagtccttgaggcccataccattgccacattgagcaaagcttgccagcacctcattttgattggggaccaccagcagctgcgccccagtgccaacgtgtatgatctggccaagaacttcaaccttgaggtgtccctttttgaacggctagtgaaagtaaacattccctttgtccgtctgaattaccagcaccgtatgtgccctgaaattgcccgccttttgaccccccacatttaccaggatctggagaatcatccatctgttcttaagtatgagaagattaagggggtgtcttccaaccttttctttgtagaacacaactttcctgaacaggaaatccaagagggcaaaagccatcagaaccagcatgaggctcactttgtggtagagctgtgcaagtacttcctgtgccaggaatacctgccttcccagatcaccatcctcactacctataccgggcagctcttctgcctgcgcaaactgatgcctgccaagacatttgctggcgtcagggtccatgttgtggacaaataccaaggggaagagaatgacatcatcctcctctcgctagtgcggagtcataccgtggactagtactagtccacggttggctactagtacacaggttggctaatagtccacaggttggctacatagtccacggttggctactatgtagccaacgtggacatagtagccaaccgtgact

SEQ ID NO: 311805 - DNA, 3306 bp, Homo sapiens
cgcccggctccgcccagggtctgcggggaacggaaaccgaaagtgcgcggcgccgggcggggccaccgacctgcctgggccgaagccccagcactcgccggcggcagtgaaaggacgcgccggagccgggtgagtggccccgcaactgcccctgcccctgattcttccttgcctcgccgcgaaccccggcgcccgcgccgacccgccactgcctctgcccttttccagataacagaaagtaacgtgaaggaattcaggtgactcagacatggaggagagaagacctcatctggatgccaggcccaggaattcccataccaaccacagaggccctgtggatggagagttaccaccaagagctagaaatcaggccaataacccaccagccaatgctctccgaggaggagccagccaccctggaaggcatcctagggccaacaaccatcctgctgcttactggcagagggaagagagatttagggccatgggcaggaacccacatcaaggaaggaggaaccaggaggggcatgccagcgacgaagctagagaccaaagacatgaccaggagaatgacaccaggtggagaaatggcaaccaggactgtaggaaccgcagaccaccatggtccaatgacaacttccagcagtggcggactccccaccagaagcctacagaacagccacagcaggcgaagaaactgggctacaagttcttagaaagtcttctgcagaaagacccttctgaggtggtcatcacacttgccacaagtttagggctgaaagagctcctttctcattcttccatgaaatctaacttccttgagctcatctgtcaggttcttcggaaggcttgtagctccaaaatggatcgccagagtgttctccatgtactgggcatattgaaaaactccaaatttctcaaagtctgcctgcctgcttatgtggtagggatgatcactgaacccatccctgacatccgaaaccagtatccagagcacataagcaacatcatctccctcctccaggaccttgtaagtgtcttccctgccagctctgtgcaggaaacttccatgctggtttccctcctgccaacctctcttaatgctctgagagcctctggtgttgacatagaagaggaaacggagaagaacctggaaaaggtacagactatcattgaacatctgcaggaaaagaggcgagagggcactttgagagtggatacctacactctagtgcagcctgaggcagaagaccatgttgagagctaccgaaccatgcccatttaccctacctacaatgaagtgcacttggatgagaggcccttccttcgccccaatatcatttctggaaaatacgacagcactgctatctatctggatacccacttccggctcctgcgagaagatttcgtcagacctttacgggaaggtattttggaacttctccaaagctttgaagaccagggcctgaggaagagaaagtttgatgacatccgaatctactttgacaccaggattatcacccccatgtgttcatcatcaggcatagtctacaaggtgcagtttgacacaaaaccactgaagtttgttcgctggcagaattccaaacgattgctctatgggtctttggtatgcatgtccaaggacaacttcgagacatttctttttgccaccgtatctaacagggagcaggaagatctctgccgaggaattgtccagctctgcttcaatgagcaaagccaacagctgctagcagaggtccagccctctgactctttcctcatggtagagacaactgcatactttgaggcctacaggcacgtcctggaaggactccaggaggtccaggaggaagatgttcccttccagaggaatatcgtggagtgtaactctcatgtgaaggagccaaggtacttgctaatggggggcagatatgactttacccccttaatagagaatccttcagccactggggaatttctaagaaatgtcgagggtttgagacatcccagaattaatgtcttagatcctggccagtggccctcaaaagaagccctgaagctggatgactcccagatggaagccttgcagtttgctctcacaagggaactggctattattcaaggacctcctggaacaggcaaaacctatgtgggtctaaaaattgttcaggccctcctaaccaacgagtctgtttggcaaattagcctccagaagttccccatcttggttgtgtgttatactaatcatgctttggaccagtttctggaaggcatctacaattgtcagaagaccagcattgtgcgggtgggtggaaggagcaacagtgaaatcctgaagcagttcaccctaagggagctgaggaacaagcgggaattccgccgcaacctccccatgcacctccgaagggcctacatgagtatcatgacacagatgaaggagtcagagcaagagcttcatgaaggagccaagaccctggagtgcaccatgcgtggtgtcctacgggaacagtacctgcagaagtacatctcaccccagcactgggaaagtctcatgaatggaccagtgcaggatagtgaatggatttgcttccagcactggaagcattccatgatgctggagtggctaggtcttggtgtcggttctttcacgcaaagtgtttctccagcaggacctgagaatacagcccaggcagaaggggatgaggaggaagaaggggaggaggagagttcgctgatagagatcgcagaggaagctgacctgattcaagcagaccgggtgattgaggaggaagaggtggtgaggccccagcggcggaagaaggaagagagtggagcagaccaggagttggctaaaatgcttctggccatgaggctagaccattgtggcactgggacagcagctggacaggagcaagccacaggagagtggcagcctgacagtaccctgcctggtattgatgtctgcagacccagcgcaaccagaaaaagaaaatgaaaaaaagagtgaaggatgagcttcgcaaactgaacaccatgactgcagccgaggccaacgagatcgaggatgtttggcacctggacctcagttctcgctggcagctttataggctctggctacagttgtaccaggctgacacccgccggaagatcctcagctatgaacgccagtaccgcacatcagcagaaagaatggccgagctgagactccaggaagacctgcacattcttaaagatgcccaggttgtaggaatgacaaccacaggtgctgccaaataccgccagaaccacaaatatcggggtgcgagc

SEQ ID NO: 311806 - DNA, 542 bp, Homo sapiens
tccagctctcgcgagactttcaggggtcggagcgcgggggccggccgagaggaaagctggaggcgcgggtggggaacatgtctgagtcggagctcggcaggaagtgggaccggtgtctggcggatgcggtcgtgaagataggtactggttttggattaggaattgttttctcacttaccttctttaaaagaagaatgtggccattagccttcggttctggcatgggattaggaatggcttattccaactgtcagcatgatttccaggctccatatcttctacatggaaaatatgtcaaagagcaggagcagtgacttcacctgagaacatcccagcgggaggacaagagaaatcatgtttattcctcaggaatactgaagtgccctggagtaagctgccattcttctgtaacaatgttatcagtaatgctttaaactccagcacctggttatgcatttgaaaccaagtctgtttcttgttttgtattttctctctggaagttgtaaggaggtggtcttaaataaattaaacaaaaataggaa

SEQ ID NO: 311807 - DNA, 651 bp, Homo sapiens
tccagctctcgcgagactttcaggggtcggagcgcgggggccggccgagaggaaagctggaggcgcgggtggggaacatgtctgagtcggagctcggcaggaagtgggaccggtgtctggcggatgcggtcgtgaagataggtactggttttggattaggaattgttttctcacttaccttctttaaaagaagaatgtggccattagccttcggttctggcatgggattaggaatggcttattccaactgtcagcatgatttccaggctccatatcttctacatggaaaatatgtcaaagagcaggagcagtgacttcacctgagaacatcccagcgggaggacaagagaaatcatgtttattcctcaggaatactgaagtgccctggagtaagctgccattcttctgtaacaatgttatcagtaatgctttaaactccagcacctggttatgcatttgaaaccaagtctgtttcttgttttgtattttctctctggaagttgtaaggaggtggtcttaaataaattaaacaaaaataggaaggaagtccattgcatggcctttgtttcttcacctttggtctctgagcatgaggaggactgtgtgtgaactgccagcagctgtagccacctgctcacagcctctctgaga

SEQ ID NO: 311808 - DNA, 739 bp, Homo sapiens
  misc_feature (145)..(145): n is a, c, g, or t
atgtgtcaaaacaaagagagtaaagcatgagctgccaggttagaagaaaatttgagaagcaggtcagcagcagtaagtgacagcagcagctagagcagaaaccctggaggtggagaagagatctgttcagtgtttatacacttcntcagccttccccaagtggcaagccccagcctcattcttcagtagtttattctgaggctgggaaagataaagggcctcctccaaaatccagatatgaggaagagctaaggaccagagggaagactaccattactgcagctaacttcatagacgtgatcatcacccggcaaattgcctcggacaaggatgcgagggaacgtggctctcaaagttcagactcttctcacttaccttctttaaaagaagaatgtggccattagccttcggttctggcatgggattaggaatggcttattccaactgtcagcatgatttccaggctccatatcttctacatggaaaatatgtcaaagagcaggagcagtgacttcacctgagaacatcccagcgggaggacaagagaaatcatgtttattcctcaggaatactgaagtgccctggagtaagctgccattcttctgtaacaatgttatcagtaatgctttaaactccagcacctggttatgcatttgaaaccaagtctgtttcttgttttgtattttctctctggaagttgtaaggaggtggtcttaaataaattaaacaaaaataggaa

SEQ ID NO: 311809 - DNA, 834 bp, Homo sapiens
ctcctgagtgcccaatctgcccccaggaccatcctgggtgctttatctttaataatctttccctctagacctgccagttgatttgtgagagatgttactatcctcattcagctgatgagaaagcagactcttaccggggttgagaaacttggcaaggccatgtagttcgtaggctgatgagaaccatgctctccccactcccctgggacgccttcgacaggttttaggaattgttatccaggtcatgatggtttggccctgttccactcgtttcccactcttctccctggaagattggggctggatggcactcttaggaacctaggtagggtgtacatagtcctgttgtgagacagttttaacgtaaacagtgtgataaggttttggcttctggccctttgggtctgacctgatacagcaattagagagggttgtcagaatgccgtctgcacagttttaagctgaatgtccttgctttacaggagcaggagcagtgacttcacctgagaacatcccagcgggaggacaagagaaatcatgtttattcctcaggaatactgaagtgccctggagtaagctgccattcttctgtaacaatgttatcagtaatgctttaaactccagcacctggttatgcatttgaaaccaagtctgtttcttgttttgtattttctctctggaagttgtaaggaggtggtcttaaataaattaaacaaaaataggaaggaagtccattgcatggcctttgtttcttcacctttggtctctgagcatgaggaggactgtgtgtgaactgccagcagctgtagccacctgctcacagcctctctgaga

SEQ ID NO: 311810 - DNA, 725 bp, Homo sapiens
ctcctgagtgcccaatctgcccccaggaccatcctgggtgctttatctttaataatctttccctctagacctgccagttgatttgtgagagatgttactatcctcattcagctgatgagaaagcagactcttaccggggttgagaaacttggcaaggccatgtagttcgtaggctgatgagaaccatgctctccccactcccctgggacgccttcgacaggttttaggaattgttatccaggtcatgatggtttggccctgttccactcgtttcccactcttctccctggaagattggggctggatggcactcttaggaacctaggtagggtgtacatagtcctgttgtgagacagttttaacgtaaacagtgtgataaggttttggcttctggccctttgggtctgacctgatacagcaattagagagggttgtcagaatgccgtctgcacagttttaagctgaatgtccttgctttacaggagcaggagcagtgacttcacctgagaacatcccagcgggaggacaagagaaatcatgtttattcctcaggaatactgaagtgccctggagtaagctgccattcttctgtaacaatgttatcagtaatgctttaaactccagcacctggttatgcatttgaaaccaagtctgtttcttgttttgtattttctctctggaagttgtaaggaggtggtcttaaataaattaaacaaaaataggaa

SEQ ID NO: 311811 - DNA, 417 bp, Homo sapiens
catctctgcaccaaagcaagagtgaggtcatcacagggaccatgcaagaagaggcgcagctgtgtggcactgaagccggcagccggccttttccaccactccctggctcctcgctttcctggcatcagagctgattgtggggagaaccgaaaggagcagacagagaagcttcaggagcaggagcagtgacttcacctgagaacatcccagcgggaggacaagagaaatcatgtttattcctcaggaatactgaagtgccctggagtaagctgccattcttctgtaacaatgttatcagtaatgctttaaactccagcacctggttatgcatttgaaaccaagtctgtttcttgttttgtattttctctctggaagttgtaaggaggtggtcttaaataaattaaacaaaaataggaa

SEQ ID NO: 311812 - DNA, 896 bp, Homo sapiens
gacagcaggtgtcagttcaagtcatgaaagggttacactatattgacaggcctctccagtaacaagggctgttcacaactgcgaacttcttggctcctcaagattgtaatgtcaacaataaacacacacagttcagctcgtgccgaattcggcacgagcggcacgatggagcgcgggggccggccgagaggaaagctggaggcgcgggtggggaacatgtctgagtcggagctcggcaggaagtgggaccggtgtctggcggatgcggtcgtgaagataggtactggttttggattaggaattgttttctcacttaccttctttaaaagaagaatgtggccattagccttcggttctggcatgggattaggaatggcttattccaactgtcagcatgatttccaggctccatatcttctacatggaaaatatgtcaaagagcaggagcagtgacttcacctgagaacatcccagcgggaggacaagagaaatcatgtttattcctcaggaatactgaagtgccctggagtaagctgccattcttctgtaacaatgttatcagtaatgctttaaactccagcacctggttatgcatttgaaaccaagtctgtttcttgttttgtattttctctctggaagttgtaaggaggtggtcttaaataaattaaacaaaaataggaaaaaaaacaaaaaaaaaaaaaaaaaaaaaaaaaaaaaaaaaaaaactttggtgggccggcctgtaggcccttggaaaaaagcttttttaaacacaatcctgttttgggcccgggggcccagatgtggtaacgctagcgcggtggcaaaggcgtgtccccagaggaaacccggggccaggacactaggggggggggattcctccccaattaaaaacg

SEQ ID NO: 311813 - DNA, 775 bp, Homo sapiens
gacagcaggtgtcagttcaagtcatgaaagggttacactatattgacaggcctctccagtaacaagggctgttcacaactgcgaacttcttggctcctcaagattgtaatgtcaacaataaacacacacagttcagctcgtgccgaattcggcacgagcggcacgatggagcgcgggggccggccgagaggaaagctggaggcgcgggtggggaacatgtctgagtcggagctcggcaggaagtgggaccggtgtctggcggatgcggtcgtgaagatagtagagacggggtttcaccgtgttagccaggatggtctcgatctcctgacctcgtgatccgcccgcctcggcctcccaaagtgctgggattacaggtactggttttggattaggaattgttttctcacttaccttctttaaaagaagaatgtggccattagccttcggttctggcatgggattaggaatggcttattccaactgtcagcatgatttccaggctccatatcttctacatggaaaatatgtcaaagagcaggagcagtgacttcacctgagaacatcccagcgggaggacaagagaaatcatgtttattcctcaggaatactgaagtgccctggagtaagctgccattcttctgtaacaatgttatcagtaatgctttaaactccagcacctggttatgcatttgaaaccaagtctgtttcttgttttgtattttctctctggaagttgtaaggaggtggtcttaaataaattaaacaaaaataggaa

SEQ ID NO: 311814 - DNA, 949 bp, Homo sapiens
gacagcaggtgtcagttcaagtcatgaaagggttacactatattgacaggcctctccagtaacaagggctgttcacaactgcgaacttcttggctcctcaagattgtaatgtcaacaataaacacacacagttcagctcgtgccgaattcggcacgagcggcacgatggagcgcgggggccggccgagaggaaagctggaggcgcgggtggggaacatgtctgagtcggagctcggcaggaagtgggaccggtgtctggcggatgcggtcgtgaagataggtactggttttggattaggaattgttttctcacttaccttctttaaaagaagaatgtggccattagccttcggttctggcatgggattaggaatggcttattccaactgtcagcatgatttccaggctccatatcttctacatggaaaatatgtcaaagagcaggagcagtgacttcacctgagaacatcccagcgggaggacaagagaaatcatgtttattcctcaggaatactgaagtgccctggagtaagctgccattcttctgtaacaatgttatcagtaatgctttaaactccagcacctggttatgcatttgaaaccaagtctgtttcttgttttgtattttctctctggaagttgtaaggaggtggtcttaaataaattaaacaaaaataggaaaaaaaaaaaaaagggggggccggccccttgtatatttaagtataattccacaacaagggacgctcttgggcccccgtgtggcccaggggtgaaggtgccggggcgcaacactacagcatcacgtggaaccctcggaccagcggggtcaagagaatacaacaggcacaaagcctcaccaggatagcggggaactaccggggcaccaaccccgggaatacaggcgtgcaccaacacccccagacaataaggaagctaaggcaaaaagggt

SEQ ID NO: 311815 - DNA, 633 bp, Homo sapiens
gacagcaggtgtcagttcaagtcatgaaagggttacactatattgacaggcctctccagtaacaagggctgttcacaactgcgaacttcttggctcctcaagattgtaatgtcaacaataaacacacacagttcagctcgtgccgaattcggcacgagcggcacgatggagcgcgggggccggccgagaggaaagctggaggcgcgggtggggaacatgtctgagtcggagctcggcaggaagtgggaccggtgtctggcggatgcggtcgtgaagataggaagaatgtggccattagccttcggttctggcatgggattaggaatggcttattccaactgtcagcatgatttccaggctccatatcttctacatggaaaatatgtcaaagagcaggagcagtgacttcacctgagaacatcccagcgggaggacaagagaaatcatgtttattcctcaggaatactgaagtgccctggagtaagctgccattcttctgtaacaatgttatcagtaatgctttaaactccagcacctggttatgcatttgaaaccaagtctgtttcttgttttgtattttctctctggaagttgtaaggaggtggtcttaaataaattaaacaaaaataggaa

SEQ ID NO: 311816 - DNA, 803 bp, Homo sapiens
  misc_feature (765)..(765): n is a, c, g, or t
gacagcaggtgtcagttcaagtcatgaaagggttacactatattgacaggcctctccagtaacaagggctgttcacaactgcgaacttcttggctcctcaagattgtaatgtcaacaataaacacacacagttcagctcgtgccgaattcggcacgagcggcacgatggagcgcgggggccggccgagaggaaagctggaggcgcgggtggggaacatgtctgagtcggagctcggcaggaagtgggaccggtgtctggcggatgcggtcgtgaagatagaatcctggtaattgatgtccacccgagaaatccctgcagatgttccagcctctgtctagtccagatagccacaggaagggtactggttttggattaggaattgttttctcacttaccttctttaaaagaagaatgtggccattagccttcggttctggcatgggattaggaatggcttattccaactgtcagcatgatttccaggctccatatcttctacatggaaaatatgtcaaagagcaggagcagtgacttcacctgagaacatcccagcgggaggacaagagaaatcatgtttattcctcaggaatactgaagtgccctggagtaagctgccattcttctgtaacaatgttatcagtaatgctttaaactccagcacctggttatgcatttgaaaccaagtctgtttcttgttttgtattttctctctggaagttgtaaggaggtggtcttaaataaattaaacaaaaataggaaaaaanaaacatagaatgacaaatgatgaactcagcagcaagat

SEQ ID NO: 311817 - DNA, 1134 bp, Homo sapiens
gacagcaggtgtcagttcaagtcatgaaagggttacactatattgacaggcctctccagtaacaagggctgttcacaactgcgaacttcttggctcctcaagattgtaatgtcaacaataaacacacacagttcagctcgtgccgaattcggcacgagcggcacgatggagcgcgggggccggccgagaggaaagctggaggcgcgggtggggaacatgtctgagtcggagctcggcaggaagtgggaccggtgtctggcggatgcggtcgtgaagatagagatggggtttcaccatgttgcccaggctggtcttgaactcagggtccaaacgatccacctaccttggcctcccaacgtgccaggattacaggcatgagccaccacacctggtccatcttgataatttcatactctggcttggcaaagactgaagggaagccatggtgaatgcacagcaacttctgtactggttttggattaggaattgttttctcacttaccttctttaaaagaagaatgtggccattagccttcggttctggcatgggattaggaatggcttattccaactgtcagcatgatttccaggctccatatcttctacatggaaaatatgtcaaagagcaggagcagtgacttcacctgagaacatcccagcgggaggacaagagaaatcatgtttattcctcaggaatactgaagtgccctggagtaagctgccattcttctgtaacaatgttatcagtaatgctttaaactccagcacctggttatgcatttgaaaccaagtctgtttcttgttttgtattttctctctggaagttgtaaggaggtggtcttaaataaattaaacaaaaataggaaaaaaaaaaaaaagggggggccggccccttgtatatttaagtataattccacaacaagggacgctcttgggcccccgtgtggcccaggggtgaaggtgccggggcgcaacactacagcatcacgtggaaccctcggaccagcggggtcaagagaatacaacaggcacaaagcctcaccaggatagcggggaactaccggggcaccaaccccgggaatacaggcgtgcaccaacacccccagacaataaggaagctaaggcaaaaagggt

SEQ ID NO: 311818 - DNA, 639 bp, Homo sapiens
gacagcaggtgtcagttcaagtcatgaaagggttacactatattgacaggcctctccagtaacaagggctgttcacaactgcgaacttcttggctcctcaagattgtaatgtcaacaataaacacacacagttcagctcgtgccgaattcggcacgagcggcacgatggagcgcgggggccggccgagaggaaagctggaggcgcgggtggggaacatgtctgagtcggagctcggcaggaagtgggaccggtgtctggcggatgcggtcgtgaagataggtactggttttggattaggaattgttttctcacttaccttctttaaaagaagaatgtggccattagccttcggttctggcatgggattaggaatggcttattccaactgtcagcatgatttccaggctccatatcttctacatggaaaatatgtcaaagacaagagaaatcatgtttattcctcaggaatactgaagtgccctggagtaagctgccattcttctgtaacaatgttatcagtaatgctttaaactccagcacctggttatgcatttgaaaccaagtctgtttcttgttttgtattttctctctggaagttgtaaggaggtggtcttaaataaattaaacaaaaataggaa

SEQ ID NO: 311819 - DNA, 798 bp, Homo sapiens
gacagcaggtgtcagttcaagtcatgaaagggttacactatattgacaggcctctccagtaacaagggctgttcacaactgcgaacttcttggctcctcaagattgtaatgtcaacaataaacacacacagttcagctcgtgccgaattcggcacgagcggcacgatggagcgcgggggccggccgagaggaaagctggaggcgcgggtggggaacatgtctgagtcggagctcggcaggaagtgggaccggtgtctggcggatgcggtcgtgaagatagagatggggtttcaccatgttgcccaggctggtcttgaactcagggtccaaacgatccacctaccttggcctcccaacgtgccaggattacaggcatgagccaccacacctggtccatcttgataatttcatactctggcttggcaaagactgaagggaagccatggtgaatgcacagcaacttctgtgagtccttctctgtttggttgtcttatacctaaagtgttttgcttccagggttcaccagggttattttcccacctgtttgctgtacgatgactattataatcactcgtgtttagcataggtgttgtatagctgagttaaatagctttcttaagcctgtactttaggcagtggtcctttaaaaaagtaatcttcaaggatcttttcaccctgaggcttgaataatatcttaatagaaaattatcatatgattttgtcctgtaggaagaggcatttatttataaatacccttgcccccattactatcttaagaaaagcagttctaggccaggc

SEQ ID NO: 311820 - DNA, 213 bp, Homo sapiens
cgagaggaaagctggaggcgcgggtggggaacatgtctgagtcggagctcggcaggaagtgggaccggtgtctggcggatgcggtcgtgaagataggtaaggggcttttcgccccagcaggcccggccggtgcagagctgctggctccaggctgcgctgcccaggaggaaggaagggaagccccacgggaggtcaggcctctcggccttttcc

SEQ ID NO: 311821 - DNA, 681 bp, Homo sapiens
gacagcaggtgtcagttcaagtcatgaaagggttacactatattgacaggcctctccagtaacaagggctgttcacaactgcgaacttcttggctcctcaagattgtaatgtcaacaataaacacacacagttcagctcgtgccgaattcggcacgagcggcacgatggagcgcgggggccggccgagaggaaagctggaggcgcgggtggggaacatgtctgagtcggagctcggcaggaagtgggaccggtgtctggcggatgcggtcgtgaagataggtactggttttggattaggaattgttttctcacttaccttctttaaaagaagaatgtggccattagccttcggttctggcatgggattaggaatggcttattccaactgtcagcatgatttccaggctccatatcttctacatggaaaatatgtcaaagagcaggagcagtgacttcacctgagaacatcccagcgggaggacaagagaaatcatgtttattcctcaggaatactgaagtgccctggagtaagctgccattcttctgtaacaatgttatcagtaatgctttaaactccagcacctggttatgcatttgaaaccaagtctgtttcttgttttgtattttctctctggaagttgtaaggaggtggtcttaaataaattaaacaaaaataggaa

SEQ ID NO: 311822 - DNA, 274 bp, Homo sapiens
catctctgcaccaaagcaagagtgaggtcatcacagggaccatgcaagaagaggcgcagctgtgtggcactgaagccggcagccggccttttccaccactccctggctcctcgctttcctggcatcagagctgattgtggggagaaccgaaaggagcagacagagaagcttcaggtcttttgcttaaaacatttccattgttccaaactgagttgtcagggataatggctcaggggtgattatatgcatattatgtatttaatggctgggagtt

SEQ ID NO: 311823 - DNA, 760 bp, Homo sapiens
gacagcaggtgtcagttcaagtcatgaaagggttacactatattgacaggcctctccagtaacaagggctgttcacaactgcgaacttcttggctcctcaagattgtaatgtcaacaataaacacacacagttcagctcgtgccgaattcggcacgagcggcacgatggagcgcgggggccggccgagaggaaagctggaggcgcgggtggggaacatgtctgagtcggagctcggcaggaagtgggaccggtgtctggcggatgcggtcgtgaagatagaatcctggtaattgatgtccacccgagaaatccctgcagatgttccagcctctgtctagtccagatagccacaggaagggtactggttttggattaggaattgttttctcacttaccttctttaaaagaagaatgtggccattagccttcggttctggcatgggattaggaatggcttattccaactgtcagcatgatttccaggctccatatcttctacatggaaaatatgtcaaagagcaggagcagtgacttcacctgagaacatcccagcgggaggacaagagaaatcatgtttattcctcaggaatactgaagtgccctggagtaagctgccattcttctgtaacaatgttatcagtaatgctttaaactccagcacctggttatgcatttgaaaccaagtctgtttcttgttttgtattttctctctggaagttgtaaggaggtggtcttaaataaattaaacaaaaataggaa

SEQ ID NO: 311824 - DNA, 1251 bp, Homo sapiens
gacagcaggtgtcagttcaagtcatgaaagggttacactatattgacaggcctctccagtaacaagggctgttcacaactgcgaacttcttggctcctcaagattgtaatgtcaacaataaacacacacagttcagctcgtgccgaattcggcacgagcggcacgatggagcgcgggggccggccgagaggaaagctggaggcgcgggtggggaacatgtctgagtcggagctcggcaggaagtgggaccggtgtctggcggatgcggtcgtgaagataggtactggttttggattaggaattgttttctcacttaccttctttaaaagaagaatgtggccattagccttcggttctggcatgggattaggaatggcttattccaactgtcagcatgatttccaggctccatatcttctacatggaaaatatgtcaaagagcaggagcagtgacttcacctgagaacatcccagcgggaggacaagagaaatcatgtttattcctcaggaatactgaagtgccctggagtaagctgccattcttctgtaacaatgttatcagtaatgctttaaactccagcacctggttatgcatttgaaaccaagtctgtttcttgttttgtattttctctctggaagttgtaaggaggtggtcttaaataaattaaacaaaaataggaaaaaaaaaaaaagccgccgattcgcgcggaggcggaggcttgggtgcgtcaagattcaatttcacccgtaacccaccgccatggccgaggaaggcattgctgcctggaggtgtactggccgtaatactgtttacaagaggttctgaagatgccctcatccacgatggctagcacgtggaattcgcgaagctgccaaagccttagacaagcgccaaagcccatctttgtgtgcttgcatcaatgttatgagcccattgttttgtccaagtcgttgggagcgcttggtgctggaaaacccaaatcaaccttaattaaggttggatgacaaccagaactcaggagattgggttggctttgtcacattgacgaaggggaaccccgtaagtggtggtgccgtgctactactagccaatgacgagtccggcaggattctgaagtttcctgcgacatcacgaacctggtcgcgcacacacatacactagccaacaaaaaaaagaaggggcgtctggggcgcgccgtagacaagtatacacgccagacagacgagcgctgaacacatatatgtgttaat

SEQ ID NO: 311825 - DNA, 439 bp, Homo sapiens
  misc_feature (6)..(6): n is a, c, g, or t
  misc_feature (47)..(47): n is a, c, g, or t
  misc_feature (71)..(71): n is a, c, g, or t
tgctancgacccgcagaatggccgtgctgcgatccgcctgaaaaagnactgtttggataggattgtttccnacctacctccttaaagaagaatgtggccattagccttcggttctggcatgggattaggaatggcttattccaactgtcagcatgatttccaggctccatatcttctacatggaaaatatgtcaaagagcaggagcagtgacttcacctgagaacatcccagcgggaggacaagagaaatcatgtttattcctcaggaatactgaagtgccctggagtaagctgccattcttctgtaacaatgttatcagtaatgctttaaactccagcacctggttatgcatttgaaaccaagtctgtttcttgttttgtattttctctctggaagttgtaaggaggtggtcttaaataaattaaacaaaaataggaa

SEQ ID NO: 311826 - DNA, 1345 bp, Homo sapiens
gacagcaggtgtcagttcaagtcatgaaagggttacactatattgacaggcctctccagtaacaagggctgttcacaactgcgaacttcttggctcctcaagattgtaatgtcaacaataaacacacacagttcagctcgtgccgaattcggcacgagcggcacgatggagcgcgggggccggccgagaggaaagctggaggcgcgggtggggaacatgtctgagtcggagctcggcaggaagtgggaccggtgtctggcggatgcggtcgtgaagatagtagagacggggtttcaccgtgttagccaggatggtctcgatctcctgacctcgtgatccgcccgcctcggcctcccaaagtgctgggattacaggtactggttttggattaggaattgttttctcacttaccttctttaaaagaagaatgtggccattagccttcggttctggcatgggattaggaatggcttattccaactgtcagcatgatttccaggctccatatcttctacatggaaaatatgtcaaagagcaggagcagtgacttcacctgagaacatcccagcgggaggacaagagaaatcatgtttattcctcaggaatactgaagtgccctggagtaagctgccattcttctgtaacaatgttatcagtaatgctttaaactccagcacctggttatgcatttgaaaccaagtctgtttcttgttttgtattttctctctggaagttgtaaggaggtggtcttaaataaattaaacaaaaataggaaaaaaaaaaaaagccgccgattcgcgcggaggcggaggcttgggtgcgtcaagattcaatttcacccgtaacccaccgccatggccgaggaaggcattgctgcctggaggtgtactggccgtaatactgtttacaagaggttctgaagatgccctcatccacgatggctagcacgtggaattcgcgaagctgccaaagccttagacaagcgccaaagcccatctttgtgtgcttgcatcaatgttatgagcccattgttttgtccaagtcgttgggagcgcttggtgctggaaaacccaaatcaaccttaattaaggttggatgacaaccagaactcaggagattgggttggctttgtcacattgacgaaggggaaccccgtaagtggtggtgccgtgctactactagccaatgacgagtccggcaggattctgaagtttcctgcgacatcacgaacctggtcgcgcacacacatacactagccaacaaaaaaaagaaggggcgtctggggcgcgccgtagacaagtatacacgccagacagacgagcgctgaacacatatatgtgttaat

SEQ ID NO: 311827 - DNA, 825 bp, Homo sapiens
gacagcaggtgtcagttcaagtcatgaaagggttacactatattgacaggcctctccagtaacaagggctgttcacaactgcgaacttcttggctcctcaagattgtaatgtcaacaataaacacacacagttcagctcgtgccgaattcggcacgagcggcacgatggagcgcgggggccggccgagaggaaagctggaggcgcgggtggggaacatgtctgagtcggagctcggcaggaagtgggaccggtgtctggcggatgcggtcgtgaagataggtactggttttggattaggaattgttttctcacttaccttctttaaaagaagaatgtggccattagccttcggttctggcatgggattaggaatggcttattccaactgtcagcatgatttccaggctccatatcttctacatggaaaatatgtcaaagacaagagaaatcatgtttattcctcaggaatactgaagtgccctggagtaagctgccattcttctgtaacaatgttatcagtaatgctttaaactccagcacctggttatgcatttgaaaccaagtctgtttcttgttttgtattttctctctggaagttgtaaggaggtggtcttaaataaattaaacaaaaataggaacatatatcgaacaacacatatctccggtctccccccttcaccacacttccgccccctcctcttttctatctttaaatacgccatctctccttccgggcttaaattgtctctcttgcgctattttccctatgtggagcgtctacattctcattctccgtcgttttacatctctagaccctgttaacg

SEQ ID NO: 311828 - DNA, 512 bp, Homo sapiens
gacagcaggtgtcagttcaagtcatgaaagggttacactatattgacaggcctctccagtaacaagggctgttcacaactgcgaacttcttggctcctcaagattgtaatgtcaacaataaacacacacagttcagctcgtgccgaattcggcacgagcggcacgatggagcgcgggggccggccgagaggaaagctggaggcgcgggtggggaacatgtctgagtcggagctcggcaggaagtgggaccggtgtctggcggatgcggtcgtgaagatagagatggggtttcaccatgttgcccaggctggtcttgaactcagggtccaaacgatccacctaccttggcctcccaacgtgccaggattacaggtgtgaaccagtactttatttctgacaccagatatgtaggagttttcccccacacatcaaccagttctccaactgggtatccggtaactcactttaattctgacaccgtctgcctggagactaccacaagactgccttca

SEQ ID NO: 311829 - DNA, 7731 bp, Homo sapiens
  misc_feature (1594)..(1594): n is a, c, g, or t
  misc_feature (1597)..(1600): n is a, c, g, or t
  misc_feature (1603)..(1603): n is a, c, g, or t
  misc_feature (1607)..(1609): n is a, c, g, or t
acacatccgggcttctgctactagtgagaggaagatggcggccgcggctgtggtggttcccgcagagtggataaagaactgggagaaatcagggagaggcgaatttttgcatttatgtcggatcctcagtgaaaataaaagccatgatagttcaacatacagagatttccagcaagctctctatgagttgtcatatcatgtaattaaaggaaatctaaagcatgaacaggcatctaatgttcttagtgacattagtgaatttcgtgaggatatgccctccattcttgctgatgtattctgcatattagacattgagacaaattgtttagaagaaaaaagcaagagagactattttacacagttggtattagcatgtttgtatttagtttcagacacagttctaaaggaacgcctggatccagaaacactggaatcattagggcttatcaaacaatcacagcaattcaatcaaaagtcagttaaaatcaagacaaaactcttttataagcagcaaaaattcaatttgttaagagaagagaatgaaggttatgccaagctgattgctgaattggggcaagatttatctggaagtattactagtgatttaatcttagaaaatatcaaatctttaataggatgctttaatctggatcccaatagagttttggatgtcattttagaagtgtttgaatgcaggccagaacacgatgacttctttatatctttgttagaatcttacatgagtatgtgtgaaccgcaaacactgtgtcatattcttgggttcaaattcaagttttaccaggaaccaaatggcgagacaccatcatctttatacagagttgcagcagtacttctacaatttaatcttattgatttagatgatctttatgtacatcttcttccggctgataattgcattatggatgaacacaaacgagaaattgcggaagctaagcaaattgttagaaagcttacgatggttgtgttgtcttctgaaaaaatggatgagcgagagaaagaaaaggaaaaagaagaggagaaagtagagaaaccacctgataaccaaaaacttggcttgttggaagccttattaaagattggtgattggcaacatgcacagaacattatggatcagatgcctccatactatgcagcttcacacaagctaatagcccttgctatttgcaagctcattcatataactattgagcctctctaccgaagagttggagttcctaaaggtgctaaaggctcacctgttaatgctttgcaaaacaagagagcaccaaaacaagctgagagctttgaagatttgaggagagacgtgttcaatatgttctgttaccttggtcctcacctttctcacgatcccattttatttgcaaaagtggtgcgcataggcaagtcatttatgaaggagtttcagtctgatggaagcaaacaagaagataaagaaaaaacggaagttatccttagctgtttgcttagcattactgaccaggtactacttccatctctttctttgatggactgcaatgcttgtatgtctgaggaactatggggaatgtttaaaacatttccatatcagcatagntannnnctntatnnncatgaaagaatgaaacatgatgacacaaccatctcaagctggcttcagagtctggctagtttctgtggtgcagtttttcgtaaatatccaattgatcttgctggtcttcttcagtatgttgccaatcagctaaaggcgggcaaaagttttgacctgcttatattgaaagaagtggtacaaaaaatggcaggaatagaaattacagaggaaatgacaatggagcaactagaggctatgactggtggagagcagctaaaagctgagggtggttattttggtcagatcagaaacactaaaaaatcctctcagagattaaaggatgctctattggaccatgatcttgcccttcctctctgtctgcttatggctcagcagagaaatggggtaatctttcaggaaggtggagagaaacatttgaaacttgtgggaaagctctatgaccagtgtcatgataccctggtgcagtttggtgggtttttagcatctaatctgagcacagaagattatataaagcgagtgccttcaattgatgtactctgtaatgaatttcatacaccccatgatgcagcatttttcctgtctaggccaatgtatgcccatcatatttcgtcaaagtatgatgaacttaaaaaatcagaaaagggaagtaaacagcaacataaagttcataagtacattacatcatgtgagatggtgatggcgcctgtccatgaagcagtggtctccttacatgtttccaaagtctgggatgacatcagccctcaattctatgctacattctggtcattgacaatgtatgaccttgcagttccacacaccagctatgaacgagaagtcaataaacttaaagtccagatgaaagcaattgatgacaatcaggaaatgcccccaaataaaaagaaaaaagagaaggagcgctgtactgcccttcaggacaagcttcttgaagaagaaaagaaacagatggaacatgtacagagagttctacagagattgaaactggaaaaggacaactggcttttagcaaaatctaccaaaaatgagaccatcacaaaatttctacagctgtgtatatttcctcgatgtattttttcagcaattgatgctgtttactgtgctcgttttgttgaattggtacatcaacagaaaactccaaatttttccacacttctttgctatgatcgagttttctctgacataatttacacagttgcaagctgtactgaaaatgaagccagtcgatacggaaggtttctttgctgcatgttagagactgtgaccaggtggcatagtgatagagccacatatgaaaaggaatgtggaaactatccaggattccttaccatattacgggcaactggatttgatggtggaaataaggctgatcaattagactatgaaaattttcgacatgttgtacataaatggcattacaaactaaccaaggcatcggtacattgccttgaaacaggcgaatatactcacatcaggaatatcttgattgtgctaacaaaaatacttccttggtacccaaaagttttgaatctgggtcaagctttggaaagaagagtacacaaaatctgccaagaagaaaaagagaagaggccagatctatatgcattggctatgggctactctgggcagttgaaaagtagaaagtcatacatgatacctgaaaatgagtttcatcacaaagacccccctccgaggaatgcagttgccagtgtgcaaaatgggcctggtggtgggccttcttcatcatcaataggaagtgcatctaaatcggatgaaagcagtactgaggagactgataaatcaagggagagatctcagtgtggtgtgaaagctgttaataaagcttctagtaccacacctaaagggaattcaagcaatggaaatagtggctctaacagcaacaaagctgttaaagaaaatgacaaagaaaaagggaaagagaaagaaaaagagaaaaaagaaaagactccagctactactccagaggccagggtacttggtaaagatggtaaagaaaaaccaaaggaagagcggccaaataaagatgaaaaagcaagagagaccaaggaaagaacgccgaagtctgacaaagagaaagaaaaattcaagaaggaagaaaaagctaaagatgagaaatttaagaccactgtccccaacgcagaatcaaaatcaactcaagaaagggaaaagagagaaggagccatccagagaaagagatatagcaaaggaaatgaaatcaaaggaaaatgttaaaggaggagaaaaaacaccagtttctgggtccttgaaatcacctgttcccagatcagatattccagagcctgaaagggaacaaaaacgccgcaaaattgatactcacccttctccatcacattcctccacagtaaaggacagtctcatcgaactcaaggaatcttcagcaaagctctacattaatcatactcctccaccactgtccaagagtaaggagagagaaatggacaagaaagatttggacaagtcaagggaaagatccagagaaagagagaaaaaagatgaaaaggacaggaaagagcggaaaagggatcactcaaacaacgaccgtgaagtgccaccggacttaaccaagagacgtaaagaggagaatggaacaatgggggtttcaaaacataaaagtgaaagtccttgtgaatctccttatccaaatgagaaagacaaggaaaaaaataagtcaaaatcttcaggcaaagaaaaaggcagtgattcatttaaatctgagaagatggataaaatctcctccggtggcaaaaaggagtccaggcatgataaagaaaagatagaaaagaaagagaaacgggacagttcaggaggaaaggaagagaagaaacatcataagtcctcggacaagcacagataatgaagactttccatcaaggctatggacagaccccctaagccgaaagtctcccagaggaggatgccaaagctccgtgcgtcactctcagaatgatatctcccataattaagagcttctggtgctgtccatttaatgggaatctgctttaagtcagaagatgagtacacaccaccatcctcttgacgagacattccaaagtcactgattttcagaacattattttcacctccaggcagtttcttacagcaaggtccctgtgtatacattttttactcgagatacaccatccagaatcagcatctaatgaaaatttcactgagttttagttcattcttctttctctgaaaggagaggaaatcgcctccaggaaccagttccttaatgacgtagataggccgtctttgtgtgtgaactcctatacttttgacattactgggatgattatattgcttgaggattttggcttctagtaaaaattttaatttcagttcctggggaagacgttcttgacgtgttttaacagcaacagcaattttatcctttaatgtgaccttaaatgtgtcaccaaaatttcccttgcctcttgtaacgtggcacctttatgattgagaacccatttcttattctcctaatggccatactgtgataccatgatgctcttaattggaacattgacttttttttttttggcaatttaaacaattgagataaaattcatataacatcaaatttacctttcacttttttttttttcttttggagaccaagtctcgctgttgtctcccaggctggagtgcagtggcgcgatctcggctcactgtgacctccgcctcctgggttcaagcaattctccttcctcagcctcctgagtagctgggactacaggcgtgcaccaccacgcctggctaatttttgtatttttagtagagataggggtttcaccgtgttagccaggatggtctcgatctcctgacctggtgatccacctgcctcggcctcccaaagtgttgggattataagcgtgagccatgacgcctggcctcaaacttgccatttttaaagtgtacaattcaatggtttttagtatatccactatgttgtgcaagcatcaccgctgtctaattccagagcatttctgtcaccccaaaaagaaactccatgcctattagcagtcactcccagttcttcccttcctcggcccctggaaaccagtaatgtactttctgtctctgtgattttgcctgttttggacatttcatttaaatggaattatgcaataatttgtggccttttgtgtttggctttcacttagcatcatgttctcaaggctcatccatgttgtggcatgtatcagtactgcattcctttttatggctaaatgatgtttcattgtatgagtgtgtaccacattttatttatccattcagcaattaatggacaggaacaatggcttttaagtattaaattgtaagttcaacattaaatgtatccacagttattgataatatcaagattatacatggtgtgaacagaatgctgtgtcgaaatggtatgtaaattatttgtcagcatttcatgtaagtgattattttctaaggacccttctagccctggttttaagaaatatgtgaatgtagtattttcatcaataaagtttaatgcattaagcattagcttaaaatttgaatgaaggcagatgtgaagatatttgccacatgttgtaataatcatgttttgaaattatttcaatatgaagtatttgaaaaatgtcaatacataaaggaaaggaaatgagtataattaagtcaatatatttttaaagcaatttttataatttagcagacactgcatcttaatataagttactattaaaattgtgtccttgtgaaaaatgtgatgtcattttcctttttttgttgatcatgtaaaataggttacttttctttgctacattttctatttaataagctattgcttgccgttgtggaatgttttacttgttgctccatttttttctccctacccccacccctctctcccacacgcacacaatgttcaattttttttttaagtcatcattagtgtgtttatctttaatggattctaagaatggacaaaaagaaacacacaaatatttcatccttttctggggactcaagtctttgttaccgatggaactcattaacttcttgttctttcttaaatcttcctccctccttaccttttcctctccttccttctcttcttcttcctttcttctcccctccctccctccctcccttcttccctccctcctcctttcattctccttctctccttctcccttccttttctcctacctcctttgactaagcctccctcccctactccctcctttccttccttccttccttcttctctatcaatataatcactttgtttctttcaggtgagatcggactggaactgttcggctgcgaccagaaatttattttcctgagtaaattgccgagaattaagaatgaagagggccatttgcatctccttaaattattcagttacctgctttattgctccatgtggaaaacttaaaattgttaagttgtgcattactgtattttaacttgttgcttagtttctacatgtttattttcagtaatggctgaaagtgttaactgttccatacttttagcacaatgtgctgcataaggttacctgtgtacagagttttactttagattaactaaatattgcctgggttcagtttttatttccattctgaaatgcttcctttttattgtttgaaactgaaaataaacaattgttgaacccttttgattttacctcattttaaaactgttttaatttattatttggcttgttcttaatattagtcactaaaagcagtgggagcattgtcttatgaaatgcttaggaatcattttatatagtacatgtacaacattaaacgtgtttaaaaaagaaaaaggtaccagcgatcacttgtcccttgccattttttcttgtaattatgttagacaaatcttggcggcggggggatcaaaacataattgttttaattctacagctgtaggagctttgtattgctgaactttcatctggaaaagtttcacagtgacatttttaaaagagaatttttttatctgccgaattctaccagtgtaaccttttttctaaataaacaatagttttctcaaaaggttgtatatta

SEQ ID NO: 311830 - DNA, 9204 bp, Homo sapiens
  misc_feature (1594)..(1594): n is a, c, g, or t
  misc_feature (1597)..(1600): n is a, c, g, or t
  misc_feature (1603)..(1603): n is a, c, g, or t
  misc_feature (1607)..(1609): n is a, c, g, or t
acacatccgggcttctgctactagtgagaggaagatggcggccgcggctgtggtggttcccgcagagtggataaagaactgggagaaatcagggagaggcgaatttttgcatttatgtcggatcctcagtgaaaataaaagccatgatagttcaacatacagagatttccagcaagctctctatgagttgtcatatcatgtaattaaaggaaatctaaagcatgaacaggcatctaatgttcttagtgacattagtgaatttcgtgaggatatgccctccattcttgctgatgtattctgcatattagacattgagacaaattgtttagaagaaaaaagcaagagagactattttacacagttggtattagcatgtttgtatttagtttcagacacagttctaaaggaacgcctggatccagaaacactggaatcattagggcttatcaaacaatcacagcaattcaatcaaaagtcagttaaaatcaagacaaaactcttttataagcagcaaaaattcaatttgttaagagaagagaatgaaggttatgccaagctgattgctgaattggggcaagatttatctggaagtattactagtgatttaatcttagaaaatatcaaatctttaataggatgctttaatctggatcccaatagagttttggatgtcattttagaagtgtttgaatgcaggccagaacacgatgacttctttatatctttgttagaatcttacatgagtatgtgtgaaccgcaaacactgtgtcatattcttgggttcaaattcaagttttaccaggaaccaaatggcgagacaccatcatctttatacagagttgcagcagtacttctacaatttaatcttattgatttagatgatctttatgtacatcttcttccggctgataattgcattatggatgaacacaaacgagaaattgcggaagctaagcaaattgttagaaagcttacgatggttgtgttgtcttctgaaaaaatggatgagcgagagaaagaaaaggaaaaagaagaggagaaagtagagaaaccacctgataaccaaaaacttggcttgttggaagccttattaaagattggtgattggcaacatgcacagaacattatggatcagatgcctccatactatgcagcttcacacaagctaatagcccttgctatttgcaagctcattcatataactattgagcctctctaccgaagagttggagttcctaaaggtgctaaaggctcacctgttaatgctttgcaaaacaagagagcaccaaaacaagctgagagctttgaagatttgaggagagacgtgttcaatatgttctgttaccttggtcctcacctttctcacgatcccattttatttgcaaaagtggtgcgcataggcaagtcatttatgaaggagtttcagtctgatggaagcaaacaagaagataaagaaaaaacggaagttatccttagctgtttgcttagcattactgaccaggtactacttccatctctttctttgatggactgcaatgcttgtatgtctgaggaactatggggaatgtttaaaacatttccatatcagcatagntannnnctntatnnncatgaaagaatgaaacatgatgacacaaccatctcaagctggcttcagagtctggctagtttctgtggtgcagtttttcgtaaatatccaattgatcttgctggtcttcttcagtatgttgccaatcagctaaaggcgggcaaaagttttgacctgcttatattgaaagaagtggtacaaaaaatggcaggaatagaaattacagaggaaatgacaatggagcaactagaggctatgactggtggagagcagctaaaagctgagggtggttattttggtcagatcagaaacactaaaaaatcctctcagagattaaaggatgctctattggaccatgatcttgcccttcctctctgtctgcttatggctcagcagagaaatggggtaatctttcaggaaggtggagagaaacatttgaaacttgtgggaaagctctatgaccagtgtcatgataccctggtgcagtttggtgggtttttagcatctaatctgagcacagaagattatataaagcgagtgccttcaattgatgtactctgtaatgaatttcatacaccccatgatgcagcatttttcctgtctaggccaatgtatgcccatcatatttcgtcaaagtatgatgaacttaaaaaatcagaaaagggaagtaaacagcaacataaagttcataagtacattacatcatgtgagatggtgatggcgcctgtccatgaagcagtggtctccttacatgtttccaaagtctgggatgacatcagccctcaattctatgctacattctggtcattgacaatgtatgaccttgcagttccacacaccagctatgaacgagaagtcaataaacttaaagtccagatgaaagcaattgatgacaatcaggaaatgcccccaaataaaaagaaaaaagagaaggagcgctgtactgcccttcaggacaagcttcttgaagaagaaaagaaacagatggaacatgtacagagagttctacagagattgaaactggaaaaggacaactggcttttagcaaaatctaccaaaaatgagaccatcacaaaatttctacagctgtgtatatttcctcgatgtattttttcagcaattgatgctgtttactgtgctcgttttgttgaattggtacatcaacagaaaactccaaatttttccacacttctttgctatgatcgagttttctctgacataatttacacagttgcaagctgtactgaaaatgaagccagtcgatacggaaggtttctttgctgcatgttagagactgtgaccaggtggcatagtgatagagccacatatgaaaaggaatgtggaaactatccaggattccttaccatattacgggcaactggatttgatggtggaaataaggctgatcaattagactatgaaaattttcgacatgttgtacataaatggcattacaaactaaccaaggcatcggtacattgccttgaaacaggcgaatatactcacatcaggaatatcttgattgtgctaacaaaaatacttccttggtacccaaaagttttgaatctgggtcaagctttggaaagaagagtacacaaaatctgccaagaagaaaaagagaagaggccagatctatatgcattggctatgggctactctgggcagttgaaaagtagaaagtcatacatgatacctgaaaatgagtttcatcacaaagacccccctccgaggaatgcagttgccagtgtgcaaaatgggcctggtggtgggccttcttcatcatcaataggaagtgcatctaaatcggatgaaagcagtactgaggagactgataaatcaagggagagatctcagtgtggtgtgaaagctgttaataaagcttctagtaccacacctaaagggaattcaagcaatggaaatagtggctctaacagcaacaaagctgttaaagaaaatgacaaagaaaaagggaaagagaaagaaaaagagaaaaaagaaaagactccagctactactccagaggccagggtacttggtaaagatggtaaagaaaaaccaaaggaagagcggccaaataaagatgaaaaagcaagagagaccaaggaaagaacgccgaagtctgacaaagagaaagaaaaattcaagaaggaagaaaaagctaaagatgagaaatttaagaccactgtccccaacgcagaatcaaaatcaactcaagaaagggaaaagagagaaggagccatccagagaaagagatatagcaaaggaaatgaaatcaaaggaaaatgttaaaggaggagaaaaaacaccagtttctgggtccttgaaatcacctgttcccagatcagatattccagagcctgaaagggaacaaaaacgccgcaaaattgatactcacccttctccatcacattcctccacagtaaagaaggttagtatagcctgaggaaggcagcgtccatgttaggctcacctgtttggaataccagtgtcctgacttccttcaagtcttatgccaagcattcactggagccactggaggttttatattgcattagaaaatgaatttttctatattggtggactgattttttttcctattgagtatttttattataaaaatgttaaaacttcaaggacttagcactaattttgtagtgtttcaaagtgcaagagaaattttacccagaagtgcctcaactgctttaagcagtcttttttggagtgcaatggtagctacaagcaaacgaatcttttcagcagaatgaagcctatttttcagcatattgaagaatatatagcactgaagacttcctggatgacacaagataaacaagttacctctgaattcaagcttcttgatgagcatcataccgatgtgtgccttctaagaaggagtcttgaaaggagttccattttaaagtctccttggtgatcagttctcctgtagttgtgtatattcagtgagcatgcagcttctgttgtatcttcccttggaggtttgtttatacccattgggttcccaacaagttgaaccttgcgttacgataaaagcagatgtggcatccaatcctaccacccagcaaagagaaaccccaggcattcaactgcagcacaaaatcgtgggtgtagccttcttgaagactcagggtagccattccttgctccatatttaattttaattctaaagtcatctaatttcatggaatctttgaatttgcagtacgttgaacttttaaaaaactgtaagttattaattgttcatcaagagcactgtggtggaatatcgtagttgatttctttttctttctttttttttaatgctttctttgtgtgtgggaggtgtgagattcaccatgataggcactttgcagaaaaaaaaagtgattactcttatatattttgttttcttgttaatacaatgccactgaatttttcagctaggatgtgtatattcatattagagttaaaaataaagtaaaatgtgaatcctcccaattaaagaagaactatgaaaaatataaggcaatgttgttcttccacagtgacctccagtattttaaattttttgtggagaaaaaaatgttttgctttcttaaacctcttaactatagcttaagtagagagatatgaacaatgtggcattgacatttatttttaaattctgagcagagaaagatttttatttcttacattgagtacatttaatttagtttttaacattccaattccattacatgtttttttttattgttgatattcatattgataatgacatcatgaaatttatcctcacaagaagtagctggtttatttccaggttacagccatacttcccaaagttcctctgggttctgagaactatgccagctcacctgtcatctccattcattttctacaggacagtctcatcgaactcaaggaatcttcagcaaagctctacattaatcatactcctccaccactgtccaagagtaaggagagagaaatggacaagaaagatttggacaagtcaagggaaagatccagagaaagagagaaaaaagatgaaaaggacaggaaagagcggaaaagggatcactcaaacaacgaccgtgaagtgccaccggacttaaccaagagacgtaaagaggagaatggaacaatgggggtttcaaaacataaaagtgaaagtccttgtgaatctccttatccaaatgagaaagacaaggaaaaaaataagtcaaaatcttcaggcaaagaaaaaggcagtgattcatttaaatctgagaagatggataaaatctcctccggtggcaaaaaggagtccaggcatgataaagaaaagatagaaaagaaagagaaacgggacagttcaggaggaaaggaagagaagaaacatcataagtcctcggacaagcacagataatgaagactttccatcaaggctatggacagaccccctaagccgaaagtctcccagaggaggatgccaaagctccgtgcgtcactctcagaatgatatctcccataattaagagcttctggtgctgtccatttaatgggaatctgctttaagtcagaagatgagtacacaccaccatcctcttgacgagacattccaaagtcactgattttcagaacattattttcacctccaggcagtttcttacagcaaggtccctgtgtatacattttttactcgagatacaccatccagaatcagcatctaatgaaaatttcactgagttttagttcattcttctttctctgaaaggagaggaaatcgcctccaggaaccagttccttaatgacgtagataggccgtctttgtgtgtgaactcctatacttttgacattactgggatgattatattgcttgaggattttggcttctagtaaaaattttaatttcagttcctggggaagacgttcttgacgtgttttaacagcaacagcaattttatcctttaatgtgaccttaaatgtgtcaccaaaatttcccttgcctcttgtaacgtggcacctttatgattgagaacccatttcttattctcctaatggccatactgtgataccatgatgctcttaattggaacattgacttttttttttttggcaatttaaacaattgagataaaattcatataacatcaaatttacctttcacttttttttttttcttttggagaccaagtctcgctgttgtctcccaggctggagtgcagtggcgcgatctcggctcactgtgacctccgcctcctgggttcaagcaattctccttcctcagcctcctgagtagctgggactacaggcgtgcaccaccacgcctggctaatttttgtatttttagtagagataggggtttcaccgtgttagccaggatggtctcgatctcctgacctggtgatccacctgcctcggcctcccaaagtgttgggattataagcgtgagccatgacgcctggcctcaaacttgccatttttaaagtgtacaattcaatggtttttagtatatccactatgttgtgcaagcatcaccgctgtctaattccagagcatttctgtcaccccaaaaagaaactccatgcctattagcagtcactcccagttcttcccttcctcggcccctggaaaccagtaatgtactttctgtctctgtgattttgcctgttttggacatttcatttaaatggaattatgcaataatttgtggccttttgtgtttggctttcacttagcatcatgttctcaaggctcatccatgttgtggcatgtatcagtactgcattcctttttatggctaaatgatgtttcattgtatgagtgtgtaccacattttatttatccattcagcaattaatggacaggaacaatggcttttaagtattaaattgtaagttcaacattaaatgtatccacagttattgataatatcaagattatacatggtgtgaacagaatgctgtgtcgaaatggtatgtaaattatttgtcagcatttcatgtaagtgattattttctaaggacccttctagccctggttttaagaaatatgtgaatgtagtattttcatcaataaagtttaatgcattaagcattagcttaaaatttgaatgaaggcagatgtgaagatatttgccacatgttgtaataatcatgttttgaaattatttcaatatgaagtatttgaaaaatgtcaatacataaaggaaaggaaatgagtataattaagtcaatatatttttaaagcaatttttataatttagcagacactgcatcttaatataagttactattaaaattgtgtccttgtgaaaaatgtgatgtcattttcctttttttgttgatcatgtaaaataggttacttttctttgctacattttctatttaataagctattgcttgccgttgtggaatgttttacttgttgctccatttttttctccctacccccacccctctctcccacacgcacacaatgttcaattttttttttaagtcatcattagtgtgtttatctttaatggattctaagaatggacaaaaagaaacacacaaatatttcatccttttctggggactcaagtctttgttaccgatggaactcattaacttcttgttctttcttaaatcttcctccctccttaccttttcctctccttccttctcttcttcttcctttcttctcccctccctccctccctcccttcttccctccctcctcctttcattctccttctctccttctcccttccttttctcctacctcctttgactaagcctccctcccctactccctcctttccttccttccttccttcttctctatcaatataatcactttgtttctttcaggtgagatcggactggaactgttcggctgcgaccagaaatttattttcctgagtaaattgccgagaattaagaatgaagagggccatttgcatctccttaaattattcagttacctgctttattgctccatgtggaaaacttaaaattgttaagttgtgcattactgtattttaacttgttgcttagtttctacatgtttattttcagtaatggctgaaagtgttaactgttccatacttttagcacaatgtgctgcataaggttacctgtgtacagagttttactttagattaactaaatattgcctgggttcagtttttatttccattctgaaatgcttcctttttattgtttgaaactgaaaataaacaattgttgaacccttttgattttacctcattttaaaactgttttaatttattatttggcttgttcttaatattagtcactaaaagcagtgggagcattgtcttatgaaatgcttaggaatcattttatatagtacatgtacaacattaaacgtgtttaaaaaagaaaaaggtaccagcgatcacttgtcccttgccattttttcttgtaattatgttagacaaatcttggcggcggggggatcaaaacataattgttttaattctacagctgtaggagctttgtattgctgaactttcatctggaaaagtttcacagtgacatttttaaaagagaatttttttatctgccgaattctaccagtgtaaccttttttctaaataaacaatagttttctcaaaaggttgtatatta

SEQ ID NO: 311831 - DNA, 7812 bp, Homo sapiens
  misc_feature (1594)..(1594): n is a, c, g, or t
  misc_feature (1597)..(1600): n is a, c, g, or t
  misc_feature (1603)..(1603): n is a, c, g, or t
  misc_feature (1607)..(1609): n is a, c, g, or t
acacatccgggcttctgctactagtgagaggaagatggcggccgcggctgtggtggttcccgcagagtggataaagaactgggagaaatcagggagaggcgaatttttgcatttatgtcggatcctcagtgaaaataaaagccatgatagttcaacatacagagatttccagcaagctctctatgagttgtcatatcatgtaattaaaggaaatctaaagcatgaacaggcatctaatgttcttagtgacattagtgaatttcgtgaggatatgccctccattcttgctgatgtattctgcatattagacattgagacaaattgtttagaagaaaaaagcaagagagactattttacacagttggtattagcatgtttgtatttagtttcagacacagttctaaaggaacgcctggatccagaaacactggaatcattagggcttatcaaacaatcacagcaattcaatcaaaagtcagttaaaatcaagacaaaactcttttataagcagcaaaaattcaatttgttaagagaagagaatgaaggttatgccaagctgattgctgaattggggcaagatttatctggaagtattactagtgatttaatcttagaaaatatcaaatctttaataggatgctttaatctggatcccaatagagttttggatgtcattttagaagtgtttgaatgcaggccagaacacgatgacttctttatatctttgttagaatcttacatgagtatgtgtgaaccgcaaacactgtgtcatattcttgggttcaaattcaagttttaccaggaaccaaatggcgagacaccatcatctttatacagagttgcagcagtacttctacaatttaatcttattgatttagatgatctttatgtacatcttcttccggctgataattgcattatggatgaacacaaacgagaaattgcggaagctaagcaaattgttagaaagcttacgatggttgtgttgtcttctgaaaaaatggatgagcgagagaaagaaaaggaaaaagaagaggagaaagtagagaaaccacctgataaccaaaaacttggcttgttggaagccttattaaagattggtgattggcaacatgcacagaacattatggatcagatgcctccatactatgcagcttcacacaagctaatagcccttgctatttgcaagctcattcatataactattgagcctctctaccgaagagttggagttcctaaaggtgctaaaggctcacctgttaatgctttgcaaaacaagagagcaccaaaacaagctgagagctttgaagatttgaggagagacgtgttcaatatgttctgttaccttggtcctcacctttctcacgatcccattttatttgcaaaagtggtgcgcataggcaagtcatttatgaaggagtttcagtctgatggaagcaaacaagaagataaagaaaaaacggaagttatccttagctgtttgcttagcattactgaccaggtactacttccatctctttctttgatggactgcaatgcttgtatgtctgaggaactatggggaatgtttaaaacatttccatatcagcatagntannnnctntatnnncatgaaagaatgaaacatgatgacacaaccatctcaagctggcttcagagtctggctagtttctgtggtgcagtttttcgtaaatatccaattgatcttgctggtcttcttcagtatgttgccaatcagctaaaggcgggcaaaagttttgacctgcttatattgaaagaagtggtacaaaaaatggcaggaatagaaattacagaggaaatgacaatggagcaactagaggctatgactggtggagagcagctaaaagctgagggtggttattttggtcagatcagaaacactaaaaaatcctctcagagattaaaggatgctctattggaccatgatcttgcccttcctctctgtctgcttatggctcagcagagaaatggggtaatctttcaggaaggtggagagaaacatttgaaacttgtgggaaagctctatgaccagtgtcatgataccctggtgcagtttggtgggtttttagcatctaatctgagcacagaagattatataaagcgagtgccttcaattgatgtactctgtaatgaatttcatacaccccatgatgcagcatttttcctgtctaggccaatgtatgcccatcatatttcgtcaaagtatgatgaacttaaaaaatcagaaaagggaagtaaacagcaacataaagttcataagtacattacatcatgtgagatggtgatggcgcctgtccatgaagcagtggtctccttacatgtttccaaagtctgggatgacatcagccctcaattctatgctacattctggtcattgacaatgtatgaccttgcagttccacacaccagctatgaacgagaagtcaataaacttaaagtccagatgaaagcaattgatgacaatcaggaaatgcccccaaataaaaagaaaaaagagaaggagcgctgtactgcccttcaggacaagcttcttgaagaagaaaagaaacagatggaacatgtacagagagttctacagagattgaaactggaaaaggacaactggcttttagcaaaatctaccaaaaatgagaccatcacaaaatttctacagctgtgtatatttcctcgatgtattttttcagcaattgatgctgtttactgtgctcgttttgttgaattggtacatcaacagaaaactccaaatttttccacacttctttgctatgatcgagttttctctgacataatttacacagttgcaagctgtactgaaaatgaagccagtcgatacggaaggtttctttgctgcatgttagagactgtgaccaggtggcatagtgatagagccacatatgaaaaggaatgtggaaactatccaggattccttaccatattacgggcaactggatttgatggtggaaataaggctgatcaattagactatgaaaattttcgacatgttgtacataaatggcattacaaactaaccaaggcatcggtacattgccttgaaacaggcgaatatactcacatcaggaatatcttgattgtgctaacaaaaatacttccttggtacccaaaagttttgaatctgggtcaagctttggaaagaagagtacacaaaatctgccaagaagaaaaagagaagaggccagatctatatgcattggctatgggctactctgggcagttgaaaagtagaaagtcatacatgatacctgaaaatgagtttcatcacaaagacccccctccgaggaatgcagttgccagtgtgcaaaatgggcctggtggtgggccttcttcatcatcaataggaagtgcatctaaatcggatgaaagcagtactgaggagactgataaatcaagggagagatctcagtgtggtgtgaaagctgttaataaagcttctagtaccacacctaaagggaattcaagcaatggaaatagtggctctaacagcaacaaagctgttaaagaaaatgacaaagaaaaagggaaagagaaagaaaaagagaaaaaagaaaagactccagctactactccagaggccagggtacttggtaaagatggtaaagaaaaaccaaaggaagagcggccaaataaagatgaaaaagcaagagagaccaaggaaagaacgccgaagtctgacaaagagaaagaaaaattcaagaaggaagaaaaagctaaagatgagaaatttaagaccactgtccccaacgcagaatcaaaatcaactcaagaaagggaaaagagagaaggagccatccagagaaagagatatagcaaaggaaatgaaatcaaaggaaaatgttaaaggaggagaaaaaacaccagtttctgggtccttgaaatcacctgttcccagatcagatattccagagcctgaaagggaacaaaaacgccgcaaaattgatactcacccttctccatcacattcctccacagtaaaggttacagccatacttcccaaagttcctctgggttctgagaactatgccagctcacctgtcatctccattcattttctacaggacagtctcatcgaactcaaggaatcttcagcaaagctctacattaatcatactcctccaccactgtccaagagtaaggagagagaaatggacaagaaagatttggacaagtcaagggaaagatccagagaaagagagaaaaaagatgaaaaggacaggaaagagcggaaaagggatcactcaaacaacgaccgtgaagtgccaccggacttaaccaagagacgtaaagaggagaatggaacaatgggggtttcaaaacataaaagtgaaagtccttgtgaatctccttatccaaatgagaaagacaaggaaaaaaataagtcaaaatcttcaggcaaagaaaaaggcagtgattcatttaaatctgagaagatggataaaatctcctccggtggcaaaaaggagtccaggcatgataaagaaaagatagaaaagaaagagaaacgggacagttcaggaggaaaggaagagaagaaacatcataagtcctcggacaagcacagataatgaagactttccatcaaggctatggacagaccccctaagccgaaagtctcccagaggaggatgccaaagctccgtgcgtcactctcagaatgatatctcccataattaagagcttctggtgctgtccatttaatgggaatctgctttaagtcagaagatgagtacacaccaccatcctcttgacgagacattccaaagtcactgattttcagaacattattttcacctccaggcagtttcttacagcaaggtccctgtgtatacattttttactcgagatacaccatccagaatcagcatctaatgaaaatttcactgagttttagttcattcttctttctctgaaaggagaggaaatcgcctccaggaaccagttccttaatgacgtagataggccgtctttgtgtgtgaactcctatacttttgacattactgggatgattatattgcttgaggattttggcttctagtaaaaattttaatttcagttcctggggaagacgttcttgacgtgttttaacagcaacagcaattttatcctttaatgtgaccttaaatgtgtcaccaaaatttcccttgcctcttgtaacgtggcacctttatgattgagaacccatttcttattctcctaatggccatactgtgataccatgatgctcttaattggaacattgacttttttttttttggcaatttaaacaattgagataaaattcatataacatcaaatttacctttcacttttttttttttcttttggagaccaagtctcgctgttgtctcccaggctggagtgcagtggcgcgatctcggctcactgtgacctccgcctcctgggttcaagcaattctccttcctcagcctcctgagtagctgggactacaggcgtgcaccaccacgcctggctaatttttgtatttttagtagagataggggtttcaccgtgttagccaggatggtctcgatctcctgacctggtgatccacctgcctcggcctcccaaagtgttgggattataagcgtgagccatgacgcctggcctcaaacttgccatttttaaagtgtacaattcaatggtttttagtatatccactatgttgtgcaagcatcaccgctgtctaattccagagcatttctgtcaccccaaaaagaaactccatgcctattagcagtcactcccagttcttcccttcctcggcccctggaaaccagtaatgtactttctgtctctgtgattttgcctgttttggacatttcatttaaatggaattatgcaataatttgtggccttttgtgtttggctttcacttagcatcatgttctcaaggctcatccatgttgtggcatgtatcagtactgcattcctttttatggctaaatgatgtttcattgtatgagtgtgtaccacattttatttatccattcagcaattaatggacaggaacaatggcttttaagtattaaattgtaagttcaacattaaatgtatccacagttattgataatatcaagattatacatggtgtgaacagaatgctgtgtcgaaatggtatgtaaattatttgtcagcatttcatgtaagtgattattttctaaggacccttctagccctggttttaagaaatatgtgaatgtagtattttcatcaataaagtttaatgcattaagcattagcttaaaatttgaatgaaggcagatgtgaagatatttgccacatgttgtaataatcatgttttgaaattatttcaatatgaagtatttgaaaaatgtcaatacataaaggaaaggaaatgagtataattaagtcaatatatttttaaagcaatttttataatttagcagacactgcatcttaatataagttactattaaaattgtgtccttgtgaaaaatgtgatgtcattttcctttttttgttgatcatgtaaaataggttacttttctttgctacattttctatttaataagctattgcttgccgttgtggaatgttttacttgttgctccatttttttctccctacccccacccctctctcccacacgcacacaatgttcaattttttttttaagtcatcattagtgtgtttatctttaatggattctaagaatggacaaaaagaaacacacaaatatttcatccttttctggggactcaagtctttgttaccgatggaactcattaacttcttgttctttcttaaatcttcctccctccttaccttttcctctccttccttctcttcttcttcctttcttctcccctccctccctccctcccttcttccctccctcctcctttcattctccttctctccttctcccttccttttctcctacctcctttgactaagcctccctcccctactccctcctttccttccttccttccttcttctctatcaatataatcactttgtttctttcaggtgagatcggactggaactgttcggctgcgaccagaaatttattttcctgagtaaattgccgagaattaagaatgaagagggccatttgcatctccttaaattattcagttacctgctttattgctccatgtggaaaacttaaaattgttaagttgtgcattactgtattttaacttgttgcttagtttctacatgtttattttcagtaatggctgaaagtgttaactgttccatacttttagcacaatgtgctgcataaggttacctgtgtacagagttttactttagattaactaaatattgcctgggttcagtttttatttccattctgaaatgcttcctttttattgtttgaaactgaaaataaacaattgttgaacccttttgattttacctcattttaaaactgttttaatttattatttggcttgttcttaatattagtcactaaaagcagtgggagcattgtcttatgaaatgcttaggaatcattttatatagtacatgtacaacattaaacgtgtttaaaaaagaaaaaggtaccagcgatcacttgtcccttgccattttttcttgtaattatgttagacaaatcttggcggcggggggatcaaaacataattgttttaattctacagctgtaggagctttgtattgctgaactttcatctggaaaagtttcacagtgacatttttaaaagagaatttttttatctgccgaattctaccagtgtaaccttttttctaaataaacaatagttttctcaaaaggttgtatatta

SEQ ID NO: 311832 - DNA, 8235 bp, Homo sapiens
  misc_feature (1594)..(1594): n is a, c, g, or t
  misc_feature (1597)..(1600): n is a, c, g, or t
  misc_feature (1603)..(1603): n is a, c, g, or t
  misc_feature (1607)..(1609): n is a, c, g, or t
acacatccgggcttctgctactagtgagaggaagatggcggccgcggctgtggtggttcccgcagagtggataaagaactgggagaaatcagggagaggcgaatttttgcatttatgtcggatcctcagtgaaaataaaagccatgatagttcaacatacagagatttccagcaagctctctatgagttgtcatatcatgtaattaaaggaaatctaaagcatgaacaggcatctaatgttcttagtgacattagtgaatttcgtgaggatatgccctccattcttgctgatgtattctgcatattagacattgagacaaattgtttagaagaaaaaagcaagagagactattttacacagttggtattagcatgtttgtatttagtttcagacacagttctaaaggaacgcctggatccagaaacactggaatcattagggcttatcaaacaatcacagcaattcaatcaaaagtcagttaaaatcaagacaaaactcttttataagcagcaaaaattcaatttgttaagagaagagaatgaaggttatgccaagctgattgctgaattggggcaagatttatctggaagtattactagtgatttaatcttagaaaatatcaaatctttaataggatgctttaatctggatcccaatagagttttggatgtcattttagaagtgtttgaatgcaggccagaacacgatgacttctttatatctttgttagaatcttacatgagtatgtgtgaaccgcaaacactgtgtcatattcttgggttcaaattcaagttttaccaggaaccaaatggcgagacaccatcatctttatacagagttgcagcagtacttctacaatttaatcttattgatttagatgatctttatgtacatcttcttccggctgataattgcattatggatgaacacaaacgagaaattgcggaagctaagcaaattgttagaaagcttacgatggttgtgttgtcttctgaaaaaatggatgagcgagagaaagaaaaggaaaaagaagaggagaaagtagagaaaccacctgataaccaaaaacttggcttgttggaagccttattaaagattggtgattggcaacatgcacagaacattatggatcagatgcctccatactatgcagcttcacacaagctaatagcccttgctatttgcaagctcattcatataactattgagcctctctaccgaagagttggagttcctaaaggtgctaaaggctcacctgttaatgctttgcaaaacaagagagcaccaaaacaagctgagagctttgaagatttgaggagagacgtgttcaatatgttctgttaccttggtcctcacctttctcacgatcccattttatttgcaaaagtggtgcgcataggcaagtcatttatgaaggagtttcagtctgatggaagcaaacaagaagataaagaaaaaacggaagttatccttagctgtttgcttagcattactgaccaggtactacttccatctctttctttgatggactgcaatgcttgtatgtctgaggaactatggggaatgtttaaaacatttccatatcagcatagntannnnctntatnnncatgaaagaatgaaacatgatgacacaaccatctcaagctggcttcagagtctggctagtttctgtggtgcagtttttcgtaaatatccaattgatcttgctggtcttcttcagtatgttgccaatcagctaaaggcgggcaaaagttttgacctgcttatattgaaagaagtggtacaaaaaatggcaggaatagaaattacagaggaaatgacaatggagcaactagaggctatgactggtggagagcagctaaaagctgagggtggttattttggtcagatcagaaacactaaaaaatcctctcagagattaaaggatgctctattggaccatgatcttgcccttcctctctgtctgcttatggctcagcagagaaatggggtaatctttcaggaaggtggagagaaacatttgaaacttgtgggaaagctctatgaccagtgtcatgataccctggtgcagtttggtgggtttttagcatctaatctgagcacagaagattatataaagcgagtgccttcaattgatgtactctgtaatgaatttcatacaccccatgatgcagcatttttcctgtctaggccaatgtatgcccatcatatttcgtcaaagtatgatgaacttaaaaaatcagaaaagggaagtaaacagcaacataaagttcataagtacattacatcatgtgagatggtgatggcgcctgtccatgaagcagtggtctccttacatgtttccaaagtctgggatgacatcagccctcaattctatgctacattctggtcattgacaatgtatgaccttgcagttccacacaccagctatgaacgagaagtcaataaacttaaagtccagatgaaagcaattgatgacaatcaggaaatgcccccaaataaaaagaaaaaagagaaggagcgctgtactgcccttcaggacaagcttcttgaagaagaaaagaaacagatggaacatgtacagagagttctacagagattgaaactggaaaaggacaactggcttttagcaaaatctaccaaaaatgagaccatcacaaaatttctacagctgtgtatatttcctcgatgtattttttcagcaattgatgctgtttactgtgctcgttttgttgaattggtacatcaacagaaaactccaaatttttccacacttctttgctatgatcgagttttctctgacataatttacacagttgcaagctgtactgaaaatgaagccagtcgatacggaaggtttctttgctgcatgttagagactgtgaccaggtggcatagtgatagagccacatatgaaaaggaatgtggaaactatccaggattccttaccatattacgggcaactggatttgatggtggaaataaggctgatcaattagactatgaaaattttcgacatgttgtacataaatggcattacaaactaaccaaggcatcggtacattgccttgaaacaggcgaatatactcacatcaggaatatcttgattgtgctaacaaaaatacttccttggtacccaaaagttttgaatctgggtcaagctttggaaagaagagtacacaaaatctgccaagaagaaaaagagaagaggccagatctatatgcattggctatggggtaacaaaattatattttaatgtgatttacaagactagatgacagaaggattctgaagactttaaaatgttttacagtgttgaagtttatcttctgccttcaggagattatgggagattatgcgatcatgtttccacaggctggtgagagttaccacttctgattatcaacttccggtctatactggatgatagtttttttaaagtcatgtataatatttcttgattgggaggaaatataattttatcatcatagttaacagatcttcaagagtaaaaaaaaaaaagccatcttagtttaaggattagtttatagtgaaattgtaatttttaagaaagctgggcgttctataaaaaccttcaagaacttattaaaaattggtattttttaattctctagaaccacatagtagaatgaataacttgctaattttattcttaaaaacctcatgtttatgttttttgatttgtgtttgtatatttaaacactttgtgcgactttcagctactctgggcagttgaaaagtagaaagtcatacatgatacctgaaaatgagtttcatcacaaagacccccctccgaggaatgcagttgccagtgtgcaaaatgggcctggtggtgggccttcttcatcatcaataggaagtgcatctaaatcggatgaaagcagtactgaggagactgataaatcaagggagagatctcagtgtggtgtgaaagctgttaataaagcttctagtaccacacctaaagggaattcaagcaatggaaatagtggctctaacagcaacaaagctgttaaagaaaatgacaaagaaaaagggaaagagaaagaaaaagagaaaaaagaaaagactccagctactactccagaggccagggtacttggtaaagatggtaaagaaaaaccaaaggaagagcggccaaataaagatgaaaaagcaagagagaccaaggaaagaacgccgaagtctgacaaagagaaagaaaaattcaagaaggaagaaaaagctaaagatgagaaatttaagaccactgtccccaacgcagaatcaaaatcaactcaagaaagggaaaagagagaaggagccatccagagaaagagatatagcaaaggaaatgaaatcaaaggaaaatgttaaaggaggagaaaaaacaccagtttctgggtccttgaaatcacctgttcccagatcagatattccagagcctgaaagggaacaaaaacgccgcaaaattgatactcacccttctccatcacattcctccacagtaaaggacagtctcatcgaactcaaggaatcttcagcaaagctctacattaatcatactcctccaccactgtccaagagtaaggagagagaaatggacaagaaagatttggacaagtcaagggaaagatccagagaaagagagaaaaaagatgaaaaggacaggaaagagcggaaaagggatcactcaaacaacgaccgtgaagtgccaccggacttaaccaagagacgtaaagaggagaatggaacaatgggggtttcaaaacataaaagtgaaagtccttgtgaatctccttatccaaatgagaaagacaaggaaaaaaataagtcaaaatcttcaggcaaagaaaaaggcagtgattcatttaaatctgagaagatggataaaatctcctccggtggcaaaaaggagtccaggcatgataaagaaaagatagaaaagaaagagaaacgggacagttcaggaggaaaggaagagaagaaacatcataagtcctcggacaagcacagataatgaagactttccatcaaggctatggacagaccccctaagccgaaagtctcccagaggaggatgccaaagctccgtgcgtcactctcagaatgatatctcccataattaagagcttctggtgctgtccatttaatgggaatctgctttaagtcagaagatgagtacacaccaccatcctcttgacgagacattccaaagtcactgattttcagaacattattttcacctccaggcagtttcttacagcaaggtccctgtgtatacattttttactcgagatacaccatccagaatcagcatctaatgaaaatttcactgagttttagttcattcttctttctctgaaaggagaggaaatcgcctccaggaaccagttccttaatgacgtagataggccgtctttgtgtgtgaactcctatacttttgacattactgggatgattatattgcttgaggattttggcttctagtaaaaattttaatttcagttcctggggaagacgttcttgacgtgttttaacagcaacagcaattttatcctttaatgtgaccttaaatgtgtcaccaaaatttcccttgcctcttgtaacgtggcacctttatgattgagaacccatttcttattctcctaatggccatactgtgataccatgatgctcttaattggaacattgacttttttttttttggcaatttaaacaattgagataaaattcatataacatcaaatttacctttcacttttttttttttcttttggagaccaagtctcgctgttgtctcccaggctggagtgcagtggcgcgatctcggctcactgtgacctccgcctcctgggttcaagcaattctccttcctcagcctcctgagtagctgggactacaggcgtgcaccaccacgcctggctaatttttgtatttttagtagagataggggtttcaccgtgttagccaggatggtctcgatctcctgacctggtgatccacctgcctcggcctcccaaagtgttgggattataagcgtgagccatgacgcctggcctcaaacttgccatttttaaagtgtacaattcaatggtttttagtatatccactatgttgtgcaagcatcaccgctgtctaattccagagcatttctgtcaccccaaaaagaaactccatgcctattagcagtcactcccagttcttcccttcctcggcccctggaaaccagtaatgtactttctgtctctgtgattttgcctgttttggacatttcatttaaatggaattatgcaataatttgtggccttttgtgtttggctttcacttagcatcatgttctcaaggctcatccatgttgtggcatgtatcagtactgcattcctttttatggctaaatgatgtttcattgtatgagtgtgtaccacattttatttatccattcagcaattaatggacaggaacaatggcttttaagtattaaattgtaagttcaacattaaatgtatccacagttattgataatatcaagattatacatggtgtgaacagaatgctgtgtcgaaatggtatgtaaattatttgtcagcatttcatgtaagtgattattttctaaggacccttctagccctggttttaagaaatatgtgaatgtagtattttcatcaataaagtttaatgcattaagcattagcttaaaatttgaatgaaggcagatgtgaagatatttgccacatgttgtaataatcatgttttgaaattatttcaatatgaagtatttgaaaaatgtcaatacataaaggaaaggaaatgagtataattaagtcaatatatttttaaagcaatttttataatttagcagacactgcatcttaatataagttactattaaaattgtgtccttgtgaaaaatgtgatgtcattttcctttttttgttgatcatgtaaaataggttacttttctttgctacattttctatttaataagctattgcttgccgttgtggaatgttttacttgttgctccatttttttctccctacccccacccctctctcccacacgcacacaatgttcaattttttttttaagtcatcattagtgtgtttatctttaatggattctaagaatggacaaaaagaaacacacaaatatttcatccttttctggggactcaagtctttgttaccgatggaactcattaacttcttgttctttcttaaatcttcctccctccttaccttttcctctccttccttctcttcttcttcctttcttctcccctccctccctccctcccttcttccctccctcctcctttcattctccttctctccttctcccttccttttctcctacctcctttgactaagcctccctcccctactccctcctttccttccttccttccttcttctctatcaatataatcactttgtttctttcaggtgagatcggactggaactgttcggctgcgaccagaaatttattttcctgagtaaattgccgagaattaagaatgaagagggccatttgcatctccttaaattattcagttacctgctttattgctccatgtggaaaacttaaaattgttaagttgtgcattactgtattttaacttgttgcttagtttctacatgtttattttcagtaatggctgaaagtgttaactgttccatacttttagcacaatgtgctgcataaggttacctgtgtacagagttttactttagattaactaaatattgcctgggttcagtttttatttccattctgaaatgcttcctttttattgtttgaaactgaaaataaacaattgttgaacccttttgattttacctcattttaaaactgttttaatttattatttggcttgttcttaatattagtcactaaaagcagtgggagcattgtcttatgaaatgcttaggaatcattttatatagtacatgtacaacattaaacgtgtttaaaaaagaaaaaggtaccagcgatcacttgtcccttgccattttttcttgtaattatgttagacaaatcttggcggcggggggatcaaaacataattgttttaattctacagctgtaggagctttgtattgctgaactttcatctggaaaagtttcacagtgacatttttaaaagagaatttttttatctgccgaattctaccagtgtaaccttttttctaaataaacaatagttttctcaaaaggttgtatatta

SEQ ID NO: 311833 - DNA, 5321 bp, Homo sapiens
  misc_feature (1594)..(1594): n is a, c, g, or t
  misc_feature (1597)..(1600): n is a, c, g, or t
  misc_feature (1603)..(1603): n is a, c, g, or t
  misc_feature (1607)..(1609): n is a, c, g, or t
acacatccgggcttctgctactagtgagaggaagatggcggccgcggctgtggtggttcccgcagagtggataaagaactgggagaaatcagggagaggcgaatttttgcatttatgtcggatcctcagtgaaaataaaagccatgatagttcaacatacagagatttccagcaagctctctatgagttgtcatatcatgtaattaaaggaaatctaaagcatgaacaggcatctaatgttcttagtgacattagtgaatttcgtgaggatatgccctccattcttgctgatgtattctgcatattagacattgagacaaattgtttagaagaaaaaagcaagagagactattttacacagttggtattagcatgtttgtatttagtttcagacacagttctaaaggaacgcctggatccagaaacactggaatcattagggcttatcaaacaatcacagcaattcaatcaaaagtcagttaaaatcaagacaaaactcttttataagcagcaaaaattcaatttgttaagagaagagaatgaaggttatgccaagctgattgctgaattggggcaagatttatctggaagtattactagtgatttaatcttagaaaatatcaaatctttaataggatgctttaatctggatcccaatagagttttggatgtcattttagaagtgtttgaatgcaggccagaacacgatgacttctttatatctttgttagaatcttacatgagtatgtgtgaaccgcaaacactgtgtcatattcttgggttcaaattcaagttttaccaggaaccaaatggcgagacaccatcatctttatacagagttgcagcagtacttctacaatttaatcttattgatttagatgatctttatgtacatcttcttccggctgataattgcattatggatgaacacaaacgagaaattgcggaagctaagcaaattgttagaaagcttacgatggttgtgttgtcttctgaaaaaatggatgagcgagagaaagaaaaggaaaaagaagaggagaaagtagagaaaccacctgataaccaaaaacttggcttgttggaagccttattaaagattggtgattggcaacatgcacagaacattatggatcagatgcctccatactatgcagcttcacacaagctaatagcccttgctatttgcaagctcattcatataactattgagcctctctaccgaagagttggagttcctaaaggtgctaaaggctcacctgttaatgctttgcaaaacaagagagcaccaaaacaagctgagagctttgaagatttgaggagagacgtgttcaatatgttctgttaccttggtcctcacctttctcacgatcccattttatttgcaaaagtggtgcgcataggcaagtcatttatgaaggagtttcagtctgatggaagcaaacaagaagataaagaaaaaacggaagttatccttagctgtttgcttagcattactgaccaggtactacttccatctctttctttgatggactgcaatgcttgtatgtctgaggaactatggggaatgtttaaaacatttccatatcagcatagntannnnctntatnnncatgaaagaatgaaacatgatgacacaaccatctcaagctggcttcagagtctggctagtttctgtggtgcagtttttcgtaaatatccaattgatcttgctggtcttcttcagtatgttgccaatcagctaaaggcgggcaaaagttttgacctgcttatattgaaagaagtggtacaaaaaatggcaggaatagaaattacagaggaaatgacaatggagcaactagaggctatgactggtggagagcagctaaaagctgagggtggttattttggtcagatcagaaacactaaaaaatcctctcagagattaaaggatgctctattggaccatgatcttgcccttcctctctgtctgcttatggctcagcagagaaatggggtaatctttcaggaaggtggagagaaacatttgaaacttgtgggaaagctctatgaccagtgtcatgataccctggtgcagtttggtgggtttttagcatctaatctgagcacagaagattatataaagcgagtgccttcaattgatgtactctgtaatgaatttcatacaccccatgatgcagcatttttcctgtctaggccaatgtatgcccatcatatttcgtcaaagtatgatgaacttaaaaaatcagaaaagggaagtaaacagcaacataaagttcataagtacattacatcatgtgagatggtgatggcgcctgtccatgaagcagtggtctccttacatgtttccaaagtctgggatgacatcagccctcaattctatgctacattctggtcattgacaatgtatgaccttgcagttccacacaccagctatgaacgagaagtcaataaacttaaagtccagatgaaagcaattgatgacaatcaggaaatgcccccaaataaaaagaaaaaagagaaggagcgctgtactgcccttcaggacaagcttcttgaagaagaaaagaaacagatggaacatgtacagagagttctacagagattgaaactggaaaaggacaactggcttttagcaaaatctaccaaaaatgagaccatcacaaaatttctacagctgtgtatatttcctcgatgtattttttcagcaattgatgctgtttactgtgctcgttttgttgaattggtacatcaacagaaaactccaaatttttccacacttctttgctatgatcgagttttctctgacataatttacacagttgcaagctgtactgaaaatgaagccagtcgatacggaaggtttctttgctgcatgttagagactgtgaccaggtggcatagtgatagagccacatatgaaaaggaatgtggaaactatccaggattccttaccatattacgggcaactggatttgatggtggaaataaggctgatcaattagactatgaaaattttcgacatgttgtacataaatggcattacaaactaaccaaggcatcggtacattgccttgaaacaggcgaatatactcacatcaggaatatcttgattgtgctaacaaaaatacttccttggtacccaaaagttttgaatctgggtcaagctttggaaagaagagtacacaaaatctgccaagaagaaaaagagaagaggccagatctatatgcattggctatgggctactctgggcagttgaaaagtagaaagtcatacatgatacctgaaaatgagtttcatcacaaagacccccctccgaggaatgcagttgccagtgtgcaaaatgggcctggtggtgggccttcttcatcatcaataggaagtgcatctaaatcggatgaaagcagtactgaggagactgataaatcaagggagagatctcagtgtggtgtgaaagctgttaataaagcttctagtaccacacctaaagggaattcaagcaatggaaatagtggctctaacagcaacaaagctgttaaagaaaatgacaaagaaaaagggaaagagaaagaaaaagagaaaaaagaaaagactccagctactactccagaggccagggtacttggtaaagatggtaaagaaaaaccaaaggaagagcggccaaataaagatgaaaaagcaagagagaccaaggaaagaacgccgaagtctgacaaagagaaagaaaaattcaagaaggaagaaaaagctaaagatgagaaatttaagaccactgtccccaacgcagaatcaaaatcaactcaagaaagggaaaagagagaaggagccatccagagaaagagatatagcaaaggaaatgaaatcaaaggaaaatgttaaaggaggagaaaaaacaccagtttctgggtccttgaaatcacctgttcccagatcagatattccagagcctgaaagggaacaaaaacgccgcaaaattgatactcacccttctccatcacattcctccacagtaaaggacagtctcatcgaactcaaggaatcttcagcaaagctctacattaatcatactcctccaccactgtccaagagtaaggagagagaaatggacaagaaagatttggacaagtcaagggaaagatccagagaaagagagaaaaaagatgaaaaggacaggaaagagcggaaaagggatcactcaaacaacgaccgtgaagtgccaccggacttaaccaagagacgtaaagaggagaatggaacaatgggggtttcaaaacataaaagtgaaagtccttgtgaatctccttatccaaatgagaaagacaaggaaaaaaataagtcaaaatcttcaggcaaagaaaaaggcagtgattcatttaaatctgagaagatggataaaatctcctccggtggcaaaaaggagtccaggcatgataaagaaaagatagaaaagaaagagaaacgggacagttcaggaggaaaggaagagaagaaacatcataagtcctcggacaagcacagataatgaagactttccatcaaggtgagatcggactggaactgttcggctgcgaccagaaatttattttcctgagtaaattgccgagaattaagaatgaagagggccatttgcatctccttaaattattcagttacctgctttattgctccatgtggaaaacttaaaattgttaagttgtgcattactgtattttaacttgttgcttagtttctacatgtttattttcagtaatggctgaaagtgttaactgttccatacttttagcacaatgtgctgcataaggttacctgtgtacagagttttactttagattaactaaatattgcctgggttcagtttttatttccattctgaaatgcttcctttttattgtttgaaactgaaaataaacaattgttgaacccttttgattttacctcattttaaaactgttttaatttattatttggcttgttcttaatattagtcactaaaagcagtgggagcattgtcttatgaaatgcttaggaatcattttatatagtacatgtacaacattaaacgtgtttaaaaaagaaaaaggtaccagcgatcacttgtcccttgccattttttcttgtaattatgttagacaaatcttggcggcggggggatcaaaacataattgttttaattctacagctgtaggagctttgtattgctgaactttcatctggaaaagtttcacagtgacatttttaaaagagaatttttttatctgccgaattctaccagtgtaaccttttttctaaataaacaatagttttctcaaaaggttgtatatta

SEQ ID NO: 311834 - DNA, 6320 bp, Homo sapiens
gaaaatgtgaagccttctggaagacaaattgggaagttgagccacagcaatccaaccattttgtttgattatatcttgtcacaaatacagaagtatgataacttaataacacctgtagtagattcattgaaatacctcacttcactgaattatgatgtcttggcctattgtatcattgaagctttagctaatccagaaaaggaaagaatgaaacatgatgacacaaccatctcaagctggcttcagagtctggctagtttctgtggtgcagtttttcgtaaatatccaattgatcttgctggtcttcttcagtatgttgccaatcagctaaaggcgggcaaaagttttgacctgcttatattgaaagaagtggtacaaaaaatggcaggaatagaaattacagaggaaatgacaatggagcaactagaggctatgactggtggagagcagctaaaagctgagggtggttattttggtcagatcagaaacactaaaaaatcctctcagagattaaaggatgctctattggaccatgatcttgcccttcctctctgtctgcttatggctcagcagagaaatggggtaatctttcaggaaggtggagagaaacatttgaaacttgtgggaaagctctatgaccagtgtcatgataccctggtgcagtttggtgggtttttagcatctaatctgagcacagaagattatataaagcgagtgccttcaattgatgtactctgtaatgaatttcatacaccccatgatgcagcatttttcctgtctaggccaatgtatgcccatcatatttcgtcaaagtatgatgaacttaaaaaatcagaaaagggaagtaaacagcaacataaagttcataagtacattacatcatgtgagatggtgatggcgcctgtccatgaagcagtggtctccttacatgtttccaaagtctgggatgacatcagccctcaattctatgctacattctggtcattgacaatgtatgaccttgcagttccacacaccagctatgaacgagaagtcaataaacttaaagtccagatgaaagcaattgatgacaatcaggaaatgcccccaaataaaaagaaaaaagagaaggagcgctgtactgcccttcaggacaagcttcttgaagaagaaaagaaacagatggaacatgtacagagagttctacagagattgaaactggaaaaggacaactggcttttagcaaaatctaccaaaaatgagaccatcacaaaatttctacagctgtgtatatttcctcgatgtattttttcagcaattgatgctgtttactgtgctcgttttgttgaattggtacatcaacagaaaactccaaatttttccacacttctttgctatgatcgagttttctctgacataatttacacagttgcaagctgtactgaaaatgaagccagtcgatacggaaggtttctttgctgcatgttagagactgtgaccaggtggcatagtgatagagccacatatgaaaaggaatgtggaaactatccaggattccttaccatattacgggcaactggatttgatggtggaaataaggctgatcaattagactatgaaaattttcgacatgttgtacataaatggcattacaaactaaccaaggcatcggtacattgccttgaaacaggcgaatatactcacatcaggaatatcttgattgtgctaacaaaaatacttccttggtacccaaaagttttgaatctgggtcaagctttggaaagaagagtacacaaaatctgccaagaagaaaaagagaagaggccagatctatatgcattggctatgggctactctgggcagttgaaaagtagaaagtcatacatgatacctgaaaatgagtttcatcacaaagacccccctccgaggaatgcagttgccagtgtgcaaaatgggcctggtggtgggccttcttcatcatcaataggaagtgcatctaaatcggatgaaagcagtactgaggagactgataaatcaagggagagatctcagtgtggtgtgaaagctgttaataaagcttctagtaccacacctaaagggaattcaagcaatggaaatagtggctctaacagcaacaaagctgttaaagaaaatgacaaagaaaaagggaaagagaaagaaaaagagaaaaaagaaaagactccagctactactccagaggccagggtacttggtaaagatggtaaagaaaaaccaaaggaagagcggccaaataaagatgaaaaagcaagagagaccaaggaaagaacgccgaagtctgacaaagagaaagaaaaattcaagaaggaagaaaaagctaaagatgagaaatttaagaccactgtccccaacgcagaatcaaaatcaactcaagaaagggaaaagagagaaggagccatccagagaaagagatatagcaaaggaaatgaaatcaaaggaaaatgttaaaggaggagaaaaaacaccagtttctgggtccttgaaatcacctgttcccagatcagatattccagagcctgaaagggaacaaaaacgccgcaaaattgatactcacccttctccatcacattcctccacagtaaaggacagtctcatcgaactcaaggaatcttcagcaaagctctacattaatcatactcctccaccactgtccaagagtaaggagagagaaatggacaagaaagatttggacaagtcaagggaaagatccagagaaagagagaaaaaagatgaaaaggacaggaaagagcggaaaagggatcactcaaacaacgaccgtgaagtgccaccggacttaaccaagagacgtaaagaggagaatggaacaatgggggtttcaaaacataaaagtgaaagtccttgtgaatctccttatccaaatgagaaagacaaggaaaaaaataagtcaaaatcttcaggcaaagaaaaaggcagtgattcatttaaatctgagaagatggataaaatctcctccggtggcaaaaaggagtccaggcatgataaagaaaagatagaaaagaaagagaaacgggacagttcaggaggaaaggaagagaagaaacatcataagtcctcggacaagcacagataatgaagactttccatcaaggctatggacagaccccctaagccgaaagtctcccagaggaggatgccaaagctccgtgcgtcactctcagaatgatatctcccataattaagagcttctggtgctgtccatttaatgggaatctgctttaagtcagaagatgagtacacaccaccatcctcttgacgagacattccaaagtcactgattttcagaacattattttcacctccaggcagtttcttacagcaaggtccctgtgtatacattttttactcgagatacaccatccagaatcagcatctaatgaaaatttcactgagttttagttcattcttctttctctgaaaggagaggaaatcgcctccaggaaccagttccttaatgacgtagataggccgtctttgtgtgtgaactcctatacttttgacattactgggatgattatattgcttgaggattttggcttctagtaaaaattttaatttcagttcctggggaagacgttcttgacgtgttttaacagcaacagcaattttatcctttaatgtgaccttaaatgtgtcaccaaaatttcccttgcctcttgtaacgtggcacctttatgattgagaacccatttcttattctcctaatggccatactgtgataccatgatgctcttaattggaacattgacttttttttttttggcaatttaaacaattgagataaaattcatataacatcaaatttacctttcacttttttttttttcttttggagaccaagtctcgctgttgtctcccaggctggagtgcagtggcgcgatctcggctcactgtgacctccgcctcctgggttcaagcaattctccttcctcagcctcctgagtagctgggactacaggcgtgcaccaccacgcctggctaatttttgtatttttagtagagataggggtttcaccgtgttagccaggatggtctcgatctcctgacctggtgatccacctgcctcggcctcccaaagtgttgggattataagcgtgagccatgacgcctggcctcaaacttgccatttttaaagtgtacaattcaatggtttttagtatatccactatgttgtgcaagcatcaccgctgtctaattccagagcatttctgtcaccccaaaaagaaactccatgcctattagcagtcactcccagttcttcccttcctcggcccctggaaaccagtaatgtactttctgtctctgtgattttgcctgttttggacatttcatttaaatggaattatgcaataatttgtggccttttgtgtttggctttcacttagcatcatgttctcaaggctcatccatgttgtggcatgtatcagtactgcattcctttttatggctaaatgatgtttcattgtatgagtgtgtaccacattttatttatccattcagcaattaatggacaggaacaatggcttttaagtattaaattgtaagttcaacattaaatgtatccacagttattgataatatcaagattatacatggtgtgaacagaatgctgtgtcgaaatggtatgtaaattatttgtcagcatttcatgtaagtgattattttctaaggacccttctagccctggttttaagaaatatgtgaatgtagtattttcatcaataaagtttaatgcattaagcattagcttaaaatttgaatgaaggcagatgtgaagatatttgccacatgttgtaataatcatgttttgaaattatttcaatatgaagtatttgaaaaatgtcaatacataaaggaaaggaaatgagtataattaagtcaatatatttttaaagcaatttttataatttagcagacactgcatcttaatataagttactattaaaattgtgtccttgtgaaaaatgtgatgtcattttcctttttttgttgatcatgtaaaataggttacttttctttgctacattttctatttaataagctattgcttgccgttgtggaatgttttacttgttgctccatttttttctccctacccccacccctctctcccacacgcacacaatgttcaattttttttttaagtcatcattagtgtgtttatctttaatggattctaagaatggacaaaaagaaacacacaaatatttcatccttttctggggactcaagtctttgttaccgatggaactcattaacttcttgttctttcttaaatcttcctccctccttaccttttcctctccttccttctcttcttcttcctttcttctcccctccctccctccctcccttcttccctccctcctcctttcattctccttctctccttctcccttccttttctcctacctcctttgactaagcctccctcccctactccctcctttccttccttccttccttcttctctatcaatataatcactttgtttctttcaggtgagatcggactggaactgttcggctgcgaccagaaatttattttcctgagtaaattgccgagaattaagaatgaagagggccatttgcatctccttaaattattcagttacctgctttattgctccatgtggaaaacttaaaattgttaagttgtgcattactgtattttaacttgttgcttagtttctacatgtttattttcagtaatggctgaaagtgttaactgttccatacttttagcacaatgtgctgcataaggttacctgtgtacagagttttactttagattaactaaatattgcctgggttcagtttttatttccattctgaaatgcttcctttttattgtttgaaactgaaaataaacaattgttgaacccttttgattttacctcattttaaaactgttttaatttattatttggcttgttcttaatattagtcactaaaagcagtgggagcattgtcttatgaaatgcttaggaatcattttatatagtacatgtacaacattaaacgtgtttaaaaaagaaaaaggtaccagcgatcacttgtcccttgccattttttcttgtaattatgttagacaaatcttggcggcggggggatcaaaacataattgttttaattctacagctgtaggagctttgtattgctgaactttcatctggaaaagtttcacagtgacatttttaaaagagaatttttttatctgccgaattctaccagtgtaaccttttttctaaataaacaatagttttctcaaaaggttgtatatta

SEQ ID NO: 311835 - DNA, 5103 bp, Homo sapiens
  misc_feature (1594)..(1594): n is a, c, g, or t
  misc_feature (1597)..(1600): n is a, c, g, or t
  misc_feature (1603)..(1603): n is a, c, g, or t
  misc_feature (1607)..(1609): n is a, c, g, or t
acacatccgggcttctgctactagtgagaggaagatggcggccgcggctgtggtggttcccgcagagtggataaagaactgggagaaatcagggagaggcgaatttttgcatttatgtcggatcctcagtgaaaataaaagccatgatagttcaacatacagagatttccagcaagctctctatgagttgtcatatcatgtaattaaaggaaatctaaagcatgaacaggcatctaatgttcttagtgacattagtgaatttcgtgaggatatgccctccattcttgctgatgtattctgcatattagacattgagacaaattgtttagaagaaaaaagcaagagagactattttacacagttggtattagcatgtttgtatttagtttcagacacagttctaaaggaacgcctggatccagaaacactggaatcattagggcttatcaaacaatcacagcaattcaatcaaaagtcagttaaaatcaagacaaaactcttttataagcagcaaaaattcaatttgttaagagaagagaatgaaggttatgccaagctgattgctgaattggggcaagatttatctggaagtattactagtgatttaatcttagaaaatatcaaatctttaataggatgctttaatctggatcccaatagagttttggatgtcattttagaagtgtttgaatgcaggccagaacacgatgacttctttatatctttgttagaatcttacatgagtatgtgtgaaccgcaaacactgtgtcatattcttgggttcaaattcaagttttaccaggaaccaaatggcgagacaccatcatctttatacagagttgcagcagtacttctacaatttaatcttattgatttagatgatctttatgtacatcttcttccggctgataattgcattatggatgaacacaaacgagaaattgcggaagctaagcaaattgttagaaagcttacgatggttgtgttgtcttctgaaaaaatggatgagcgagagaaagaaaaggaaaaagaagaggagaaagtagagaaaccacctgataaccaaaaacttggcttgttggaagccttattaaagattggtgattggcaacatgcacagaacattatggatcagatgcctccatactatgcagcttcacacaagctaatagcccttgctatttgcaagctcattcatataactattgagcctctctaccgaagagttggagttcctaaaggtgctaaaggctcacctgttaatgctttgcaaaacaagagagcaccaaaacaagctgagagctttgaagatttgaggagagacgtgttcaatatgttctgttaccttggtcctcacctttctcacgatcccattttatttgcaaaagtggtgcgcataggcaagtcatttatgaaggagtttcagtctgatggaagcaaacaagaagataaagaaaaaacggaagttatccttagctgtttgcttagcattactgaccaggtactacttccatctctttctttgatggactgcaatgcttgtatgtctgaggaactatggggaatgtttaaaacatttccatatcagcatagntannnnctntatnnncatgaaagaatgaaacatgatgacacaaccatctcaagctggcttcagagtctggctagtttctgtggtgcagtttttcgtaaatatccaattgatcttgctggtcttcttcagtatgttgccaatcagctaaaggcgggcaaaagttttgacctgcttatattgaaagaagtggtacaaaaaatggcaggaatagaaattacagaggaaatgacaatggagcaactagaggctatgactggtggagagcagctaaaagctgagggtggttattttggtcagatcagaaacactaaaaaatcctctcagagattaaaggatgctctattggaccatgatcttgcccttcctctctgtctgcttatggctcagcagagaaatggggtaatctttcaggaaggtggagagaaacatttgaaacttgtgggaaagctctatgaccagtgtcatgataccctggtgcagtttggtgggtttttagcatctaatctgagcacagaagattatataaagcgagtgccttcaattgatgtactctgtaatgaatttcatacaccccatgatgcagcatttttcctgtctaggccaatgtatgcccatcatatttcgtcaaagtatgatgaacttaaaaaatcagaaaagggaagtaaacagcaacataaagttcataagtacattacatcatgtgagatggtgatggcgcctgtccatgaagcagtggtctccttacatgtttccaaagtctgggatgacatcagccctcaattctatgctacattctggtcattgacaatgtatgaccttgcagttccacacaccagctatgaacgagaagtcaataaacttaaagtccagatgaaagcaattgatgacaatcaggaaatgcccccaaataaaaagaaaaaagagaaggagcgctgtactgcccttcaggacaagcttcttgaagaagaaaagaaacagatggaacatgtacagagagttctacagagattgaaactggaaaaggacaactggcttttagcaaaatctaccaaaaatgagaccatcacaaaatttctacagctgtgtatatttcctcgatgtattttttcagcaattgatgctgtttactgtgctcgttttgttgaattggtacatcaacagaaaactccaaatttttccacacttctttgctatgatcgagttttctctgacataatttacacagttgcaagctgtactgaaaatgaagccagtcgatacggaaggtttctttgctgcatgttagagactgtgaccaggtggcatagtgatagagccacatatgaaaaggaatgtggaaactatccaggattccttaccatattacgggcaactggatttgatggtggaaataaggctgatcaattagactatgaaaattttcgacatgttgtacataaatggcattacaaactaaccaaggcatcggtacattgccttgaaacaggcgaatatactcacatcaggaatatcttgattgtgctaacaaaaatacttccttggtacccaaaagttttgaatctgggtcaagctttggaaagaagagtacacaaaatctgccaagaagaaaaagagaagaggccagatctatatgcattggctatgggctactctgggcagttgaaaagtagaaagtcatacatgatacctgaaaatgagtttcatcacaaagacccccctccgaggaatgcagttgccagtgtgcaaaatgggcctggtggtgggccttcttcatcatcaataggaagtgcatctaaatcggatgaaagcagtactgaggagactgataaatcaagggagagatctcagtgtggtgtgaaagctgttaataaagcttctagtaccacacctaaagggaattcaagcaatggaaatagtggctctaacagcaacaaagctgttaaagaaaatgacaaagaaaaagggaaagagaaagaaaaagagaaaaaagaaaagactccagctactactccagaggccagggtacttggtaaagatggtaaagaaaaaccaaaggaagagcggccaaataaagatgaaaaagcaagagagaccaaggaaagaacgccgaagtctgacaaagagaaagaaaaattcaagaaggaagaaaaagctaaagatgagaaatttaagaccactgtccccaacgcagaatcaaaatcaactcaagaaagggaaaagagagaaggagccatccagagaaagagatatagcaaaggaaatgaaatcaaaggaaaatgttaaaggaggagaaaaaacaccagtttctgggtccttgaaatcacctgttcccagatcagatattccagagcctgaaagggaacaaaaacgccgcaaaattgatactcacccttctccatcacattcctccacagtaaaggacagtctcatcgaactcaaggaatcttcagcaaagctctacattaatcatactcctccaccactgtccaagagtaaggagagagaaatggacaagaaagatttggacaagtcaagggaaagatccagagaaagagagaaaaaagatgaaaaggacaggaaagagcggaaaagggatcactcaaacaacgaccgtgaagtgccaccggacttaaccaagagacgtaaagaggagaatggaacaatgggggtttcaaaacataaaagtgaaagtccttgtgaatctccttatccaaatgagaaagacaaggaaaaaaataagtcaaaatcttcaggcaaagaaaaaggcagtgattcatttaaatctgagaagatggataaaatctcctccggtggcaaaaaggagtccaggcatgataaagaaaagatagaaaagaaagagaaacgggacagttcaggaggaaaggaagagaagaaacatcataagtcctcggacaagcacagataatgaagactttccatcaaggtgagatcggactggaactgttcggctgcgaccagaaatttattttcctgagtaaattgccgagaattaagaatgaagagggccatttgcatctccttaaattattcagttacctgctttattgctccatgtggaaaacttaaaattgttaagttgtgcattactgtattttaacttgttgcttagtttctacatgtttattttcagtaatggctgaaagtgttaactgttccatacttttagcacaatgtgctgcataaggttacctgtgtacagagttttactttagattaactaaatattgcctgggttcagtttttatttccattctgaaatgcttcctttttattgtttgaaactgaaaataaacaattgttgaacccttaaaaaaaaatatataatacatccatttctattcttccctcaaactcctcttcaaattccacttaccaccacatctattacccatctcacatcacactactcttccccttctctaacctttattcctacttccacacctatcctcccccatttactaccctctccttctcactatccctaa

SEQ ID NO: 311836 - DNA, 4634 bp, Homo sapiens
  misc_feature (1594)..(1594): n is a, c, g, or t
  misc_feature (1597)..(1600): n is a, c, g, or t
  misc_feature (1603)..(1603): n is a, c, g, or t
  misc_feature (1607)..(1609): n is a, c, g, or t
acacatccgggcttctgctactagtgagaggaagatggcggccgcggctgtggtggttcccgcagagtggataaagaactgggagaaatcagggagaggcgaatttttgcatttatgtcggatcctcagtgaaaataaaagccatgatagttcaacatacagagatttccagcaagctctctatgagttgtcatatcatgtaattaaaggaaatctaaagcatgaacaggcatctaatgttcttagtgacattagtgaatttcgtgaggatatgccctccattcttgctgatgtattctgcatattagacattgagacaaattgtttagaagaaaaaagcaagagagactattttacacagttggtattagcatgtttgtatttagtttcagacacagttctaaaggaacgcctggatccagaaacactggaatcattagggcttatcaaacaatcacagcaattcaatcaaaagtcagttaaaatcaagacaaaactcttttataagcagcaaaaattcaatttgttaagagaagagaatgaaggttatgccaagctgattgctgaattggggcaagatttatctggaagtattactagtgatttaatcttagaaaatatcaaatctttaataggatgctttaatctggatcccaatagagttttggatgtcattttagaagtgtttgaatgcaggccagaacacgatgacttctttatatctttgttagaatcttacatgagtatgtgtgaaccgcaaacactgtgtcatattcttgggttcaaattcaagttttaccaggaaccaaatggcgagacaccatcatctttatacagagttgcagcagtacttctacaatttaatcttattgatttagatgatctttatgtacatcttcttccggctgataattgcattatggatgaacacaaacgagaaattgcggaagctaagcaaattgttagaaagcttacgatggttgtgttgtcttctgaaaaaatggatgagcgagagaaagaaaaggaaaaagaagaggagaaagtagagaaaccacctgataaccaaaaacttggcttgttggaagccttattaaagattggtgattggcaacatgcacagaacattatggatcagatgcctccatactatgcagcttcacacaagctaatagcccttgctatttgcaagctcattcatataactattgagcctctctaccgaagagttggagttcctaaaggtgctaaaggctcacctgttaatgctttgcaaaacaagagagcaccaaaacaagctgagagctttgaagatttgaggagagacgtgttcaatatgttctgttaccttggtcctcacctttctcacgatcccattttatttgcaaaagtggtgcgcataggcaagtcatttatgaaggagtttcagtctgatggaagcaaacaagaagataaagaaaaaacggaagttatccttagctgtttgcttagcattactgaccaggtactacttccatctctttctttgatggactgcaatgcttgtatgtctgaggaactatggggaatgtttaaaacatttccatatcagcatagntannnnctntatnnncatgaaagaatgaaacatgatgacacaaccatctcaagctggcttcagagtctggctagtttctgtggtgcagtttttcgtaaatatccaattgatcttgctggtcttcttcagtatgttgccaatcagctaaaggcgggcaaaagttttgacctgcttatattgaaagaagtggtacaaaaaatggcaggaatagaaattacagaggaaatgacaatggagcaactagaggctatgactggtggagagcagctaaaagctgagggtggttattttggtcagatcagaaacactaaaaaatcctctcagagattaaaggatgctctattggaccatgatcttgcccttcctctctgtctgcttatggctcagcagagaaatggggtaatctttcaggaaggtggagagaaacatttgaaacttgtgggaaagctctatgaccagtgtcatgataccctggtgcagtttggtgggtttttagcatctaatctgagcacagaagattatataaagcgagtgccttcaattgatgtactctgtaatgaatttcatacaccccatgatgcagcatttttcctgtctaggccaatgtatgcccatcatatttcgtcaaagtatgatgaacttaaaaaatcagaaaagggaagtaaacagcaacataaagttcataagtacattacatcatgtgagatggtgatggcgcctgtccatgaagcagtggtctccttacatgtttccaaagtctgggatgacatcagccctcaattctatgctacattctggtcattgacaatgtatgaccttgcagttccacacaccagctatgaacgagaagtcaataaacttaaagtccagatgaaagcaattgatgacaatcaggaaatgcccccaaataaaaagaaaaaagagaaggagcgctgtactgcccttcaggacaagcttcttgaagaagaaaagaaacagatggaacatgtacagagagttctacagagattgaaactggaaaaggacaactggcttttagcaaaatctaccaaaaatgagaccatcacaaaatttctacagctgtgtatatttcctcgatgtattttttcagcaattgatgctgtttactgtgctcgttttgttgaattggtacatcaacagaaaactccaaatttttccacacttctttgctatgatcgagttttctctgacataatttacacagttgcaagctgtactgaaaatgaagccagtcgatacggaaggtttctttgctgcatgttagagactgtgaccaggtggcatagtgatagagccacatatgaaaaggaatgtggaaactatccaggattccttaccatattacgggcaactggatttgatggtggaaataaggctgatcaattagactatgaaaattttcgacatgttgtacataaatggcattacaaactaaccaaggcatcggtacattgccttgaaacaggcgaatatactcacatcaggaatatcttgattgtgctaacaaaaatacttccttggtacccaaaagttttgaatctgggtcaagctttggaaagaagagtacacaaaatctgccaagaagaaaaagagaagaggccagatctatatgcattggctatgggctactctgggcagttgaaaagtagaaagtcatacatgatacctgaaaatgagtttcatcacaaagacccccctccgaggaatgcagttgccagtgtgcaaaatgggcctggtggtgggccttcttcatcatcaataggaagtgcatctaaatcggatgaaagcagtactgaggagactgataaatcaagggagagatctcagtgtggtgtgaaagctgttaataaagcttctagtaccacacctaaagggaattcaagcaatggaaatagtggctctaacagcaacaaagctgttaaagaaaatgacaaagaaaaagggaaagagaaagaaaaagagaaaaaagaaaagactccagctactactccagaggccagggtacttggtaaagatggtaaagaaaaaccaaaggaagagcggccaaataaagatgaaaaagcaagagagaccaaggaaagaacgccgaagtctgacaaagagaaagaaaaattcaagaaggaagaaaaagctaaagatgagaaatttaagaccactgtccccaacgcagaatcaaaatcaactcaagaaagggaaaagagagaaggagccatccagagaaagagatatagcaaaggaaatgaaatcaaaggaaaatgttaaaggaggagaaaaaacaccagtttctgggtccttgaaatcacctgttcccagatcagatattccagagcctgaaagggaacaaaaacgccgcaaaattgatactcacccttctccatcacattcctccacagtaaaggacagtctcatcgaactcaaggaatcttcagcaaagctctacattaatcatactcctccaccactgtccaagagtaaggagagagaaatggacaagaaagatttggacaagtcaagggaaagatccagagaaagagagaaaaaagatgaaaaggacaggaaagagcggaaaagggatcactcaaacaacgaccgtgaagtgccaccggacttaaccaagagacgtaaagaggagaatggaacaatgggggtttcaaaacataaaagtgaaagtccttgtgaatctccttatccaaatgagaaagacaaggaaaaaaataagtcaaaatcttcaggcaaagaaaaaggcagtgattcatttaaatctgagaagatggataaaatctcctccggtggcaaaaaggagtccaggcatgataaagaaaagatagaaaagaaagagaaacgggacagttcaggaggaaaggaagagaagaaacatcataagtcctcggacaagcacagataatgaagactttccatcaaggtaatgcacttaatgctttatgtgagatttaaaaagtattttacccatcttaaataaattgtgtttccatcatagtggatacagtgttcagaccct

SEQ ID NO: 311837 - DNA, 4070 bp, Homo sapiens
  misc_feature (1594)..(1594): n is a, c, g, or t
  misc_feature (1597)..(1600): n is a, c, g, or t
  misc_feature (1603)..(1603): n is a, c, g, or t
  misc_feature (1607)..(1609): n is a, c, g, or t
acacatccgggcttctgctactagtgagaggaagatggcggccgcggctgtggtggttcccgcagagtggataaagaactgggagaaatcagggagaggcgaatttttgcatttatgtcggatcctcagtgaaaataaaagccatgatagttcaacatacagagatttccagcaagctctctatgagttgtcatatcatgtaattaaaggaaatctaaagcatgaacaggcatctaatgttcttagtgacattagtgaatttcgtgaggatatgccctccattcttgctgatgtattctgcatattagacattgagacaaattgtttagaagaaaaaagcaagagagactattttacacagttggtattagcatgtttgtatttagtttcagacacagttctaaaggaacgcctggatccagaaacactggaatcattagggcttatcaaacaatcacagcaattcaatcaaaagtcagttaaaatcaagacaaaactcttttataagcagcaaaaattcaatttgttaagagaagagaatgaaggttatgccaagctgattgctgaattggggcaagatttatctggaagtattactagtgatttaatcttagaaaatatcaaatctttaataggatgctttaatctggatcccaatagagttttggatgtcattttagaagtgtttgaatgcaggccagaacacgatgacttctttatatctttgttagaatcttacatgagtatgtgtgaaccgcaaacactgtgtcatattcttgggttcaaattcaagttttaccaggaaccaaatggcgagacaccatcatctttatacagagttgcagcagtacttctacaatttaatcttattgatttagatgatctttatgtacatcttcttccggctgataattgcattatggatgaacacaaacgagaaattgcggaagctaagcaaattgttagaaagcttacgatggttgtgttgtcttctgaaaaaatggatgagcgagagaaagaaaaggaaaaagaagaggagaaagtagagaaaccacctgataaccaaaaacttggcttgttggaagccttattaaagattggtgattggcaacatgcacagaacattatggatcagatgcctccatactatgcagcttcacacaagctaatagcccttgctatttgcaagctcattcatataactattgagcctctctaccgaagagttggagttcctaaaggtgctaaaggctcacctgttaatgctttgcaaaacaagagagcaccaaaacaagctgagagctttgaagatttgaggagagacgtgttcaatatgttctgttaccttggtcctcacctttctcacgatcccattttatttgcaaaagtggtgcgcataggcaagtcatttatgaaggagtttcagtctgatggaagcaaacaagaagataaagaaaaaacggaagttatccttagctgtttgcttagcattactgaccaggtactacttccatctctttctttgatggactgcaatgcttgtatgtctgaggaactatggggaatgtttaaaacatttccatatcagcatagntannnnctntatnnncatgaaagaatgaaacatgatgacacaaccatctcaagctggcttcagagtctggctagtttctgtggtgcagtttttcgtaaatatccaattgatcttgctggtcttcttcagtatgttgccaatcagctaaaggcgggcaaaagttttgacctgcttatattgaaagaagtggtacaaaaaatggcaggaatagaaattacagaggaaatgacaatggagcaactagaggctatgactggtggagagcagctaaaagctgagggtggttattttggtcagatcagaaacactaaaaaatcctctcagagattaaaggatgctctattggaccatgatcttgcccttcctctctgtctgcttatggctcagcagagaaatggggtaatctttcaggaaggtggagagaaacatttgaaacttgtgggaaagctctatgaccagtgtcatgataccctggtgcagtttggtgggtttttagcatctaatctgagcacagaagattatataaagcgagtgccttcaattgatgtactctgtaatgaatttcatacaccccatgatgcagcatttttcctgtctaggccaatgtatgcccatcatatttcgtcaaagtatgatgaacttaaaaaatcagaaaagggaagtaaacagcaacataaagttcataagtacattacatcatgtgagatggtgatggcgcctgtccatgaagcagtggtctccttacatgtttccaaagtctgggatgacatcagccctcaattctatgctacattctggtcattgacaatgtatgaccttgcagttccacacaccagctatgaacgagaagtcaataaacttaaagtccagatgaaagcaattgatgacaatcaggaaatgcccccaaataaaaagaaaaaagagaaggagcgctgtactgcccttcaggacaagcttcttgaagaagaaaagaaacagatggaacatgtacagagagttctacagagattgaaactggaaaaggacaactggcttttagcaaaatctaccaaaaatgagaccatcacaaaatttctacagctgtgtatatttcctcgatgtattttttcagcaattgatgctgtttactgtgctcgttttgttgaattggtacatcaacagaaaactccaaatttttccacacttctttgctatgatcgagttttctctgacataatttacacagttgcaagctgtactgaaaatgaagccagtcgatacggaaggtttctttgctgcatgttagagactgtgaccaggtggcatagtgatagagccacatatgaaaaggaatgtggaaactatccaggattccttaccatattacgggcaactggatttgatggtggaaataaggctgatcaattagactatgaaaattttcgacatgttgtacataaatggcattacaaactaaccaaggcatcggtacattgccttgaaacaggcgaatatactcacatcaggaatatcttgattgtgctaacaaaaatacttccttggtacccaaaagttttgaatctgggtcaagctttggaaagaagagtacacaaaatctgccaagaagaaaaagagaagaggccagatctatatgcattggctatgggctactctgggcagttgaaaagtagaaagtcatacatgatacctgaaaatgagtttcatcacaaagacccccctccgaggaatgcagttgccagtgtgcaaaatgggcctggtggtgggccttcttcatcatcaataggaagtgcatctaaatcggatgaaagcagtactgaggagactgataaatcaagggagagatctcagtgtggtgtgaaagctgttaataaagcttctagtaccacacctaaagggaattcaagcaatggaaatagtggctctaacagcaacaaagctgttaaagaaaatgacaaagaaaaagggaaagagaaagaaaaagagaaaaaagaaaaaaaaaaaaacacacaaaaaaaaaaaaaaaaacaaaggggggggcgcaaaaaaaaaactacccccaggggggggcacaatagaacacgttttgaaaaaagggggcccaaaaagggaaaggggcgataaaacacacagcggccggggcgcagaccaaaacaacgcaggcgtaggggaaacagctgttcgccgggacacgtgggcgaggacccaaactacggggggggagacaacaagggagcaccaccaagacaattacagcccgaggggaaaaacacgacgggggataggcgggacaacccacgaacgtgccgacgacagaaatggatacagggatgaatgcacattatcaaggggacaaaaaaggtcgtgaacaacagaaatcactaacacagcaacaagcgacaagccacagggcatacatgaacgagagaaaagcactacagacgaagaaccccacgaacgggacaacgaaccaacggag

SEQ ID NO: 311838 - DNA, 3418 bp, Homo sapiens
tagagtcctgaaggctgagtttggcactgcttcatcactatgcaactttcttcttgatgacagctagctctttctgaagttcagtaaacttgggggcagttttcaagtttgtaatcctaacacctcagcattattttattaaaatactctgtggacactgccaagagactgacatccagtatcttctttccacttgctcttgtggttgctgatttgtcattccaggctatggacagaccccctaagccgaaagtctcccagaggaggatgccaaagctccgtgcgtcactctcagaatgatatctcccataattaagagcttctggtgctgtccatttaatgggaatctgctttaagtcagaagatgagtacacaccaccatcctcttgacgagacattccaaagtcactgattttcagaacattattttcacctccaggcagtttcttacagcaaggtccctgtgtatacattttttactcgagatacaccatccagaatcagcatctaatgaaaatttcactgagttttagttcattcttctttctctgaaaggagaggaaatcgcctccaggaaccagttccttaatgacgtagataggccgtctttgtgtgtgaactcctatacttttgacattactgggatgattatattgcttgaggattttggcttctagtaaaaattttaatttcagttcctggggaagacgttcttgacgtgttttaacagcaacagcaattttatcctttaatgtgaccttaaatgtgtcaccaaaatttcccttgcctcttgtaacgtggcacctttatgattgagaacccatttcttattctcctaatggccatactgtgataccatgatgctcttaattggaacattgacttttttttttttggcaatttaaacaattgagataaaattcatataacatcaaatttacctttcacttttttttttttcttttggagaccaagtctcgctgttgtctcccaggctggagtgcagtggcgcgatctcggctcactgtgacctccgcctcctgggttcaagcaattctccttcctcagcctcctgagtagctgggactacaggcgtgcaccaccacgcctggctaatttttgtatttttagtagagataggggtttcaccgtgttagccaggatggtctcgatctcctgacctggtgatccacctgcctcggcctcccaaagtgttgggattataagcgtgagccatgacgcctggcctcaaacttgccatttttaaagtgtacaattcaatggtttttagtatatccactatgttgtgcaagcatcaccgctgtctaattccagagcatttctgtcaccccaaaaagaaactccatgcctattagcagtcactcccagttcttcccttcctcggcccctggaaaccagtaatgtactttctgtctctgtgattttgcctgttttggacatttcatttaaatggaattatgcaataatttgtggccttttgtgtttggctttcacttagcatcatgttctcaaggctcatccatgttgtggcatgtatcagtactgcattcctttttatggctaaatgatgtttcattgtatgagtgtgtaccacattttatttatccattcagcaattaatggacaggaacaatggcttttaagtattaaattgtaagttcaacattaaatgtatccacagttattgataatatcaagattatacatggtgtgaacagaatgctgtgtcgaaatggtatgtaaattatttgtcagcatttcatgtaagtgattattttctaaggacccttctagccctggttttaagaaatatgtgaatgtagtattttcatcaataaagtttaatgcattaagcattagcttaaaatttgaatgaaggcagatgtgaagatatttgccacatgttgtaataatcatgttttgaaattatttcaatatgaagtatttgaaaaatgtcaatacataaaggaaaggaaatgagtataattaagtcaatatatttttaaagcaatttttataatttagcagacactgcatcttaatataagttactattaaaattgtgtccttgtgaaaaatgtgatgtcattttcctttttttgttgatcatgtaaaataggttacttttctttgctacattttctatttaataagctattgcttgccgttgtggaatgttttacttgttgctccatttttttctccctacccccacccctctctcccacacgcacacaatgttcaattttttttttaagtcatcattagtgtgtttatctttaatggattctaagaatggacaaaaagaaacacacaaatatttcatccttttctggggactcaagtctttgttaccgatggaactcattaacttcttgttctttcttaaatcttcctccctccttaccttttcctctccttccttctcttcttcttcctttcttctcccctccctccctccctcccttcttccctccctcctcctttcattctccttctctccttctcccttccttttctcctacctcctttgactaagcctccctcccctactccctcctttccttccttccttccttcttctctatcaatataatcactttgtttctttcaggtgagatcggactggaactgttcggctgcgaccagaaatttattttcctgagtaaattgccgagaattaagaatgaagagggccatttgcatctccttaaattattcagttacctgctttattgctccatgtggaaaacttaaaattgttaagttgtgcattactgtattttaacttgttgcttagtttctacatgtttattttcagtaatggctgaaagtgttaactgttccatacttttagcacaatgtgctgcataaggttacctgtgtacagagttttactttagattaactaaatattgcctgggttcagtttttatttccattctgaaatgcttcctttttattgtttgaaactgaaaataaacaattgttgaacccttttgattttacctcattttaaaactgttttaatttattatttggcttgttcttaatattagtcactaaaagcagtgggagcattgtcttatgaaatgcttaggaatcattttatatagtacatgtacaacattaaacgtgtttaaaaaagaaaaaggtaccagcgatcacttgtcccttgccattttttcttgtaattatgttagacaaatcttggcggcggggggatcaaaacataattgttttaattctacagctgtaggagctttgtattgctgaactttcatctggaaaagtttcacagtgacatttttaaaagagaatttttttatctgccgaattctaccagtgtaaccttttttctaaataaacaatagttttctcaaaaggttgtatatta

SEQ ID NO: 311839 - DNA, 3964 bp, Homo sapiens
  misc_feature (1594)..(1594): n is a, c, g, or t
  misc_feature (1597)..(1600): n is a, c, g, or t
  misc_feature (1603)..(1603): n is a, c, g, or t
  misc_feature (1607)..(1609): n is a, c, g, or t
acacatccgggcttctgctactagtgagaggaagatggcggccgcggctgtggtggttcccgcagagtggataaagaactgggagaaatcagggagaggcgaatttttgcatttatgtcggatcctcagtgaaaataaaagccatgatagttcaacatacagagatttccagcaagctctctatgagttgtcatatcatgtaattaaaggaaatctaaagcatgaacaggcatctaatgttcttagtgacattagtgaatttcgtgaggatatgccctccattcttgctgatgtattctgcatattagacattgagacaaattgtttagaagaaaaaagcaagagagactattttacacagttggtattagcatgtttgtatttagtttcagacacagttctaaaggaacgcctggatccagaaacactggaatcattagggcttatcaaacaatcacagcaattcaatcaaaagtcagttaaaatcaagacaaaactcttttataagcagcaaaaattcaatttgttaagagaagagaatgaaggttatgccaagctgattgctgaattggggcaagatttatctggaagtattactagtgatttaatcttagaaaatatcaaatctttaataggatgctttaatctggatcccaatagagttttggatgtcattttagaagtgtttgaatgcaggccagaacacgatgacttctttatatctttgttagaatcttacatgagtatgtgtgaaccgcaaacactgtgtcatattcttgggttcaaattcaagttttaccaggaaccaaatggcgagacaccatcatctttatacagagttgcagcagtacttctacaatttaatcttattgatttagatgatctttatgtacatcttcttccggctgataattgcattatggatgaacacaaacgagaaattgcggaagctaagcaaattgttagaaagcttacgatggttgtgttgtcttctgaaaaaatggatgagcgagagaaagaaaaggaaaaagaagaggagaaagtagagaaaccacctgataaccaaaaacttggcttgttggaagccttattaaagattggtgattggcaacatgcacagaacattatggatcagatgcctccatactatgcagcttcacacaagctaatagcccttgctatttgcaagctcattcatataactattgagcctctctaccgaagagttggagttcctaaaggtgctaaaggctcacctgttaatgctttgcaaaacaagagagcaccaaaacaagctgagagctttgaagatttgaggagagacgtgttcaatatgttctgttaccttggtcctcacctttctcacgatcccattttatttgcaaaagtggtgcgcataggcaagtcatttatgaaggagtttcagtctgatggaagcaaacaagaagataaagaaaaaacggaagttatccttagctgtttgcttagcattactgaccaggtactacttccatctctttctttgatggactgcaatgcttgtatgtctgaggaactatggggaatgtttaaaacatttccatatcagcatagntannnnctntatnnncatgaaagaatgaaacatgatgacacaaccatctcaagctggcttcagagtctggctagtttctgtggtgcagtttttcgtaaatatccaattgatcttgctggtcttcttcagtatgttgccaatcagctaaaggcgggcaaaagttttgacctgcttatattgaaagaagtggtacaaaaaatggcaggaatagaaattacagaggaaatgacaatggagcaactagaggctatgactggtggagagcagctaaaagctgagggtggttattttggtcagatcagaaacactaaaaaatcctctcagagattaaaggatgctctattggaccatgatcttgcccttcctctctgtctgcttatggctcagcagagaaatggggtaatctttcaggaaggtggagagaaacatttgaaacttgtgggaaagctctatgaccagtgtcatgataccctggtgcagtttggtgggtttttagcatctaatctgagcacagaagattatataaagcgagtgccttcaattgatgtactctgtaatgaatttcatacaccccatgatgcagcatttttcctgtctaggccaatgtatgcccatcatatttcgtcaaagtatgatgaacttaaaaaatcagaaaagggaagtaaacagcaacataaagttcataagtacattacatcatgtgagatggtgatggcgcctgtccatgaagcagtggtctccttacatgtttccaaagtctgggatgacatcagccctcaattctatgctacattctggtcattgacaatgtatgaccttgcagttccacacaccagctatgaacgagaagtcaataaacttaaagtccagatgaaagcaattgatgacaatcaggaaatgcccccaaataaaaagaaaaaagagaaggagcgctgtactgcccttcaggacaagcttcttgaagaagaaaagaaacagatggaacatgtacagagagttctacagagattgaaactggaaaaggacaactggcttttagcaaaatctaccaaaaatgagaccatcacaaaatttctacagctgtgtatatttcctcgatgtattttttcagcaattgatgctgtttactgtgctcgttttgttgaattggtacatcaacagaaaactccaaatttttccacacttctttgctatgatcgagttttctctgacataatttacacagttgcaagctgtactgaaaatgaagccagtcgatacggaaggtttctttgctgcatgttagagactgtgaccaggtggcatagtgatagagccacatatgaaaaggaatgtggaaactatccaggattccttaccatattacgggcaactggatttgatggtggaaataaggctgatcaattagactatgaaaattttcgacatgttgtacataaatggcattacaaactaaccaaggcatcggtacattgccttgaaacaggcgaatatactcacatcaggaatatcttgattgtgctaacaaaaatacttccttggtacccaaaagttttgaatctgggtcaagctttggaaagaagagtacacaaaatctgccaagaagaaaaagagaagaggccagatctatatgcattggctatggggtaacaaaattatattttaatgtgatttacaagactagatgacagaaggattctgaagactttaaaatgttttacagtgttgaagtttatcttctgccttcaggagattatgggagattatgcgatcatgtttccacaggctggtgagagttaccacttctgattatcaacttccggtctatactggatgatagtttttttaaagtcatgtataatatttcttgattgggaggaaatataattttatcatcatagttaacagatcttcaagagtaaaaaaaaaaaagccatcttagtttaaggattagtttatagtgaaattgtaatttttaagaaagctgggcgttctataaaaaccttcaagaacttattaaaaattggtattttttaattctctagaaccacatagtagaatgaataacttgctaattttattcttaaaaacctcatgtttatgttttttgatttgtgtttgtatatttaaacactttgtgcgactttcagctactctgggcagttgaaaagtagaaagtcatacatgatacctgaaaatgagtttcatcacaaagacccccctccgaggaatgcagttgccagtgtgcaaaatgggcctggtggtgggccttcttcatcatcaataggaagtgcatctaaatcggatgaaagcagtactgaggagactggtatgcttatttgtagaaacttataagtaatatattttatt

SEQ ID NO: 311840 - DNA, 907 bp, Homo sapiens
acacatccgggcttctgctactagtgagaggaagatggcggccgcggctgtggtggttcccgcagagtggataaagaactgggagaaatcagggagaggcgaatttttgcatttatgtcggatcctcagtgaaaataaaagccatgatagttcaacatacagagatttccagcaagctctctatgagttgtcatatcatgtaattaaaggaaatctaaagcatgaacaggcatctaatgttcttagtgacattagtgaatttcgtgaggatatgccctccattcttgctgatgtattctgcatattagacattgagacaaattgtttagaagaaaaaagcaagagagactattttacacagttggtattagcatgtttgtatttagtttcagacacagttctaaaggaacgcctggatccagaaacactggaatcattagggcttatcaaacaatcacagcaattcaatcaaaagtcagttaaaatcaagacaaaactcttttataagcagcaaaaattcaatttgttaagagaagagaatgaaggttatgccaagctgattgctgaattggggcaagatttatctggaagtattactagtgatttaatcttagaaaatatcaaatctttaataggtaagacatttatctgtatagtatgtgttgttaagataacaagttattttagctattggagaatatccataaagacaaaatgagtgcattccatctattttttttttcagttaaggaatgggagaggtgtttaggcttttacttttaatgggtttatcaataattataaaatttaggcatgatatttgtgaggaaatcttattgtcactataccttgtatgttaatattagggtcctgctctgtctaggtctttcctttttgtggaggggat

SEQ ID NO: 311841 - DNA, 507 bp, Homo sapiens
gcataggcaagtcatttatgaaggaggtaagtaagatttttcttacaaacctaaattttgaaatgaaaatattctgagtatacttgtgttatgagtatctttagaaataaaaatatgaacctcatttaataaagggttatgttgagtgaggtttgtggaaaattccagtgtgtcctaaccatatgcagtcaagtgttgcttaatgacaggtgagaaatgcatcattaggtgattcgtcattgtgcaaacatcagagagtgtacttatacaagcctagatggtatgacctactacatacctagactatatggtatggcccgttactcctaggctacaaacctgtacagaatgttcccgtactgaatactgtggggagttgtaatacactgttaaatatttgtgtatctgaacatatctaaacatttaaaaggtaataccttgcactaagatgttaggacagccatgatatcactaggcaataggaattttttagctctaatataatgt

SEQ ID NO: 311842 - DNA, 331 bp, Homo sapiens
ttggtagagatggggtttcaccacatggtccaggctggtcccaaacttttgggctcaagtcatctgccctcctcggcctcccaaagtgctgggattacaggtgtgagccactgctcccagccattttttgtttttaagtttcacagaagagtgttattatgaaaccctaatacttgctgtgtgcttttttgctatttattgtaattatatttttaaaattaggaatttcgtgaggatatgccctccattcttgctgatgtattctgcatattaggtaggtattaagcctttatttcacctgtaatgtgctgtgcggtaaatcaaatgtttg

SEQ ID NO: 311843 - DNA, 556 bp, Homo sapiens
ccaatagagttttggatgtcattttagaagtgtttgaatgcaggccagaacacgatgacttctttatatctttgttagaatcttacatgagtatgtgtgaaccgcaaacactgtgtcatattcttgggttcaaattcaagttttaccaggtaaagaaaaacgtgtatgtatgtatatttagagattgatttcttaatcttgtttatataatttaatttgttttatttgtaaatgattggtctcatctcaggtgttctagcagaagagatagataaatggatagctaacaatgcaatgtgataagtactatattggtagtatgaatgatgtgatgtgaaagcctagaggaaagaattattaagttttgccttgggagaggtggagtcagggaagactttatagatgtgtctttttttaaacctggtccttgaaggatgaataggagttcattaaggttttctctgcatgagtaacgaacaatgtgagaatcaagatgtggcagtgtgaatatatagagatagaaggaatggttcatagtctgatgtggctgggttgt

SEQ ID NO: 311844 - DNA, 385 bp, Homo sapiens
ccactttaattataagcattatttcttttgaaaaatagaaagtgtagccattacttagttggcacagtagaaatcctttgatcagttaatgccttctattgtttgttgctgttttccagatcttgtcacaaatacagaagtatgataacttaataacacctgtagtagattcattgaaatacctcacttcactgaattatgatgtcttggcctgtatcctttcaagtgaagtaatatgtagatttcatatttaatagatcatatggtaaacgttttattttcattctattttcctttagtaaccatctgaggttgattcaggtggctgatctgaagtttggtcagtcaattgtgtgtgtgtgtgtgtgtgtgtgtgtatgtgaga

SEQ ID NO: 311845 - DNA, 8453 bp, Homo sapiens
  misc_feature (1594)..(1594): n is a, c, g, or t
  misc_feature (1597)..(1600): n is a, c, g, or t
  misc_feature (1603)..(1603): n is a, c, g, or t
  misc_feature (1607)..(1609): n is a, c, g, or t
acacatccgggcttctgctactagtgagaggaagatggcggccgcggctgtggtggttcccgcagagtggataaagaactgggagaaatcagggagaggcgaatttttgcatttatgtcggatcctcagtgaaaataaaagccatgatagttcaacatacagagatttccagcaagctctctatgagttgtcatatcatgtaattaaaggaaatctaaagcatgaacaggcatctaatgttcttagtgacattagtgaatttcgtgaggatatgccctccattcttgctgatgtattctgcatattagacattgagacaaattgtttagaagaaaaaagcaagagagactattttacacagttggtattagcatgtttgtatttagtttcagacacagttctaaaggaacgcctggatccagaaacactggaatcattagggcttatcaaacaatcacagcaattcaatcaaaagtcagttaaaatcaagacaaaactcttttataagcagcaaaaattcaatttgttaagagaagagaatgaaggttatgccaagctgattgctgaattggggcaagatttatctggaagtattactagtgatttaatcttagaaaatatcaaatctttaataggatgctttaatctggatcccaatagagttttggatgtcattttagaagtgtttgaatgcaggccagaacacgatgacttctttatatctttgttagaatcttacatgagtatgtgtgaaccgcaaacactgtgtcatattcttgggttcaaattcaagttttaccaggaaccaaatggcgagacaccatcatctttatacagagttgcagcagtacttctacaatttaatcttattgatttagatgatctttatgtacatcttcttccggctgataattgcattatggatgaacacaaacgagaaattgcggaagctaagcaaattgttagaaagcttacgatggttgtgttgtcttctgaaaaaatggatgagcgagagaaagaaaaggaaaaagaagaggagaaagtagagaaaccacctgataaccaaaaacttggcttgttggaagccttattaaagattggtgattggcaacatgcacagaacattatggatcagatgcctccatactatgcagcttcacacaagctaatagcccttgctatttgcaagctcattcatataactattgagcctctctaccgaagagttggagttcctaaaggtgctaaaggctcacctgttaatgctttgcaaaacaagagagcaccaaaacaagctgagagctttgaagatttgaggagagacgtgttcaatatgttctgttaccttggtcctcacctttctcacgatcccattttatttgcaaaagtggtgcgcataggcaagtcatttatgaaggagtttcagtctgatggaagcaaacaagaagataaagaaaaaacggaagttatccttagctgtttgcttagcattactgaccaggtactacttccatctctttctttgatggactgcaatgcttgtatgtctgaggaactatggggaatgtttaaaacatttccatatcagcatagntannnnctntatnnncatgaaagaatgaaacatgatgacacaaccatctcaagctggcttcagagtctggctagtttctgtggtgcagtttttcgtaaatatccaattgatcttgctggtcttcttcagtatgttgccaatcagctaaaggcgggcaaaagttttgacctgcttatattgaaagaagtggtacaaaaaatggcaggaatagaaattacagaggaaatgacaatggagcaactagaggctatgactggtggagagcagctaaaagctgagggtggttattttggtcagatcagaaacactaaaaaatcctctcagagattaaaggatgctctattggaccatgatcttgcccttcctctctgtctgcttatggctcagcagagaaatggggtaatctttcaggaaggtggagagaaacatttgaaacttgtgggaaagctctatgaccagtgtcatgataccctggtgcagtttggtgggtttttagcatctaatctgagcacagaagattatataaagcgagtgccttcaattgatgtactctgtaatgaatttcatacaccccatgatgcagcatttttcctgtctaggccaatgtatgcccatcatatttcgtcaaagtatgatgaacttaaaaaatcagaaaagggaagtaaacagcaacataaagttcataagtacattacatcatgtgagatggtgatggcgcctgtccatgaagcagtggtctccttacatgtttccaaagtctgggatgacatcagccctcaattctatgctacattctggtcattgacaatgtatgaccttgcagttccacacaccagctatgaacgagaagtcaataaacttaaagtccagatgaaagcaattgatgacaatcaggaaatgcccccaaataaaaagaaaaaagagaaggagcgctgtactgcccttcaggacaagcttcttgaagaagaaaagaaacagatggaacatgtacagagagttctacagagattgaaactggaaaaggacaactggcttttagcaaaatctaccaaaaatgagaccatcacaaaatttctacagctgtgtatatttcctcgatgtattttttcagcaattgatgctgtttactgtgctcgttttgttgaattggtacatcaacagaaaactccaaatttttccacacttctttgctatgatcgagttttctctgacataatttacacagttgcaagctgtactgaaaatgaagccagtcgatacggaaggtttctttgctgcatgttagagactgtgaccaggtggcatagtgatagagccacatatgaaaaggaatgtggaaactatccaggattccttaccatattacgggcaactggatttgatggtggaaataaggctgatcaattagactatgaaaattttcgacatgttgtacataaatggcattacaaactaaccaaggcatcggtacattgccttgaaacaggcgaatatactcacatcaggaatatcttgattgtgctaacaaaaatacttccttggtacccaaaagttttgaatctgggtcaagctttggaaagaagagtacacaaaatctgccaagaagaaaaagagaagaggccagatctatatgcattggctatgggctactctgggcagttgaaaagtagaaagtcatacatgatacctgaaaatgagtttcatcacaaagacccccctccgaggaatgcagttgccagtgtgcaaaatgggcctggtggtgggccttcttcatcatcaataggaagtgcatctaaatcggatgaaagcagtactgaggagactgataaatcaagggagagatctcagtgtggtgtgaaagctgttaataaagcttctagtaccacacctaaagggaattcaagcaatggaaatagtggctctaacagcaacaaagctgttaaagaaaatgacaaagaaaaagggaaagagaaagaaaaagagaaaaaagaaaagactccagctactactccagaggccagggtacttggtaaagatggtaaagaaaaaccaaaggaagagcggccaaataaagatgaaaaagcaagagagaccaaggaaagaacgccgaagtctgacaaagagaaagaaaaattcaagaaggaagaaaaagctaaagatgagaaatttaagaccactgtccccaacgcagaatcaaaatcaactcaagaaagggaaaagagagaaggagccatccagagaaagagatatagcaaaggaaatgaaatcaaaggaaaatgttaaaggaggagaaaaaacaccagtttctgggtccttgaaatcacctgttcccagatcagatattccagagcctgaaagggaacaaaaacgccgcaaaattgatactcacccttctccatcacattcctccacagtaaagaaggttagtatagcctgaggaaggcagcgtccatgttaggctcacctgtttggaataccagtgtcctgacttccttcaagtcttatgccaagcattcactggagccactggaggttttatattgcattagaaaatgaatttttctatattggtggactgattttttttcctattgagtatttttattataaaaatgttaaaacttcaaggacttagcactaattttgtagtgtttcaaagtgcaagagaaattttacccagaagtgcctcaactgctttaagcagtcttttttggagtgcaatggtagctacaagcaaacgaatcttttcagcagaatgaagcctatttttcagcatattgaagaatatatagcactgaagacttcctggatgacacaagataaacaagttacctctgaattcaagcttcttgatgagcatcataccgatgtgtgccttctaagaaggagtcttgaaaggagttccattttaaagtctccttggtgatcagttctcctgtagttgtgtatattcagtgagcatgcagcttctgttgtatcttcccttggaggtttgtttatacccattgggttcccaacaagttgaaccttgcgttacgataaaagcagatgtggcatccaatcctaccacccagcaaagagaaaccccaggcattcaactgcagcacaaaatcgtgggtgtagccttcttgaagactcagggacagtctcatcgaactcaaggaatcttcagcaaagctctacattaatcatactcctccaccactgtccaagagtaaggagagagaaatggacaagaaagatttggacaagtcaagggaaagatccagagaaagagagaaaaaagatgaaaaggacaggaaagagcggaaaagggatcactcaaacaacgaccgtgaagtgccaccggacttaaccaagagacgtaaagaggagaatggaacaatgggggtttcaaaacataaaagtgaaagtccttgtgaatctccttatccaaatgagaaagacaaggaaaaaaataagtcaaaatcttcaggcaaagaaaaaggcagtgattcatttaaatctgagaagatggataaaatctcctccggtggcaaaaaggagtccaggcatgataaagaaaagatagaaaagaaagagaaacgggacagttcaggaggaaaggaagagaagaaacatcataagtcctcggacaagcacagataatgaagactttccatcaaggctatggacagaccccctaagccgaaagtctcccagaggaggatgccaaagctccgtgcgtcactctcagaatgatatctcccataattaagagcttctggtgctgtccatttaatgggaatctgctttaagtcagaagatgagtacacaccaccatcctcttgacgagacattccaaagtcactgattttcagaacattattttcacctccaggcagtttcttacagcaaggtccctgtgtatacattttttactcgagatacaccatccagaatcagcatctaatgaaaatttcactgagttttagttcattcttctttctctgaaaggagaggaaatcgcctccaggaaccagttccttaatgacgtagataggccgtctttgtgtgtgaactcctatacttttgacattactgggatgattatattgcttgaggattttggcttctagtaaaaattttaatttcagttcctggggaagacgttcttgacgtgttttaacagcaacagcaattttatcctttaatgtgaccttaaatgtgtcaccaaaatttcccttgcctcttgtaacgtggcacctttatgattgagaacccatttcttattctcctaatggccatactgtgataccatgatgctcttaattggaacattgacttttttttttttggcaatttaaacaattgagataaaattcatataacatcaaatttacctttcacttttttttttttcttttggagaccaagtctcgctgttgtctcccaggctggagtgcagtggcgcgatctcggctcactgtgacctccgcctcctgggttcaagcaattctccttcctcagcctcctgagtagctgggactacaggcgtgcaccaccacgcctggctaatttttgtatttttagtagagataggggtttcaccgtgttagccaggatggtctcgatctcctgacctggtgatccacctgcctcggcctcccaaagtgttgggattataagcgtgagccatgacgcctggcctcaaacttgccatttttaaagtgtacaattcaatggtttttagtatatccactatgttgtgcaagcatcaccgctgtctaattccagagcatttctgtcaccccaaaaagaaactccatgcctattagcagtcactcccagttcttcccttcctcggcccctggaaaccagtaatgtactttctgtctctgtgattttgcctgttttggacatttcatttaaatggaattatgcaataatttgtggccttttgtgtttggctttcacttagcatcatgttctcaaggctcatccatgttgtggcatgtatcagtactgcattcctttttatggctaaatgatgtttcattgtatgagtgtgtaccacattttatttatccattcagcaattaatggacaggaacaatggcttttaagtattaaattgtaagttcaacattaaatgtatccacagttattgataatatcaagattatacatggtgtgaacagaatgctgtgtcgaaatggtatgtaaattatttgtcagcatttcatgtaagtgattattttctaaggacccttctagccctggttttaagaaatatgtgaatgtagtattttcatcaataaagtttaatgcattaagcattagcttaaaatttgaatgaaggcagatgtgaagatatttgccacatgttgtaataatcatgttttgaaattatttcaatatgaagtatttgaaaaatgtcaatacataaaggaaaggaaatgagtataattaagtcaatatatttttaaagcaatttttataatttagcagacactgcatcttaatataagttactattaaaattgtgtccttgtgaaaaatgtgatgtcattttcctttttttgttgatcatgtaaaataggttacttttctttgctacattttctatttaataagctattgcttgccgttgtggaatgttttacttgttgctccatttttttctccctacccccacccctctctcccacacgcacacaatgttcaattttttttttaagtcatcattagtgtgtttatctttaatggattctaagaatggacaaaaagaaacacacaaatatttcatccttttctggggactcaagtctttgttaccgatggaactcattaacttcttgttctttcttaaatcttcctccctccttaccttttcctctccttccttctcttcttcttcctttcttctcccctccctccctccctcccttcttccctccctcctcctttcattctccttctctccttctcccttccttttctcctacctcctttgactaagcctccctcccctactccctcctttccttccttccttccttcttctctatcaatataatcactttgtttctttcaggtgagatcggactggaactgttcggctgcgaccagaaatttattttcctgagtaaattgccgagaattaagaatgaagagggccatttgcatctccttaaattattcagttacctgctttattgctccatgtggaaaacttaaaattgttaagttgtgcattactgtattttaacttgttgcttagtttctacatgtttattttcagtaatggctgaaagtgttaactgttccatacttttagcacaatgtgctgcataaggttacctgtgtacagagttttactttagattaactaaatattgcctgggttcagtttttatttccattctgaaatgcttcctttttattgtttgaaactgaaaataaacaattgttgaacccttttgattttacctcattttaaaactgttttaatttattatttggcttgttcttaatattagtcactaaaagcagtgggagcattgtcttatgaaatgcttaggaatcattttatatagtacatgtacaacattaaacgtgtttaaaaaagaaaaaggtaccagcgatcacttgtcccttgccattttttcttgtaattatgttagacaaatcttggcggcggggggatcaaaacataattgttttaattctacagctgtaggagctttgtattgctgaactttcatctggaaaagtttcacagtgacatttttaaaagagaatttttttatctgccgaattctaccagtgtaaccttttttctaaataaacaatagttttctcaaaaggttgtatatta

SEQ ID NO: 311846 - DNA, 7797 bp, Homo sapiens
  misc_feature (1594)..(1594): n is a, c, g, or t
  misc_feature (1597)..(1600): n is a, c, g, or t
  misc_feature (1603)..(1603): n is a, c, g, or t
  misc_feature (1607)..(1609): n is a, c, g, or t
acacatccgggcttctgctactagtgagaggaagatggcggccgcggctgtggtggttcccgcagagtggataaagaactgggagaaatcagggagaggcgaatttttgcatttatgtcggatcctcagtgaaaataaaagccatgatagttcaacatacagagatttccagcaagctctctatgagttgtcatatcatgtaattaaaggaaatctaaagcatgaacaggcatctaatgttcttagtgacattagtgaatttcgtgaggatatgccctccattcttgctgatgtattctgcatattagacattgagacaaattgtttagaagaaaaaagcaagagagactattttacacagttggtattagcatgtttgtatttagtttcagacacagttctaaaggaacgcctggatccagaaacactggaatcattagggcttatcaaacaatcacagcaattcaatcaaaagtcagttaaaatcaagacaaaactcttttataagcagcaaaaattcaatttgttaagagaagagaatgaaggttatgccaagctgattgctgaattggggcaagatttatctggaagtattactagtgatttaatcttagaaaatatcaaatctttaataggatgctttaatctggatcccaatagagttttggatgtcattttagaagtgtttgaatgcaggccagaacacgatgacttctttatatctttgttagaatcttacatgagtatgtgtgaaccgcaaacactgtgtcatattcttgggttcaaattcaagttttaccaggaaccaaatggcgagacaccatcatctttatacagagttgcagcagtacttctacaatttaatcttattgatttagatgatctttatgtacatcttcttccggctgataattgcattatggatgaacacaaacgagaaattgcggaagctaagcaaattgttagaaagcttacgatggttgtgttgtcttctgaaaaaatggatgagcgagagaaagaaaaggaaaaagaagaggagaaagtagagaaaccacctgataaccaaaaacttggcttgttggaagccttattaaagattggtgattggcaacatgcacagaacattatggatcagatgcctccatactatgcagcttcacacaagctaatagcccttgctatttgcaagctcattcatataactattgagcctctctaccgaagagttggagttcctaaaggtgctaaaggctcacctgttaatgctttgcaaaacaagagagcaccaaaacaagctgagagctttgaagatttgaggagagacgtgttcaatatgttctgttaccttggtcctcacctttctcacgatcccattttatttgcaaaagtggtgcgcataggcaagtcatttatgaaggagtttcagtctgatggaagcaaacaagaagataaagaaaaaacggaagttatccttagctgtttgcttagcattactgaccaggtactacttccatctctttctttgatggactgcaatgcttgtatgtctgaggaactatggggaatgtttaaaacatttccatatcagcatagntannnnctntatnnncatgaaagaatgaaacatgatgacacaaccatctcaagctggcttcagagtctggctagtttctgtggtgcagtttttcgtaaatatccaattgatcttgctggtcttcttcagtatgttgccaatcagctaaaggcgggcaaaagttttgacctgcttatattgaaagaagtggtacaaaaaatggcaggaatagaaattacagaggaaatgacaatggagcaactagaggctatgactggtggagagcagctaaaagctgagggtggttattttggtcagatcagaaacactaaaaaatcctctcagagattaaaggatgctctattggaccatgatcttgcccttcctctctgtctgcttatggctcagcagagaaatggggtaatctttcaggaaggtggagagaaacatttgaaacttgtgggaaagctctatgaccagtgtcatgataccctggtgcagtttggtgggtttttagcatctaatctgagcacagaagattatataaagcgagtgccttcaattgatgtactctgtaatgaatttcatacaccccatgatgcagcatttttcctgtctaggccaatgtatgcccatcatatttcgtcaaagtatgatgaacttaaaaaatcagaaaagggaagtaaacagcaacataaagttcataagtacattacatcatgtgagatggtgatggcgcctgtccatgaagcagtggtctccttacatgtttccaaagtctgggatgacatcagccctcaattctatgctacattctggtcattgacaatgtatgaccttgcagttccacacaccagctatgaacgagaagtcaataaacttaaagtccagatgaaagcaattgatgacaatcaggaaatgcccccaaataaaaagaaaaaagagaaggagcgctgtactgcccttcaggacaagcttcttgaagaagaaaagaaacagatggaacatgtacagagagttctacagagattgaaactggaaaaggacaactggcttttagcaaaatctaccaaaaatgagaccatcacaaaatttctacagctgtgtatatttcctcgatgtattttttcagcaattgatgctgtttactgtgctcgttttgttgaattggtacatcaacagaaaactccaaatttttccacacttctttgctatgatcgagttttctctgacataatttacacagttgcaagctgtactgaaaatgaagccagtcgatacggaaggtttctttgctgcatgttagagactgtgaccaggtggcatagtgatagagccacatatgaaaaggaatgtggaaactatccaggattccttaccatattacgggcaactggatttgatggtggaaataaggctgatcaattagactatgaaaattttcgacatgttgtacataaatggcattacaaactaaccaaggcatcggtacattgccttgaaacaggcgaatatactcacatcaggaatatcttgattgtgctaacaaaaatacttccttggtacccaaaagttttgaatctgggtcaagctttggaaagaagagtacacaaaatctgccaagaagaaaaagagaagaggccagatctatatgcattggctatgggtgttgaagtttatcttctgccttcaggagattatgggagattatgcgatcatgtttccacaggctgctactctgggcagttgaaaagtagaaagtcatacatgatacctgaaaatgagtttcatcacaaagacccccctccgaggaatgcagttgccagtgtgcaaaatgggcctggtggtgggccttcttcatcatcaataggaagtgcatctaaatcggatgaaagcagtactgaggagactgataaatcaagggagagatctcagtgtggtgtgaaagctgttaataaagcttctagtaccacacctaaagggaattcaagcaatggaaatagtggctctaacagcaacaaagctgttaaagaaaatgacaaagaaaaagggaaagagaaagaaaaagagaaaaaagaaaagactccagctactactccagaggccagggtacttggtaaagatggtaaagaaaaaccaaaggaagagcggccaaataaagatgaaaaagcaagagagaccaaggaaagaacgccgaagtctgacaaagagaaagaaaaattcaagaaggaagaaaaagctaaagatgagaaatttaagaccactgtccccaacgcagaatcaaaatcaactcaagaaagggaaaagagagaaggagccatccagagaaagagatatagcaaaggaaatgaaatcaaaggaaaatgttaaaggaggagaaaaaacaccagtttctgggtccttgaaatcacctgttcccagatcagatattccagagcctgaaagggaacaaaaacgccgcaaaattgatactcacccttctccatcacattcctccacagtaaaggacagtctcatcgaactcaaggaatcttcagcaaagctctacattaatcatactcctccaccactgtccaagagtaaggagagagaaatggacaagaaagatttggacaagtcaagggaaagatccagagaaagagagaaaaaagatgaaaaggacaggaaagagcggaaaagggatcactcaaacaacgaccgtgaagtgccaccggacttaaccaagagacgtaaagaggagaatggaacaatgggggtttcaaaacataaaagtgaaagtccttgtgaatctccttatccaaatgagaaagacaaggaaaaaaataagtcaaaatcttcaggcaaagaaaaaggcagtgattcatttaaatctgagaagatggataaaatctcctccggtggcaaaaaggagtccaggcatgataaagaaaagatagaaaagaaagagaaacgggacagttcaggaggaaaggaagagaagaaacatcataagtcctcggacaagcacagataatgaagactttccatcaaggctatggacagaccccctaagccgaaagtctcccagaggaggatgccaaagctccgtgcgtcactctcagaatgatatctcccataattaagagcttctggtgctgtccatttaatgggaatctgctttaagtcagaagatgagtacacaccaccatcctcttgacgagacattccaaagtcactgattttcagaacattattttcacctccaggcagtttcttacagcaaggtccctgtgtatacattttttactcgagatacaccatccagaatcagcatctaatgaaaatttcactgagttttagttcattcttctttctctgaaaggagaggaaatcgcctccaggaaccagttccttaatgacgtagataggccgtctttgtgtgtgaactcctatacttttgacattactgggatgattatattgcttgaggattttggcttctagtaaaaattttaatttcagttcctggggaagacgttcttgacgtgttttaacagcaacagcaattttatcctttaatgtgaccttaaatgtgtcaccaaaatttcccttgcctcttgtaacgtggcacctttatgattgagaacccatttcttattctcctaatggccatactgtgataccatgatgctcttaattggaacattgacttttttttttttggcaatttaaacaattgagataaaattcatataacatcaaatttacctttcacttttttttttttcttttggagaccaagtctcgctgttgtctcccaggctggagtgcagtggcgcgatctcggctcactgtgacctccgcctcctgggttcaagcaattctccttcctcagcctcctgagtagctgggactacaggcgtgcaccaccacgcctggctaatttttgtatttttagtagagataggggtttcaccgtgttagccaggatggtctcgatctcctgacctggtgatccacctgcctcggcctcccaaagtgttgggattataagcgtgagccatgacgcctggcctcaaacttgccatttttaaagtgtacaattcaatggtttttagtatatccactatgttgtgcaagcatcaccgctgtctaattccagagcatttctgtcaccccaaaaagaaactccatgcctattagcagtcactcccagttcttcccttcctcggcccctggaaaccagtaatgtactttctgtctctgtgattttgcctgttttggacatttcatttaaatggaattatgcaataatttgtggccttttgtgtttggctttcacttagcatcatgttctcaaggctcatccatgttgtggcatgtatcagtactgcattcctttttatggctaaatgatgtttcattgtatgagtgtgtaccacattttatttatccattcagcaattaatggacaggaacaatggcttttaagtattaaattgtaagttcaacattaaatgtatccacagttattgataatatcaagattatacatggtgtgaacagaatgctgtgtcgaaatggtatgtaaattatttgtcagcatttcatgtaagtgattattttctaaggacccttctagccctggttttaagaaatatgtgaatgtagtattttcatcaataaagtttaatgcattaagcattagcttaaaatttgaatgaaggcagatgtgaagatatttgccacatgttgtaataatcatgttttgaaattatttcaatatgaagtatttgaaaaatgtcaatacataaaggaaaggaaatgagtataattaagtcaatatatttttaaagcaatttttataatttagcagacactgcatcttaatataagttactattaaaattgtgtccttgtgaaaaatgtgatgtcattttcctttttttgttgatcatgtaaaataggttacttttctttgctacattttctatttaataagctattgcttgccgttgtggaatgttttacttgttgctccatttttttctccctacccccacccctctctcccacacgcacacaatgttcaattttttttttaagtcatcattagtgtgtttatctttaatggattctaagaatggacaaaaagaaacacacaaatatttcatccttttctggggactcaagtctttgttaccgatggaactcattaacttcttgttctttcttaaatcttcctccctccttaccttttcctctccttccttctcttcttcttcctttcttctcccctccctccctccctcccttcttccctccctcctcctttcattctccttctctccttctcccttccttttctcctacctcctttgactaagcctccctcccctactccctcctttccttccttccttccttcttctctatcaatataatcactttgtttctttcaggtgagatcggactggaactgttcggctgcgaccagaaatttattttcctgagtaaattgccgagaattaagaatgaagagggccatttgcatctccttaaattattcagttacctgctttattgctccatgtggaaaacttaaaattgttaagttgtgcattactgtattttaacttgttgcttagtttctacatgtttattttcagtaatggctgaaagtgttaactgttccatacttttagcacaatgtgctgcataaggttacctgtgtacagagttttactttagattaactaaatattgcctgggttcagtttttatttccattctgaaatgcttcctttttattgtttgaaactgaaaataaacaattgttgaacccttttgattttacctcattttaaaactgttttaatttattatttggcttgttcttaatattagtcactaaaagcagtgggagcattgtcttatgaaatgcttaggaatcattttatatagtacatgtacaacattaaacgtgtttaaaaaagaaaaaggtaccagcgatcacttgtcccttgccattttttcttgtaattatgttagacaaatcttggcggcggggggatcaaaacataattgttttaattctacagctgtaggagctttgtattgctgaactttcatctggaaaagtttcacagtgacatttttaaaagagaatttttttatctgccgaattctaccagtgtaaccttttttctaaataaacaatagttttctcaaaaggttgtatatta

SEQ ID NO: 311847 - DNA, 5566 bp, Homo sapiens
  misc_feature (147)..(147): n is a, c, g, or t
tagagacagggttttgccatgttgaccaggctggtctcaaactcctggcctcacgtgatttgcctgctttggcctcccaaagtgctggattataggtgtgagccaccgtgcccggctaatacatcttttaaatctgcaattaatgantttgtttatgatttactgggtgacagagtaagactcagtctcaaaacaaaacaaaacaaaacaaaaaacataatgtatgttccagtatgtcagctgcatatttttaatttctatcagcatttcctctgcttactctccccgtaaacccagtaatatgtatggctaagtggttaagaaactattatgtaataaaaaaaaaacaacttattatgtaataataatgataaatttttttttccttgtcactgtaaatcagctttctttataaaagttcttgttttgggtggttgttttatgaatgcattatttccccacaaaagccaaaatctccaaagttctctgcagtgtcattatataaagggaatatacattttgactaggcttacctgtttattatgacttgctgtaagagaatcttctaatatttttaactgattttgaccttgatttgtttatattttttaaacatttttctcctgtaggttttctctgacataatttacacagttgcaagctgtactgaaaatgaagccagtcgatacggaaggtttctttgctgcatgttagagactgtgaccaggtggcatagtgatagagccacatatgaaaaggaatgtggaaactatccaggattccttaccatattacgggcaactggatttgatggtggaaataaggctgatcaattagactatgaaaattttcgacatgttgtacataaatggcattacaaactaaccaaggcatcggtacattgccttgaaacaggcgaatatactcacatcaggaatatcttgattgtgctaacaaaaatacttccttggtacccaaaagttttgaatctgggtcaagctttggaaagaagagtacacaaaatctgccaagaagaaaaagagaagaggccagatctatatgcattggctatgggctactctgggcagttgaaaagtagaaagtcatacatgatacctgaaaatgagtttcatcacaaagacccccctccgaggaatgcagttgccagtgtgcaaaatgggcctggtggtgggccttcttcatcatcaataggaagtgcatctaaatcggatgaaagcagtactgaggagactgataaatcaagggagagatctcagtgtggtgtgaaagctgttaataaagcttctagtaccacacctaaagggaattcaagcaatggaaatagtggctctaacagcaacaaagctgttaaagaaaatgacaaagaaaaagggaaagagaaagaaaaagagaaaaaagaaaagactccagctactactccagaggccagggtacttggtaaagatggtaaagaaaaaccaaaggaagagcggccaaataaagatgaaaaagcaagagagaccaaggaaagaacgccgaagtctgacaaagagaaagaaaaattcaagaaggaagaaaaagctaaagatgagaaatttaagaccactgtccccaacgcagaatcaaaatcaactcaagaaagggaaaagagagaaggagccatccagagaaagagatatagcaaaggaaatgaaatcaaaggaaaatgttaaaggaggagaaaaaacaccagtttctgggtccttgaaatcacctgttcccagatcagatattccagagcctgaaagggaacaaaaacgccgcaaaattgatactcacccttctccatcacattcctccacagtaaaggacagtctcatcgaactcaaggaatcttcagcaaagctctacattaatcatactcctccaccactgtccaagagtaaggagagagaaatggacaagaaagatttggacaagtcaagggaaagatccagagaaagagagaaaaaagatgaaaaggacaggaaagagcggaaaagggatcactcaaacaacgaccgtgaagtgccaccggacttaaccaagagacgtaaagaggagaatggaacaatgggggtttcaaaacataaaagtgaaagtccttgtgaatctccttatccaaatgagaaagacaaggaaaaaaataagtcaaaatcttcaggcaaagaaaaaggcagtgattcatttaaatctgagaagatggataaaatctcctccggtggcaaaaaggagtccaggcatgataaagaaaagatagaaaagaaagagaaacgggacagttcaggaggaaaggaagagaagaaacatcataagtcctcggacaagcacagataatgaagactttccatcaaggctatggacagaccccctaagccgaaagtctcccagaggaggatgccaaagctccgtgcgtcactctcagaatgatatctcccataattaagagcttctggtgctgtccatttaatgggaatctgctttaagtcagaagatgagtacacaccaccatcctcttgacgagacattccaaagtcactgattttcagaacattattttcacctccaggcagtttcttacagcaaggtccctgtgtatacattttttactcgagatacaccatccagaatcagcatctaatgaaaatttcactgagttttagttcattcttctttctctgaaaggagaggaaatcgcctccaggaaccagttccttaatgacgtagataggccgtctttgtgtgtgaactcctatacttttgacattactgggatgattatattgcttgaggattttggcttctagtaaaaattttaatttcagttcctggggaagacgttcttgacgtgttttaacagcaacagcaattttatcctttaatgtgaccttaaatgtgtcaccaaaatttcccttgcctcttgtaacgtggcacctttatgattgagaacccatttcttattctcctaatggccatactgtgataccatgatgctcttaattggaacattgacttttttttttttggcaatttaaacaattgagataaaattcatataacatcaaatttacctttcacttttttttttttcttttggagaccaagtctcgctgttgtctcccaggctggagtgcagtggcgcgatctcggctcactgtgacctccgcctcctgggttcaagcaattctccttcctcagcctcctgagtagctgggactacaggcgtgcaccaccacgcctggctaatttttgtatttttagtagagataggggtttcaccgtgttagccaggatggtctcgatctcctgacctggtgatccacctgcctcggcctcccaaagtgttgggattataagcgtgagccatgacgcctggcctcaaacttgccatttttaaagtgtacaattcaatggtttttagtatatccactatgttgtgcaagcatcaccgctgtctaattccagagcatttctgtcaccccaaaaagaaactccatgcctattagcagtcactcccagttcttcccttcctcggcccctggaaaccagtaatgtactttctgtctctgtgattttgcctgttttggacatttcatttaaatggaattatgcaataatttgtggccttttgtgtttggctttcacttagcatcatgttctcaaggctcatccatgttgtggcatgtatcagtactgcattcctttttatggctaaatgatgtttcattgtatgagtgtgtaccacattttatttatccattcagcaattaatggacaggaacaatggcttttaagtattaaattgtaagttcaacattaaatgtatccacagttattgataatatcaagattatacatggtgtgaacagaatgctgtgtcgaaatggtatgtaaattatttgtcagcatttcatgtaagtgattattttctaaggacccttctagccctggttttaagaaatatgtgaatgtagtattttcatcaataaagtttaatgcattaagcattagcttaaaatttgaatgaaggcagatgtgaagatatttgccacatgttgtaataatcatgttttgaaattatttcaatatgaagtatttgaaaaatgtcaatacataaaggaaaggaaatgagtataattaagtcaatatatttttaaagcaatttttataatttagcagacactgcatcttaatataagttactattaaaattgtgtccttgtgaaaaatgtgatgtcattttcctttttttgttgatcatgtaaaataggttacttttctttgctacattttctatttaataagctattgcttgccgttgtggaatgttttacttgttgctccatttttttctccctacccccacccctctctcccacacgcacacaatgttcaattttttttttaagtcatcattagtgtgtttatctttaatggattctaagaatggacaaaaagaaacacacaaatatttcatccttttctggggactcaagtctttgttaccgatggaactcattaacttcttgttctttcttaaatcttcctccctccttaccttttcctctccttccttctcttcttcttcctttcttctcccctccctccctccctcccttcttccctccctcctcctttcattctccttctctccttctcccttccttttctcctacctcctttgactaagcctccctcccctactccctcctttccttccttccttccttcttctctatcaatataatcactttgtttctttcaggtgagatcggactggaactgttcggctgcgaccagaaatttattttcctgagtaaattgccgagaattaagaatgaagagggccatttgcatctccttaaattattcagttacctgctttattgctccatgtggaaaacttaaaattgttaagttgtgcattactgtattttaacttgttgcttagtttctacatgtttattttcagtaatggctgaaagtgttaactgttccatacttttagcacaatgtgctgcataaggttacctgtgtacagagttttactttagattaactaaatattgcctgggttcagtttttatttccattctgaaatgcttcctttttattgtttgaaactgaaaataaacaattgttgaacccttttgattttacctcattttaaaactgttttaatttattatttggcttgttcttaatattagtcactaaaagcagtgggagcattgtcttatgaaatgcttaggaatcattttatatagtacatgtacaacattaaacgtgtttaaaaaagaaaaaggtaccagcgatcacttgtcccttgccattttttcttgtaattatgttagacaaatcttggcggcggggggatcaaaacataattgttttaattctacagctgtaggagctttgtattgctgaactttcatctggaaaagtttcacagtgacatttttaaaagagaatttttttatctgccgaattctaccagtgtaaccttttttctaaataaacaatagttttctcaaaaggttgtatatta

SEQ ID NO: 311848 - DNA, 4494 bp, Homo sapiens
tatcacagaacgagtacaatgctggcttagtattactttttattccctagataggagtatataagcgttaagaagtaatcagcttgctgtttctttctaattattctctaatcattttgctctgaaattgtagcttatttacatttaggggcttgttaaataaaaccttacttttatttcagataaatcaagggagagatctcagtgtggtgtgaaagctgttaataaagcttctagtaccacacctaaagggaattcaagcaatggaaatagtggctctaacagcaacaaagctgttaaagaaaatgacaaagaaaaagggaaagagaaagaaaaagagaaaaaagaaaagactccagctactactccagaggccagggtacttggtaaagatggtaaagaaaaaccaaaggaagagcggccaaataaagatgaaaaagcaagagagaccaaggaaagaacgccgaagtctgacaaagagaaagaaaaattcaagaaggaagaaaaagctaaagatgagaaatttaagaccactgtccccaacgcagaatcaaaatcaactcaagaaagggaaaagagagaaggagccatccagagaaagagatatagcaaaggaaatgaaatcaaaggaaaatgttaaaggaggagaaaaaacaccagtttctgggtccttgaaatcacctgttcccagatcagatattccagagcctgaaagggaacaaaaacgccgcaaaattgatactcacccttctccatcacattcctccacagtaaaggacagtctcatcgaactcaaggaatcttcagcaaagctctacattaatcatactcctccaccactgtccaagagtaaggagagagaaatggacaagaaagatttggacaagtcaagggaaagatccagagaaagagagaaaaaagatgaaaaggacaggaaagagcggaaaagggatcactcaaacaacgaccgtgaagtgccaccggacttaaccaagagacgtaaagaggagaatggaacaatgggggtttcaaaacataaaagtgaaagtccttgtgaatctccttatccaaatgagaaagacaaggaaaaaaataagtcaaaatcttcaggcaaagaaaaaggcagtgattcatttaaatctgagaagatggataaaatctcctccggtggcaaaaaggagtccaggcatgataaagaaaagatagaaaagaaagagaaacgggacagttcaggaggaaaggaagagaagaaacatcataagtcctcggacaagcacagataatgaagactttccatcaaggctatggacagaccccctaagccgaaagtctcccagaggaggatgccaaagctccgtgcgtcactctcagaatgatatctcccataattaagagcttctggtgctgtccatttaatgggaatctgctttaagtcagaagatgagtacacaccaccatcctcttgacgagacattccaaagtcactgattttcagaacattattttcacctccaggcagtttcttacagcaaggtccctgtgtatacattttttactcgagatacaccatccagaatcagcatctaatgaaaatttcactgagttttagttcattcttctttctctgaaaggagaggaaatcgcctccaggaaccagttccttaatgacgtagataggccgtctttgtgtgtgaactcctatacttttgacattactgggatgattatattgcttgaggattttggcttctagtaaaaattttaatttcagttcctggggaagacgttcttgacgtgttttaacagcaacagcaattttatcctttaatgtgaccttaaatgtgtcaccaaaatttcccttgcctcttgtaacgtggcacctttatgattgagaacccatttcttattctcctaatggccatactgtgataccatgatgctcttaattggaacattgacttttttttttttggcaatttaaacaattgagataaaattcatataacatcaaatttacctttcacttttttttttttcttttggagaccaagtctcgctgttgtctcccaggctggagtgcagtggcgcgatctcggctcactgtgacctccgcctcctgggttcaagcaattctccttcctcagcctcctgagtagctgggactacaggcgtgcaccaccacgcctggctaatttttgtatttttagtagagataggggtttcaccgtgttagccaggatggtctcgatctcctgacctggtgatccacctgcctcggcctcccaaagtgttgggattataagcgtgagccatgacgcctggcctcaaacttgccatttttaaagtgtacaattcaatggtttttagtatatccactatgttgtgcaagcatcaccgctgtctaattccagagcatttctgtcaccccaaaaagaaactccatgcctattagcagtcactcccagttcttcccttcctcggcccctggaaaccagtaatgtactttctgtctctgtgattttgcctgttttggacatttcatttaaatggaattatgcaataatttgtggccttttgtgtttggctttcacttagcatcatgttctcaaggctcatccatgttgtggcatgtatcagtactgcattcctttttatggctaaatgatgtttcattgtatgagtgtgtaccacattttatttatccattcagcaattaatggacaggaacaatggcttttaagtattaaattgtaagttcaacattaaatgtatccacagttattgataatatcaagattatacatggtgtgaacagaatgctgtgtcgaaatggtatgtaaattatttgtcagcatttcatgtaagtgattattttctaaggacccttctagccctggttttaagaaatatgtgaatgtagtattttcatcaataaagtttaatgcattaagcattagcttaaaatttgaatgaaggcagatgtgaagatatttgccacatgttgtaataatcatgttttgaaattatttcaatatgaagtatttgaaaaatgtcaatacataaaggaaaggaaatgagtataattaagtcaatatatttttaaagcaatttttataatttagcagacactgcatcttaatataagttactattaaaattgtgtccttgtgaaaaatgtgatgtcattttcctttttttgttgatcatgtaaaataggttacttttctttgctacattttctatttaataagctattgcttgccgttgtggaatgttttacttgttgctccatttttttctccctacccccacccctctctcccacacgcacacaatgttcaattttttttttaagtcatcattagtgtgtttatctttaatggattctaagaatggacaaaaagaaacacacaaatatttcatccttttctggggactcaagtctttgttaccgatggaactcattaacttcttgttctttcttaaatcttcctccctccttaccttttcctctccttccttctcttcttcttcctttcttctcccctccctccctccctcccttcttccctccctcctcctttcattctccttctctccttctcccttccttttctcctacctcctttgactaagcctccctcccctactccctcctttccttccttccttccttcttctctatcaatataatcactttgtttctttcaggtgagatcggactggaactgttcggctgcgaccagaaatttattttcctgagtaaattgccgagaattaagaatgaagagggccatttgcatctccttaaattattcagttacctgctttattgctccatgtggaaaacttaaaattgttaagttgtgcattactgtattttaacttgttgcttagtttctacatgtttattttcagtaatggctgaaagtgttaactgttccatacttttagcacaatgtgctgcataaggttacctgtgtacagagttttactttagattaactaaatattgcctgggttcagtttttatttccattctgaaatgcttcctttttattgtttgaaactgaaaataaacaattgttgaacccttttgattttacctcattttaaaactgttttaatttattatttggcttgttcttaatattagtcactaaaagcagtgggagcattgtcttatgaaatgcttaggaatcattttatatagtacatgtacaacattaaacgtgtttaaaaaagaaaaaggtaccagcgatcacttgtcccttgccattttttcttgtaattatgttagacaaatcttggcggcggggggatcaaaacataattgttttaattctacagctgtaggagctttgtattgctgaactttcatctggaaaagtttcacagtgacatttttaaaagagaatttttttatctgccgaattctaccagtgtaaccttttttctaaataaacaatagttttctcaaaaggttgtatatta

SEQ ID NO: 311849 - DNA, 973 bp, Homo sapiens
gaggcagcggtccgggaacccgtgctgccccggccccgccgcccacacctgagcctccgtggcgccccgcccccgcacctatgccgcgtggggcgggggctgcgggcgggggtgcgcggcgccggatgagcctcctggcctcgccgagggtgtacagggggtgggagagtcaggccggggaccgaaacttggctgagcagagcaccagcccctttgtctcctccgccccctcttccccacttcctgcccagctctggatcggcggcgcggcgcggactttgtaaacacttcgccactgcagggtggagactggctctgttcggatgccggccgggggggagaggtgcaatcctctcctcgcggctggtggttgcgaccacccccactccccaaaggcaggctccggaggcggcgggacagagcgcctgcgaccccagtcggtgctccggggaggtcacctgacgaggaggtaggcttgggtgctggagaaaccggggtagatgggatgtcagctcaggctggagaccatgcgttggggatcggtgctgggtgggtcaatggggtcgccgcatcctcatcacttcctagttggcaccgaaagcttggctcactttcccactgagtgaggtgttctgcacggaattgaagggcagagaaacccccaaaggccctgagccctctgtatgtacacacatcggcacaaccccctccagctgatctggaagccccgtggctttaccgggctgttggtcttctcatgcctcaaagatggggtggaaggccagtaggagggcagaccagtgtggatggggagtctgtgagtgctctggcaagtgcaccgggatgaaactggagggagggacccctcagtggtgtctgattgatacatagatgatgatcttagcttcttctgtgtctcttgaagtgccaacaagaggaataactgaataaattggttgctgttactaaggaa

SEQ ID NO: 311850 - DNA, 2047 bp, Homo sapiens
gccacggttgctacatcgtcgcgaggggcggggcgcctgtcagggaagcggcgcgcgcgcgggcggcgggcgggctggggatccgccgcgcagtgccagcgccagcgccagacccgcgccccgcgctctccggcccgtcgcctgccttgggactcgcgagcccgcactcccgccctgcctgttcgctgcccgagtatggagctgctgtgttgcgaaggcacccggcacgcgccccgggccgggccggacccgcggctgctgggggaccagcgtgtcctgcagagcctgctccgcctggaggagcgctacgtaccccgcgcctcctacttccagtgcgtgcagcgggagatcaagccgcacatgcggaagatgctggcttactggatgctggaggtatgtgaggagcagcgctgtgaggaggaagtcttccccctggccatgaactacctggatcgctacctgtcttgcgtccccacccgaaaggcgcagttgcagctcctgggtgcggtctgcatgctgctggcctccaagctgcgcgagaccacgcccctgaccatcgaaaaactgtgcatctacaccgaccacgctgtctctccccgccagttgcgggactgggaggtgctggtcctagggaagctcaagtgggacctggctgctgtgattgcacatgatttcctggccttcattctgcaccggctctctctgccccgtgaccgacaggccttggtcaaaaagcatgcccagacctttttggccctctgtgctacagattatacctttgccatgtacccgccatccatgatcgccacgggcagcattggggctgcagtgcaaggcctgggtgcctgctccatgtccggggatgagctcacagagctgctggcagggatcactggcactgaagtggactgcctgcgggcctgtcaggagcagatcgaagctgcactcagggagagcctcagggaagccgctcagaccagctccagccagccaagggcccagccagaccagcactcctacagatgtcacagccatacacctgtagccctggagaggccctctggagtggccactaagcagaggaggggccgctgccacccacctccctgcctccaggaaccacaccacatctaagcctgaaggggcgtctgttcccccttcacaaagcccaagggatctggtcctacccatccccgcagtgtgcactaaggggcccggccagccatgtctgcatttcggtggctagtcaagctcctcctccctgcatctgaccagcagcgcctttcccaactctagctgggggtgggccaggctgatgggacagaattggatacatacaccagcattccttttgaacgccccccccccacccctgggggctctcatgttttcaactgccaaaatgctctagtgccttctaaaggtgttgtcccttctagggttattgcatttggattggggtccctctaaaatttaatgcatgatagacacatatgagggggaatagtctagatggctcctctcagtactttggaggcccctatgtagtccgtgctgacagctgctcctagagggaggggcctaggcctcagccagagaagctataaattcctctttgctttgctttctgctcagcttctcctgtgtgattgacagctttgctgctgaaggctcattttaatttattaattgctttgagcacaactttaagaggacgtaatggggtcctggccatcccacaagtggtggtaaccctggtggttgctgttttcctcccttctgctactggcaaaaggatctttgtggccaaggagctgctatagcctggggtggggtcatgccctcctctcccattgtccctctgccccatcctccagcagggaaaatgcagcagggatgccctggaggtggctgagcccctgtctagagagggaggcaagccctgttgacacaggtctttcctaaggctgcaaggtttaggctggtggcccaggaccatcatcctactgtaataaagatgattgtgaaataaaactggctttggctt

SEQ ID NO: 311851 - DNA, 3012 bp, Homo sapiens
gccacggttgctacatcgtcgcgaggggcggggcgcctgtcagggaagcggcgcgcgcgcgggcggcgggcgggctggggatccgccgcgcagtgccagcgccagcgccagacccgcgccccgcgctctccggcccgtcgcctgccttgggactcgcgagcccgcactcccgccctgcctgttcgctgcccgagtatggagctgctgtgttgcgaaggcacccggcacgcgccccgggccgggccggacccgcggctgctgggggaccagcgtgtcctgcagagcctgctccgcctggaggagcgctacgtaccccgcgcctcctacttccagtgcgtgcagcgggagatcaagccgcacatgcggaagatgctggcttactggatgctggaggtatgtgaggagcagcgctgtgaggaggaagtcttccccctggccatgaactacctggatcgctacctgtcttgcgtccccacccgaaaggcgcagttgcagctcctgggtgcggtctgcatgctgctggcctccaagctgcgcgagaccacgcccctgaccatcgaaaaactgtgcatctacaccgaccacgctgtctctccccgccagttgcgggactgggaggtgctggtcctagggaagctcaagtgggacctggctgctgtgattgcacatgatttcctggccttcattctgcaccggctctctctgccccgtgaccgacaggccttggtcaaaaagcatgcccagacctttttggccctctgtgctacagattatacctttgccatgtacccgccatccatgatcgccacgggcagcattggggctgcagtgcaaggcctgggtgcctgctccatgtccggggatgagctcacagagctgctggcagggatcactggcactgaagtggactgcctgcgggcctgtcaggagcagatcgaagctgcactcagggagagcctcagggaagccgctcagaccagctccagcccagcgcccaaagccccccggggctccagcagccaagggcccagccagaccagcactcctacagatgtcacagccatacacctgtagccctggagaggccctctggagtggccactaagcagaggaggggccgctgccacccacctccctgcctccaggaaccacaccacatctaagcctgaaggggcgtctgttcccccttcacaaagcccaagggatctggtcctacccatccccgcagtgtgcactaaggggcccggccagccatgtctgcatttcggtggctagtcaagctcctcctccctgcatctgaccagcagcgcctttcccaactctagctgggggtgggccaggctgatgggacagaattggatacatacaccagcattccttttgaacgccccccccccacccctgggggctctcatgttttcaactgccaaaatgctctagtgccttctaaaggtgttgtcccttctagggttattgcatttggattggggtccctctaaaatttaatgcatgatagacacatatgagggggaatagtctagatggctcctctcagtactttggaggcccctatgtagtccgtgctgacagctgctcctagagggaggggcctaggcctcagccagagaagctataaattcctctttgctttgctttctgctcagcttctcctgtgtgattgacagctttgctgctgaaggctcattttaatttattaattgctttgagcacaactttaagaggacgtaatggggtcctggccatcccacaagtggtggtaaccctggtggttgctgttttcctcccttctgctactggcaaaaggatctttgtggccaaggagctgctatagcctggggtggggtcatgccctcctctcccattgtccctctgccccatcctccagcagggaaaatgcagcagggatgccctggaggtggctgagcccctgtctagagagggaggcaagccctgttgacacaggtctttcctaaggctgcaaggtttaggctggtggcccaggaccatcatcctactgtaataaagatgattgtgaaataaaactggctttggcttaaaaaaaaaaaaaaaaaaaaaaaaaaaaaaaaaaaaaaaaaaaaaaaaaaaggggggggcgcccgaaaaaaaaacccggcgaggggcccccatgttccacggatccccccttctttttggtaaagaaggggccccagaagagagagctgcttataaaaacaacaaacacaggggccacattaaaaacaaacgccgcgccggatggggacaaaaacgtcgcgcggggcaaaatcgtggggggaaagagacaccccatctcgtggggggggcgcacacaagatgtggggacaaccacaccctcaagggacagaattttatacgagacctcacagggggaaaacaatataaacaacctttgacgggctgtataaacggggcgtgtcaaaccacccaacgcgcggtaataatcagtctgccggccgggtatgaagaaaacatttgcggccacacacggggtcattatattctttggaaccaaattttttttcccccgggcggtcttctagctacaaaatatgacggagcgacgaacaaaacggaacgaaccagccaagacaagaagaaggacaaaagtagatagaagggcgagaagagatggagggcaagacgataggcaggagagacgacacaaccaagacagaacgaagagagacagctaattgaccagaacatgaaggacaagtagaacaatgcaacgaaagaaaaaaacagaaaccgagagattaaagagaacaaatcaagaatgagaggcagaaacacaagcaggaacgatgaataagccacaaagcagaaagatgcacgagaagacacaaagaaaaagcaaacaaaaaacaaaaaacagcaacagaagaaaaagaaaaaaaagagaacagaaacacagagaaaagagagagggcaaggagaaagcacaagcaacggagcaacagaacacgaagg

SEQ ID NO: 311852 - DNA, 3056 bp, Homo sapiens
gccacggttgctacatcgtcgcgaggggcggggcgcctgtcagggaagcggcgcgcgcgcgggcggcgggcgggctggggatccgccgcgcagtgccagcgccagcgccagacccgcgccccgcgctctccggcccgtcgcctgccttgggactcgcgagcccgcactcccgccctgcctgttcgctgcccgagtatggagctgctgtgttgcgaaggcacccggcacgcgccccgggccgggccggacccgcggctgctgggggaccagcgtgtcctgcagagcctgctccgcctggaggagcgctacgtaccccgcgcctcctacttccagtgcgtgcagcgggagatcaagccgcacatgcggaagatgctggcttactggatgctggaggtatgtgaggagcagcgctgtgaggaggaagtcttccccctggccatgaactacctggatcgctacctgtcttgcgtccccacccgaaaggcgcagttgcagctcctgggtgcggtctgcatgctgctggcctccaagctgcgcgagaccacgcccctgaccatcgaaaaactgtgcatctacaccgaccacgctgtctctccccgccagttgcgggactgggaggtgctggtcctagggaagctcaagtgggacctggctgctgtgattgcacatgatttcctggccttcattctgcaccggctctctctgccccgtgaccgacaggccttggtcaaaaagcatgcccagacctttttggccctctgtgctacagattatacctttgccatgtacccgccatccatgatcgccacgggcagcattggggctgcagtgcaaggcctgggtgcctgctccatgtccggggatgagctcacagagctgctggcagggatcactggcactgaagtggactgcctgcgggcctgtcaggagcagatcgaagctgcactcagggagagcctcagggaagccgctcagaccagctccagcccagcgcccaaagccccccggggctccagcagccaagggcccagccagaccagcactcctacagatgtcacagccatacacctgtagccctggagaggccctctggagtggccactaagcagaggaggggccgctgccacccacctccctgcctccaggaaccacaccacatctaagcctgaaggggcgtctgttcccccttcacaaagcccaagggatctggtcctacccatccccgcagtgtgcactaaggggcccggccagccatgtctgcatttcggtggctagtcaagctcctcctccctgcatctgaccagcagcgcctttcccaactctagctgggggtgggccaggctgatgggacagaattggatacatacaccagcattccttttgaacgccccccccccacccctgggggctctcatgttttcaactgccaaaatgctctagtgccttctaaaggtgttgtcccttctagggttattgcatttggattggggtccctctaaaatttaatgcatgatagacacatatgagggggaatagtctagatggctcctctcagtactttggaggcccctatgtagtccgtgctgacagctgctcctagagggaggggcctaggcctcagccagagaagctataaattcctctttgctttgctttctgctcagcttctcctgtgtgattgacagctttgctgctgaaggctcattttaatttattaattgctttgagcacaactttaagaggacgtaatggggtcctggccatcccacaagtggtggtaaccctggtggttgctgttttcctcccttctgctactggcaaaaggatctttgtggccaaggagctgctatagcctggggtggggtcatgccctcctctcccattgtccctctgccccatcctccagcagggaaaatgcagcagggatgccctggaggtggctgagcccctgtctagagagggaggcaagccctgttgacacaggtctttcctaaggctgcaaggtttaggctggtggcccaggaccatcatcctactgtaataaagatgattgtgaaataaaactggctttggcttaaaaaaaaaaaaaaaaaaaaaaaaaaaaaaaaaaaaaaaaaaaaaaaaaaaaaaaaaaaaaaaaaaaaaaaaaaaaaaaaaaaaaaaaaaaaaaaggggggggcgcccgaaaaaaaaacccggcgaggggcccccatgttccacggatccccccttctttttggtaaagaaggggccccagaagagagagctgcttataaaaacaacaaacacaggggccacattaaaaacaaacgccgcgccggatggggacaaaaacgtcgcgcggggcaaaatcgtggggggaaagagacaccccatctcgtggggggggcgcacacaagatgtggggacaaccacaccctcaagggacagaattttatacgagacctcacagggggaaaacaatataaacaacctttgacgggctgtataaacggggcgtgtcaaaccacccaacgcgcggtaataatcagtctgccggccgggtatgaagaaaacatttgcggccacacacggggtcattatattctttggaaccaaattttttttcccccgggcggtcttctagctacaaaatatgacggagcgacgaacaaaacggaacgaaccagccaagacaagaagaaggacaaaagtagatagaagggcgagaagagatggagggcaagacgataggcaggagagacgacacaaccaagacagaacgaagagagacagctaattgaccagaacatgaaggacaagtagaacaatgcaacgaaagaaaaaaacagaaaccgagagattaaagagaacaaatcaagaatgagaggcagaaacacaagcaggaacgatgaataagccacaaagcagaaagatgcacgagaagacacaaagaaaaagcaaacaaaaaacaaaaaacagcaacagaagaaaaagaaaaaaaagagaacagaaacacagagaaaagagagagggcaaggagaaagcacaagcaacggagcaacagaacacgaagg

SEQ ID NO: 311853 - DNA, 2032 bp, Homo sapiens
ggccagagtcacgaagtcgagtactcgtgcagcctgcggtacatcaggagcggttgctggcactatgtgagaaattaggagctcttgattccgaccgtggatgattggtagcccagagatactgtgctgagtgtgttggaatatcgcttgcaggttagacgaccactggttccagagagcacggaccacgaggaatgctgaggggagtaaccgtgtcgctgcttagctgtgtattcgttctggatcgatgtctgcgaggtacccacagcgtcttctacttcctttgcgtactctaggagatcgagccgctactgcggaatgaatgctggattaacggaatggctggagggtatgtgaggagcagcgctgtgaggaggaagtcttccccctggccatgaactacctggatcgctacctgtcttgcgtccccacccgaaaggcgcagttgcagctcctgggtgcggtctgcatgctgctggcctccaagctgcgcgagaccacgcccctgaccatcgaaaaactgtgcatctacaccgaccacgctgtctctccccgccagttgcgggactgggaggtgctggtcctagggaagctcaagtgggacctggctgctgtgattgcacatgatttcctggccttcattctgcaccggctctctctgccccgtgaccgacaggccttggtcaaaaagcatgcccagacctttttggccctctgtgctacagattatacctttgccatgtacccgccatccatgatcgccacgggcagcattggggctgcagtgcaaggcctgggtgcctgctccatgtccggggatgagctcacagagctgctggcagggatcactggcactgaagtggactgcctgcgggcctgtcaggagcagatcgaagctgcactcagggagagcctcagggaagccgctcagaccagctccagcccagcgcccaaagccccccggggctccagcagccaagggcccagccagaccagcactcctacagatgtcacagccatacacctgtagccctggagaggccctctggagtggccactaagcagaggaggggccgctgccacccacctccctgcctccaggaaccacaccacatctaagcctgaaggggcgtctgttcccccttcacaaagcccaagggatctggtcctacccatccccgcagtgtgcactaaggggcccggccagccatgtctgcatttcggtggctagtcaagctcctcctccctgcatctgaccagcagcgcctttcccaactctagctgggggtgggccaggctgatgggacagaattggatacatacaccagcattccttttgaacgccccccccccacccctgggggctctcatgttttcaactgccaaaatgctctagtgccttctaaaggtgttgtcccttctagggttattgcatttggattggggtccctctaaaatttaatgcatgatagacacatatgagggggaatagtctagatggctcctctcagtactttggaggcccctatgtagtccgtgctgacagctgctcctagagggaggggcctaggcctcagccagagaagctataaattcctctttgctttgctttctgctcagcttctcctgtgtgattgacagctttgctgctgaaggctcattttaatttattaattgctttgagcacaactttaagaggacgtaatggggtcctggccatcccacaagtggtggtaaccctggtggttgctgttttcctcccttctgctactggcaaaaggatctttgtggccaaggagctgctatagcctggggtggggtcatgccctcctctcccattgtccctctgccccatcctccagcagggaaaatgcagcagggatgccctggaggtggctgagcccctgtctagagagggaggcaagccctgttgacacaggtctttcctaaggctgcaaggtttaggctggtggcccaggaccatcatcctactgtaataaagatgattgtgaaataaaactggctttggctt

SEQ ID NO: 311854 - DNA, 1936 bp, Homo sapiens
gaggcagcggtccgggaacccgtgctgccccggccccgccgcccacacctgagcctccgtggcgccccgcccccgcacctatgccgcgtggggcgggggctgcgggcgggggtgcgcggcgccggatgagcctcctggcctcgccgagggtgtacagggggtgggagagtcaggccggggaccgaaacttggctgagcagagcaccagcccctttgtctcctccgccccctcttccccacttcctgcccagctctggatcggcggcgcggcgcggactttgtaaacacttcgccactgcagggtggagactggctctgttcggatgccggccgggggggagaggtgcaatcctctcctcgcggctggtggttgcgaccacccccactccccaaaggcaggctccggaggcggcgggacagagcgcctgcgaccccagtcggtgctccggggaggtcacctgacgaggaggactgggaggtgctggtcctagggaagctcaagtgggacctggctgctgtgattgcacatgatttcctggccttcattctgcaccggctctctctgccccgtgaccgacaggccttggtcaaaaagcatgcccagacctttttggccctctgtgctacagattatacctttgccatgtacccgccatccatgatcgccacgggcagcattggggctgcagtgcaaggcctgggtgcctgctccatgtccggggatgagctcacagagctgctggcagggatcactggcactgaagtggactgcctgcgggcctgtcaggagcagatcgaagctgcactcagggagagcctcagggaagccgctcagaccagctccagcccagcgcccaaagccccccggggctccagcagccaagggcccagccagaccagcactcctacagatgtcacagccatacacctgtagccctggagaggccctctggagtggccactaagcagaggaggggccgctgccacccacctccctgcctccaggaaccacaccacatctaagcctgaaggggcgtctgttcccccttcacaaagcccaagggatctggtcctacccatccccgcagtgtgcactaaggggcccggccagccatgtctgcatttcggtggctagtcaagctcctcctccctgcatctgaccagcagcgcctttcccaactctagctgggggtgggccaggctgatgggacagaattggatacatacaccagcattccttttgaacgccccccccccacccctgggggctctcatgttttcaactgccaaaatgctctagtgccttctaaaggtgttgtcccttctagggttattgcatttggattggggtccctctaaaatttaatgcatgatagacacatatgagggggaatagtctagatggctcctctcagtactttggaggcccctatgtagtccgtgctgacagctgctcctagagggaggggcctaggcctcagccagagaagctataaattcctctttgctttgctttctgctcagcttctcctgtgtgattgacagctttgctgctgaaggctcattttaatttattaattgctttgagcacaactttaagaggacgtaatggggtcctggccatcccacaagtggtggtaaccctggtggttgctgttttcctcccttctgctactggcaaaaggatctttgtggccaaggagctgctatagcctggggtggggtcatgccctcctctcccattgtccctctgccccatcctccagcagggaaaatgcagcagggatgccctggaggtggctgagcccctgtctagagagggaggcaagccctgttgacacaggtctttcctaaggctgcaaggtttaggctggtggcccaggaccatcatcctactgtaataaagatgattgtgaaataaaactggctttggctt

SEQ ID NO: 311855 - DNA, 1860 bp, Homo sapiens
gccacggttgctacatcgtcgcgaggggcggggcgcctgtcagggaagcggcgcgcgcgcgggcggcgggcgggctggggatccgccgcgcagtgccagcgccagcgccagacccgcgccccgcgctctccggcccgtcgcctgccttgggactcgcgagcccgcactcccgccctgcctgttcgctgcccgagtatggagctgctgtgttgcgaaggcacccggcacgcgccccgggccgggccggacccgcggctgctgggggaccagcgtgtcctgcagagcctgctccgcctggaggagcgctacgtaccccgcgcctcctacttccagtgcgtgcagcgggagatcaagccgcacatgcggaagatgctggcttactggatgctggaggactgggaggtgctggtcctagggaagctcaagtgggacctggctgctgtgattgcacatgatttcctggccttcattctgcaccggctctctctgccccgtgaccgacaggccttggtcaaaaagcatgcccagacctttttggccctctgtgctacagattatacctttgccatgtacccgccatccatgatcgccacgggcagcattggggctgcagtgcaaggcctgggtgcctgctccatgtccggggatgagctcacagagctgctggcagggatcactggcactgaagtggactgcctgcgggcctgtcaggagcagatcgaagctgcactcagggagagcctcagggaagccgctcagaccagctccagcccagcgcccaaagccccccggggctccagcagccaagggcccagccagaccagcactcctacagatgtcacagccatacacctgtagccctggagaggccctctggagtggccactaagcagaggaggggccgctgccacccacctccctgcctccaggaaccacaccacatctaagcctgaaggggcgtctgttcccccttcacaaagcccaagggatctggtcctacccatccccgcagtgtgcactaaggggcccggccagccatgtctgcatttcggtggctagtcaagctcctcctccctgcatctgaccagcagcgcctttcccaactctagctgggggtgggccaggctgatgggacagaattggatacatacaccagcattccttttgaacgccccccccccacccctgggggctctcatgttttcaactgccaaaatgctctagtgccttctaaaggtgttgtcccttctagggttattgcatttggattggggtccctctaaaatttaatgcatgatagacacatatgagggggaatagtctagatggctcctctcagtactttggaggcccctatgtagtccgtgctgacagctgctcctagagggaggggcctaggcctcagccagagaagctataaattcctctttgctttgctttctgctcagcttctcctgtgtgattgacagctttgctgctgaaggctcattttaatttattaattgctttgagcacaactttaagaggacgtaatggggtcctggccatcccacaagtggtggtaaccctggtggttgctgttttcctcccttctgctactggcaaaaggatctttgtggccaaggagctgctatagcctggggtggggtcatgccctcctctcccattgtccctctgccccatcctccagcagggaaaatgcagcagggatgccctggaggtggctgagcccctgtctagagagggaggcaagccctgttgacacaggtctttcctaaggctgcaaggtttaggctggtggcccaggaccatcatcctactgtaataaagatgattgtgaaataaaactggctttggctt

SEQ ID NO: 311856 - DNA, 2123 bp, Homo sapiens
gaggcagcggtccgggaacccgtgctgccccggccccgccgcccacacctgagcctccgtggcgccccgcccccgcacctatgccgcgtggggcgggggctgcgggcgggggtgcgcggcgccggatgagcctcctggcctcgccgagggtgtacagggggtgggagagtcaggccggggaccgaaacttggctgagcagagcaccagcccctttgtctcctccgccccctcttccccacttcctgcccagctctggatcggcggcgcggcgcggactttgtaaacacttcgccactgcagggtggagactggctctgttcggatgccggccgggggggagaggtgcaatcctctcctcgcggctggtggttgcgaccacccccactccccaaaggcaggctccggaggcggcgggacagagcgcctgcgaccccagtcggtgctccggggaggtcacctgacgaggaggtatgtgaggagcagcgctgtgaggaggaagtcttccccctggccatgaactacctggatcgctacctgtcttgcgtccccacccgaaaggcgcagttgcagctcctgggtgcggtctgcatgctgctggcctccaagctgcgcgagaccacgcccctgaccatcgaaaaactgtgcatctacaccgaccacgctgtctctccccgccagttgcgggactgggaggtgctggtcctagggaagctcaagtgggacctggctgctgtgattgcacatgatttcctggccttcattctgcaccggctctctctgccccgtgaccgacaggccttggtcaaaaagcatgcccagacctttttggccctctgtgctacagattatacctttgccatgtacccgccatccatgatcgccacgggcagcattggggctgcagtgcaaggcctgggtgcctgctccatgtccggggatgagctcacagagctgctggcagggatcactggcactgaagtggactgcctgcgggcctgtcaggagcagatcgaagctgcactcagggagagcctcagggaagccgctcagaccagctccagccagccaagggcccagccagaccagcactcctacagatgtcacagccatacacctgtagccctggagaggccctctggagtggccactaagcagaggaggggccgctgccacccacctccctgcctccaggaaccacaccacatctaagcctgaaggggcgtctgttcccccttcacaaagcccaagggatctggtcctacccatccccgcagtgtgcactaaggggcccggccagccatgtctgcatttcggtggctagtcaagctcctcctccctgcatctgaccagcagcgcctttcccaactctagctgggggtgggccaggctgatgggacagaattggatacatacaccagcattccttttgaacgccccccccccacccctgggggctctcatgttttcaactgccaaaatgctctagtgccttctaaaggtgttgtcccttctagggttattgcatttggattggggtccctctaaaatttaatgcatgatagacacatatgagggggaatagtctagatggctcctctcagtactttggaggcccctatgtagtccgtgctgacagctgctcctagagggaggggcctaggcctcagccagagaagctataaattcctctttgctttgctttctgctcagcttctcctgtgtgattgacagctttgctgctgaaggctcattttaatttattaattgctttgagcacaactttaagaggacgtaatggggtcctggccatcccacaagtggtggtaaccctggtggttgctgttttcctcccttctgctactggcaaaaggatctttgtggccaaggagctgctatagcctggggtggggtcatgccctcctctcccattgtccctctgccccatcctccagcagggaaaatgcagcagggatgccctggaggtggctgagcccctgtctagagagggaggcaagccctgttgacacaggtctttcctaaggctgcaaggtttaggctggtggcccaggaccatcatcctactgtaataaagatgattgtgaaataaaactggctttggctt

SEQ ID NO: 311857 - DNA, 587 bp, Homo sapiens
cctcatgtgtgcaactcagaaatggggccaggtctgggaacccatgacgagtggactggggtggagctcccagccttctcccgagacctagtactggcaggtaggcttgggtaggtgaggatagggcttgatccctctggaatcatttggagccatcctgtctggcttggcctctacctatcctcctgaaagtcaagtggcatggggcactacgggttccagctaaagggggtggggtggggtgctatacctcaggacccatccctgatatcctaccaaggggatgtggcttgggttgggcaatctcccctttgaggaacctgagaaaaggctctgtggctgtcattggaggagtcatactcccttctgttgattcaagaagtgtggacttggctgggatgcagagttgcaggggaagctagtggtgatctcccctttcacaaatccttggggttgagagagtctttctgcttcatcccagaagagagcccagttcatggtgatgctgtggtatctgctgcttccgtctttcagccctggctggagaaatcctcagagccctgaatgaagtcaggagaaggcctgga

SEQ ID NO: 311858 - DNA, 2076 bp, Homo sapiens
gccacggttgctacatcgtcgcgaggggcggggcgcctgtcagggaagcggcgcgcgcgcgggcggcgggcgggctggggatccgccgcgcagtgccagcgccagcgccagacccgcgccccgcgctctccggcccgtcgcctgccttgggactcgcgagcccgcactcccgccctgcctgttcgctgcccgagtatggagctgctgtgttgcgaaggcacccggcacgcgccccgggccgggccggacccgcggctgctgggggaccagcgtgtcctgcagagcctgctccgcctggaggagcgctacgtaccccgcgcctcctacttccagtgcgtgcagcgggagatcaagccgcacatgcggaagatgctggcttactggatgctggaggtatgtgaggagcagcgctgtgaggaggaagtcttccccctggccatgaactacctggatcgctacctgtcttgcgtccccacccgaaaggcgcagttgcagctcctgggtgcggtctgcatgctgctggcctccaagctgcgcgagaccacgcccctgaccatcgaaaaactgtgcatctacaccgaccacgctgtctctccccgccagttgcgggactgggaggtgctggtcctagggaagctcaagtgggacctggctgctgtgattgcacatgatttcctggccttcattctgcaccggctctctctgccccgtgaccgacaggccttggtcaaaaagcatgcccagacctttttggccctctgtgctacagattatacctttgccatgtacccgccatccatgatcgccacgggcagcattggggctgcagtgcaaggcctgggtgcctgctccatgtccggggatgagctcacagagctgctggcagggatcactggcactgaagtggactgcctgcgggcctgtcaggagcagatcgaagctgcactcagggagagcctcagggaagccgctcagaccagctccagcccagcgcccaaagccccccggggctccagcagccaagggcccagccagaccagcactcctacagatgtcacagccatacacctgtagccctggagaggccctctggagtggccactaagcagaggaggggccgctgccacccacctccctgcctccaggaaccacaccacatctaagcctgaaggggcgtctgttcccccttcacaaagcccaagggatctggtcctacccatccccgcagtgtgcactaaggggcccggccagccatgtctgcatttcggtggctagtcaagctcctcctccctgcatctgaccagcagcgcctttcccaactctagctgggggtgggccaggctgatgggacagaattggatacatacaccagcattccttttgaacgccccccccccacccctgggggctctcatgttttcaactgccaaaatgctctagtgccttctaaaggtgttgtcccttctagggttattgcatttggattggggtccctctaaaatttaatgcatgatagacacatatgagggggaatagtctagatggctcctctcagtactttggaggcccctatgtagtccgtgctgacagctgctcctagagggaggggcctaggcctcagccagagaagctataaattcctctttgctttgctttctgctcagcttctcctgtgtgattgacagctttgctgctgaaggctcattttaatttattaattgctttgagcacaactttaagaggacgtaatggggtcctggccatcccacaagtggtggtaaccctggtggttgctgttttcctcccttctgctactggcaaaaggatctttgtggccaaggagctgctatagcctggggtggggtcatgccctcctctcccattgtccctctgccccatcctccagcagggaaaatgcagcagggatgccctggaggtggctgagcccctgtctagagagggaggcaagccctgttgacacaggtctttcctaaggctgcaaggtttaggctggtggcccaggaccatcatcctactgtaataaagatgattgtgaaataaaactggctttggctt

SEQ ID NO: 311859 - DNA, 822 bp, Homo sapiens
  misc_feature (774)..(774): n is a, c, g, or t
  misc_feature (776)..(776): n is a, c, g, or t
  misc_feature (787)..(788): n is a, c, g, or t
gccacggttgctacatcgtcgcgaggggcggggcgcctgtcagggaagcggcgcgcgcgcgggcggcgggcgggctggggatccgccgcgcagtgccagcgccagcgccagacccgcgccccgcgctctccggcccgtcgcctgccttgggactcgcgagcccgcactcccgccctgcctgttcgctgcccgagtatggagctgctgtgttgcgaaggcacccggcacgcgccccgggccgggccggacccgcggctgctgggggaccagcgtgtcctgcagagcctgctccgcctggaggagcgctacgtaccccgcgcctcctacttccagtgcgtgcagcgggagatcaagccgcacatgcggaagatgctggcttactggatgctggaggtatgtgaggagcagcgctgtgaggaggaagtcttccccctggccatgaactacctggatcgctacctgtcttgcgtccccacccgaaaggcgcagttgcagctcctgggtgcggtctgcatgctgctggcctccaagctgcgcgagaccacgcccctgaccatcgaaaaactgtgcatctacaccgaccacgctgtctctccccgccagttgcgggactgggaggtgctggtcctagggaagctcaagtgggacctggctgctgtgattgcacatgatttcctggccttcattctgcaccggctctctctgccccgtgaccgacaggccttggtcaaaaagcatgcccagacctttttggccctctgtgctacagatttncntttgccatgtnnccgccatcatgaacacacccggggggtcctgcag

SEQ ID NO: 311860 - DNA, 1181 bp, Homo sapiens
gaggcagcggtccgggaacccgtgctgccccggccccgccgcccacacctgagcctccgtggcgccccgcccccgcacctatgccgcgtggggcgggggctgcgggcgggggtgcgcggcgccggatgagcctcctggcctcgccgagggtgtacagggggtgggagagtcaggccggggaccgaaacttggctgagcagagcaccagcccctttgtctcctccgccccctcttccccacttcctgcccagctctggatcggcggcgcggcgcggactttgtaaacacttcgccactgcagggtggagactggctctgttcggatgccggccgggggggagaggtgcaatcctctcctcgcggctggtggttgcgaccacccccactccccaaaggcaggctccggaggcggcgggacagagcgcctgcgaccccagtcggtgctccggggaggtcacctgacgaggaggtatgtgaggagcagcgctgtgaggaggaagtcttccccctggccatgaactacctggatcgctacctgtcttgcgtccccacccgaaaggcgcagttgcagctcctgggtgcggtctgcatgctgctggcctccaagctgcgcgagaccacgcccctgaccatcgaaaaactgtgcatctacaccgaccacgctgtctctccccgccagttgcgggactgggaggtgctggtcctagggaagctcaagtgggacctggctgctgtgattgcacatgatttcctggccttcattctgcaccggctctctctgccccgtgaccgacaggccttggtcaaaaagcatgcccagacctttttggccctctgtgctacagattatacctttgccatgtacccgccatccatgatcgccacgggcagcattggggctgcagtgcaaggcctgggtgcctgctccatgtccggggatgagctcacagagctgctggcagggatcactggcactgaagtgggtgagtgctgggtagctgggcagcagcctctccattcataaagtagtgctatgccctgagcctccagtagagggaaacctccaaccccaacctggtcccaagtcctggtttcacaaccttggggctttgtggctttttatctcctgccttggtctggggaagagcaagtatcttgggtggggtgaagggcactggccc

SEQ ID NO: 311861 - DNA, 2440 bp, Homo sapiens
gccacggttgctacatcgtcgcgaggggcggggcgcctgtcagggaagcggcgcgcgcgcgggcggcgggcgggctggggatccgccgcgcagtgccagcgccagcgccagacccgcgccccgcgctctccggcccgtcgcctgccttgggactcgcgagcccgcactcccgccctgcctgttcgctgcccgagtatggagctgctgtgttgcgaaggcacccggcacgcgccccgggccgggccggacccgcggctgctgggggaccagcgtgtcctgcagagcctgctccgcctggaggagcgctacgtaccccgcgcctcctacttccagtgcgtgcagcgggagatcaagccgcacatgcggaagatgctggcttactggatgctggaggtatgtgaggagcagcgctgtgaggaggaagtcttccccctggccatgaactacctggatcgctacctgtcttgcgtccccacccgaaaggcgcagttgcagctcctgggtgcggtctgcatgctgctggcctccaagctgcgcgagaccacgcccctgaccatcgaaaaactgtgcatctacaccgaccacgctgtctctccccgccagttgcgggactgggaggtgctggtcctagggaagctcaagtgggacctggctgctgtgattgcacatgatttcctggccttcattctgcaccggctctctctgccccgtgaccgacaggccttggtcaaaaagcatgcccagacctttttggccctctgtgctacagattatacctttgccatgtacccgccatccatgatcgccacgggcagcattggggctgcagtgcaaggcctgggtgcctgctccatgtccggggatgagctcacagagctgctggcagggatcactggcactgaagtggactgcctgcgggcctgtcaggagcagatcgaagctgcactcagggagagcctcagggaagccgctcagaccagctccagcccagcgcccaaagccccccggggctccagcagccaagggcccagccagaccagcactcctacagatgtcacagccatacacctgtagccctggagaggccctctggagtggccactaagcagaggaggggccgctgccacccacctccctgcctccaggaaccacaccacatctaagcctgaaggggcgtctgttcccccttcacaaagcccaagggatctggtcctacccatccccgcagtgtgcactaaggggcccggccagccatgtctgcatttcggtggctagtcaagctcctcctccctgcatctgaccagcagcgcctttcccaactctagctgggggtgggccaggctgatgggacagaattggatacatacaccagcattccttttgaacgccccccccccacccctgggggctctcatgttttcaactgccaaaatgctctagtgccttctaaaggtgttgtcccttctagggttattgcatttggattggggtccctctaaaatttaatgcatgatagacacatatgagggggaatagtctagatggctcctctcagtactttggaggcccctatgtagtccgtgctgacagctgctcctagagggaggggcctaggcctcagccagagaagctataaattcctctttgctttgctttctgctcagcttctcctgtgtgattgacagctttgctgctgaaggctcattttaatttattaattgctttgagcacaactttaagaggacgtaatggggtcctggccatcccacaagtggtggtaaccctggtggttgctgttttcctcccttctgctactggcaaaaggatctttgtggccaaggagctgctatagcctggggtggggtcatgccctcctctcccattgtccctctgccccatcctccagcagggaaaatgcagcagggatgccctggaggtggctgagcccctgtctagagagggaggcaagccctgttgacacaggtctttcctaaggctgcaaggtttaggctggtggcccaggaccatcatcctactgtaataaagatgattgtgaaataaaactggctttggcttaaaaaaaaaaaaaaaaaaaaaaaaaaaaaaaaaaaaaaaaaaaaaaaaaaaaaaaaaaaaaaaaccgaaaagacaacaagacacgaagaagagagatgagagagagagatgagagaggagcagcgagcagagagaaacgcgagacgggaatgatacacgacagagggagaaacacagagggagaggcgtaggggcgctgtcctataggagagaaggggaggggaggggagcgggagggaggagggcggcggcgggaggcgaagagggtgggggcgaggaggggtgagagaggcgacggagcggcgcggagagtcgacgagagaggagagaggaggggagcgcaacgacaggagagggagagtca

SEQ ID NO: 311862 - DNA, 2152 bp, Homo sapiens
gaggcagcggtccgggaacccgtgctgccccggccccgccgcccacacctgagcctccgtggcgccccgcccccgcacctatgccgcgtggggcgggggctgcgggcgggggtgcgcggcgccggatgagcctcctggcctcgccgagggtgtacagggggtgggagagtcaggccggggaccgaaacttggctgagcagagcaccagcccctttgtctcctccgccccctcttccccacttcctgcccagctctggatcggcggcgcggcgcggactttgtaaacacttcgccactgcagggtggagactggctctgttcggatgccggccgggggggagaggtgcaatcctctcctcgcggctggtggttgcgaccacccccactccccaaaggcaggctccggaggcggcgggacagagcgcctgcgaccccagtcggtgctccggggaggtcacctgacgaggaggtatgtgaggagcagcgctgtgaggaggaagtcttccccctggccatgaactacctggatcgctacctgtcttgcgtccccacccgaaaggcgcagttgcagctcctgggtgcggtctgcatgctgctggcctccaagctgcgcgagaccacgcccctgaccatcgaaaaactgtgcatctacaccgaccacgctgtctctccccgccagttgcgggactgggaggtgctggtcctagggaagctcaagtgggacctggctgctgtgattgcacatgatttcctggccttcattctgcaccggctctctctgccccgtgaccgacaggccttggtcaaaaagcatgcccagacctttttggccctctgtgctacagattatacctttgccatgtacccgccatccatgatcgccacgggcagcattggggctgcagtgcaaggcctgggtgcctgctccatgtccggggatgagctcacagagctgctggcagggatcactggcactgaagtggactgcctgcgggcctgtcaggagcagatcgaagctgcactcagggagagcctcagggaagccgctcagaccagctccagcccagcgcccaaagccccccggggctccagcagccaagggcccagccagaccagcactcctacagatgtcacagccatacacctgtagccctggagaggccctctggagtggccactaagcagaggaggggccgctgccacccacctccctgcctccaggaaccacaccacatctaagcctgaaggggcgtctgttcccccttcacaaagcccaagggatctggtcctacccatccccgcagtgtgcactaaggggcccggccagccatgtctgcatttcggtggctagtcaagctcctcctccctgcatctgaccagcagcgcctttcccaactctagctgggggtgggccaggctgatgggacagaattggatacatacaccagcattccttttgaacgccccccccccacccctgggggctctcatgttttcaactgccaaaatgctctagtgccttctaaaggtgttgtcccttctagggttattgcatttggattggggtccctctaaaatttaatgcatgatagacacatatgagggggaatagtctagatggctcctctcagtactttggaggcccctatgtagtccgtgctgacagctgctcctagagggaggggcctaggcctcagccagagaagctataaattcctctttgctttgctttctgctcagcttctcctgtgtgattgacagctttgctgctgaaggctcattttaatttattaattgctttgagcacaactttaagaggacgtaatggggtcctggccatcccacaagtggtggtaaccctggtggttgctgttttcctcccttctgctactggcaaaaggatctttgtggccaaggagctgctatagcctggggtggggtcatgccctcctctcccattgtccctctgccccatcctccagcagggaaaatgcagcagggatgccctggaggtggctgagcccctgtctagagagggaggcaagccctgttgacacaggtctttcctaaggctgcaaggtttaggctggtggcccaggaccatcatcctactgtaataaagatgattgtgaaataaaactggctttggctt

SEQ ID NO: 311863 - DNA, 2022 bp, Homo sapiens
gccacggttgctacatcgtcgcgaggggcggggcgcctgtcagggaagcggcgcgcgcgcgggcggcgggcgggctggggatccgccgcgcagtgccagcgccagcgccagacccgcgccccgcgctctccggcccgtcgcctgccttgggactcgcgagcccgcactcccgccctgcctgttcgctgcccgagtatggagctgctgtgttgcgaaggcacccggcacgcgccccgggccgggccggacccgcggctgctgggggaccagcgtgtcctgcagagcctgctccgcctggaggagcgctacgtaccccgcgcctcctacttccagtgcgtgcagcgggagatcaagccgcacatgcggaagatgctggcttactggatgctggaggtatgtgaggagcagcgctgtgaggaggaagtcttccccctggccatgaactacctggatcgctacctgtcttgcgtccccacccgaaaggcgcagttgcagctcctgggtgcggtctgcatgctgctggcctccaagctgcgcgagaccacgcccctgaccatcgaaaaactgtgcatctacaccgaccacgctgtctctccccgccagttgcgggactgggaggtgctggtcctagggaagctcaagtgggacctggctgctgtgattgcacatgatttcctggccttcattctgcaccggctctctctgccccgtgaccgacaggccttggtcaaaaagcatgcccagacctttttggccctctgtgctacagattatacctttgccatgtacccgccatccatgatcgccacgggcagcattggggctgcagtgcaaggcctgggtgcctgctccatgtccggggatgagctcacagagctgctggcagggatcactggcactgaagtggactgcctgcgggcctgtcaggagcagatcgaagctgcactcagggagagcctcagggaagccgctcagaccagctccagcccagcgcccaaagccccccggggctccagcagccaagggcccagccagaccagcactcctacagatgtcacagccatacacctgtagccctggagaggccctctggagtggccactaagcagaggaggggccgctgccacccacctccctgcctccaggaaccacaccacatctaagcctgaaggggcgtctgttcccccttcacaaagcccaagggatctggtcctacccatccccgcagtgtgcactaaggggcccggccagccatgtctgcatttcggtggctagtcaagctcctcctccctgcatctgaccagcagcgcctttcccaactctagctgggggtgggccaggctgatgggacagaattggatacatacaccagcattccttttgaacgccccccccccacccctgggggctctcatgttttcaactgccaaaatgctctagtgccttctaaaggtgttgtcccttctagggttattgcatttggattggggtccctctaaaatttaatgcatgatagacacatatgagggggaatagtctagatggctcctctcagtactttggaggcccctatgtagtccgtgctgacagctgctcctagagggaggggcctaggcctcagccagagaagctataaattcctctttgctttgctttctgctcagcttctcctgtgtgattgacagctttgctgctgaaggctcattttaatttattaattgctttgagcacaactttaagaggacgtaatggggtcctggccatcccacaagtggtggtaaccctggtggttgctgttttcctcccttctgctactggcaaaaggatctttgtggccaaggagctgctatagcctggggtggggtcatgccctcctctcccattgtccctctgccccatcctccagcagggcaagccctgttgacacaggtctttcctaaggctgcaaggtttaggctggtggcccaggaccatcatcctactgtaataaagatgattgtgaaataaaactggctttggctt

SEQ ID NO: 311864 - DNA, 1939 bp, Homo sapiens
gccacggttgctacatcgtcgcgaggggcggggcgcctgtcagggaagcggcgcgcgcgcgggcggcgggcgggctggggatccgccgcgcagtgccagcgccagcgccagacccgcgccccgcgctctccggcccgtcgcctgccttgggactcgcgagcccgcactcccgccctgcctgttcgctgcccgagtatggagctgctgtgttgcgaaggcacccggcacgcgccccgggccgggccggacccgcggctgctgggggaccagcgtgtcctgcagagcctgctccgcctggaggagcgctacgtaccccgcgcctcctacttccagtgcgtgcagcgggagatcaagccgcacatgcggaagatgctggcttactggatgctggaggtatgtgaggagcagcgctgtgaggaggaagtcttccccctggccatgaactacctggatcgctacctgtcttgcgtccccacccgaaaggcgcagttgcagctcctgggtgcggtctgcatgctgctggcctccaagctgcgcgagaccacgcccctgaccatcgaaaaactgtgcatctacaccgaccacgctgtctctccccgccagttgcgggactgggaggtgctggtcctagggaagctcaagtgggacctggctgctgtgattgcacatgatttcctggccttcattctgcaccggctctctctgccccgtgaccgacaggccttggtcaaaaagcatgcccagacctttttggccctctgtgctacaggactgcctgcgggcctgtcaggagcagatcgaagctgcactcagggagagcctcagggaagccgctcagaccagctccagcccagcgcccaaagccccccggggctccagcagccaagggcccagccagaccagcactcctacagatgtcacagccatacacctgtagccctggagaggccctctggagtggccactaagcagaggaggggccgctgccacccacctccctgcctccaggaaccacaccacatctaagcctgaaggggcgtctgttcccccttcacaaagcccaagggatctggtcctacccatccccgcagtgtgcactaaggggcccggccagccatgtctgcatttcggtggctagtcaagctcctcctccctgcatctgaccagcagcgcctttcccaactctagctgggggtgggccaggctgatgggacagaattggatacatacaccagcattccttttgaacgccccccccccacccctgggggctctcatgttttcaactgccaaaatgctctagtgccttctaaaggtgttgtcccttctagggttattgcatttggattggggtccctctaaaatttaatgcatgatagacacatatgagggggaatagtctagatggctcctctcagtactttggaggcccctatgtagtccgtgctgacagctgctcctagagggaggggcctaggcctcagccagagaagctataaattcctctttgctttgctttctgctcagcttctcctgtgtgattgacagctttgctgctgaaggctcattttaatttattaattgctttgagcacaactttaagaggacgtaatggggtcctggccatcccacaagtggtggtaaccctggtggttgctgttttcctcccttctgctactggcaaaaggatctttgtggccaaggagctgctatagcctggggtggggtcatgccctcctctcccattgtccctctgccccatcctccagcagggaaaatgcagcagggatgccctggaggtggctgagcccctgtctagagagggaggcaagccctgttgacacaggtctttcctaaggctgcaaggtttaggctggtggcccaggaccatcatcctactgtaataaagatgattgtgaaataaaactggctttggctt

SEQ ID NO: 311865 - DNA, 1568 bp, Homo sapiens
tcctcatgtgtgcaactcagaaatggggccaggtctgggaacccatgacgagtggactggggtggagctcccagccttctcccgagacctagtactggcaggactgggaggtgctggtcctagggaagctcaagtgggacctggctgctgtgattgcacatgatttcctggccttcattctgcaccggctctctctgccccgtgaccgacaggccttggtcaaaaagcatgcccagacctttttggccctctgtgctacagattatacctttgccatgtacccgccatccatgatcgccacgggcagcattggggctgcagtgcaaggcctgggtgcctgctccatgtccggggatgagctcacagagctgctggcagggatcactggcactgaagtggactgcctgcgggcctgtcaggagcagatcgaagctgcactcagggagagcctcagggaagccgctcagaccagctccagcccagcgcccaaagccccccggggctccagcagccaagggcccagccagaccagcactcctacagatgtcacagccatacacctgtagccctggagaggccctctggagtggccactaagcagaggaggggccgctgccacccacctccctgcctccaggaaccacaccacatctaagcctgaaggggcgtctgttcccccttcacaaagcccaagggatctggtcctacccatccccgcagtgtgcactaaggggcccggccagccatgtctgcatttcggtggctagtcaagctcctcctccctgcatctgaccagcagcgcctttcccaactctagctgggggtgggccaggctgatgggacagaattggatacatacaccagcattccttttgaacgccccccccccacccctgggggctctcatgttttcaactgccaaaatgctctagtgccttctaaaggtgttgtcccttctagggttattgcatttggattggggtccctctaaaatttaatgcatgatagacacatatgagggggaatagtctagatggctcctctcagtactttggaggcccctatgtagtccgtgctgacagctgctcctagagggaggggcctaggcctcagccagagaagctataaattcctctttgctttgctttctgctcagcttctcctgtgtgattgacagctttgctgctgaaggctcattttaatttattaattgctttgagcacaactttaagaggacgtaatggggtcctggccatcccacaagtggtggtaaccctggtggttgctgttttcctcccttctgctactggcaaaaggatctttgtggccaaggagctgctatagcctggggtggggtcatgccctcctctcccattgtccctctgccccatcctccagcagggaaaatgcagcagggatgccctggaggtggctgagcccctgtctagagagggaggcaagccctgttgacacaggtctttcctaaggctgcaaggtttaggctggtggcccaggaccatcatcctactgtaataaagatgattgtgaaataaaactggctttggctt

SEQ ID NO: 311866 - DNA, 1341 bp, Homo sapiens
  misc_feature (22)..(23): n is a, c, g, or t
tcggctaggtacgaggcctggnntgtggctacagattatacctttgccatgtacccgccatccatgatcgccacgggcagcattggggctgcagtgcaaggcctgggtgcctgctccatgtccggggatgagctcacagagctgctggcagggatcactggcactgaagtggactgcctgcgggcctgtcaggagcagatcgaagctgcactcagggagagcctcagggaagccgctcagaccagctccagcccagcgcccaaagccccccggggctccagcagccaagggcccagccagaccagcactcctacagatgtcacagccatacacctgtagccctggagaggccctctggagtggccactaagcagaggaggggccgctgccacccacctccctgcctccaggaaccacaccacatctaagcctgaaggggcgtctgttcccccttcacaaagcccaagggatctggtcctacccatccccgcagtgtgcactaaggggcccggccagccatgtctgcatttcggtggctagtcaagctcctcctccctgcatctgaccagcagcgcctttcccaactctagctgggggtgggccaggctgatgggacagaattggatacatacaccagcattccttttgaacgccccccccccacccctgggggctctcatgttttcaactgccaaaatgctctagtgccttctaaaggtgttgtcccttctagggttattgcatttggattggggtccctctaaaatttaatgcatgatagacacatatgagggggaatagtctagatggctcctctcagtactttggaggcccctatgtagtccgtgctgacagctgctcctagagggaggggcctaggcctcagccagagaagctataaattcctctttgctttgctttctgctcagcttctcctgtgtgattgacagctttgctgctgaaggctcattttaatttattaattgctttgagcacaactttaagaggacgtaatggggtcctggccatcccacaagtggtggtaaccctggtggttgctgttttcctcccttctgctactggcaaaaggatctttgtggccaaggagctgctatagcctggggtggggtcatgccctcctctcccattgtccctctgccccatcctccagcagggaaaatgcagcagggatgccctggaggtggctgagcccctgtctagagagggaggcaagccctgttgacacaggtctttcctaaggctgcaaggtttaggctggtggcccaggaccatcatcctactgtaataaagatgattgtgaaataaaactggctttggctt

SEQ ID NO: 311867 - DNA, 1930 bp, Homo sapiens
gcgctctggcacgtgttgtacgaaagcgcgtctgcggccgcaatgtctgctgagagttgtagttctgtgccctatcacggccactcccatttctggtgccgtcacgggacagagcagtcggtgacaggacagagcagtcggtgacgggacacagtggttggtgacgggacagagcggtcggtgacagcctcaagggcttcagcaccgcgcccatggcagagccagaccgactcagattcagactctgagggaggagccgctggtggagaagcagacatggacttcctgcggaacttattctcccagacgctcagcctgggcagccagaaggagcgtctgctggacgagctgaccttggaaggggtggcccggtacatgcagagcgaacgctgtcgcagagtcatctgtttggtgggagctggaatctccacatccgcaggcatccccgactttcgctctccatccaccggcctctatgacaacctagagaagtaccatcttccctacccagaggccatctttgagatcagctatttcaagaaacatccggaacccttcttcgccctcgccaaggaactctatcctgggcagttcaagccaaccatctgtcactacttcatgcgcctgctgaaggacaaggggctactcctgcgctgctacacgcagaacatagataccctggagcgaatagccgggctggaacaggaggacttggtggaggcgcacggcaccttctacacatcacactgcgtcagcgccagctgccggcacgaatacccgctaagctggatgaaagagaagatcttctctgaggtgacgcccaagtgtgaagactgtcagagcctggtgaagcctgatatcgtcttttttggtgagagcctcccagcgcgtttcttctcctgtatgcagtcagacttcctgaaggtggacctcctcctggtcatgggtacctccttgcaggtgcagccctttgcctccctcatcagcaaggcacccctctccacccctcgcctgctcatcaacaaggagaaagctggccagtcggaccctttcctggggatgattatgggcctcggaggaggcatggactttgactccaagaaggcctacagggacgtggcctggctgggtgaatgcgaccagggctgcctggcccttgctgagctccttggatggaagaaggagctggaggaccttgtccggagggagcacgccagcatagatgcccagtcgggggcgggggtccccaaccccagcacttcagcttcccccaagaagtccccgccacctgccaaggacgaggccaggacaacagagagggagaaaccccagtgacagctgcatctcccaggcgggatgccgagctcctcagggacagctgagccccaaccgggcctggccccctcttaaccagcagttcttgtctggggagctcagaacatcccccaatctcttacagctccctccccaaaactggggtcccagcaaccctggcccccaaccccagcaaatctctaacacctcctagaggccaaggcttaaacaggcatctctaccagccccactgtctctaaccactcctgggctaaggagtaacctccctcatctctaactgcccccacggggccagggctaccccagaacttttaactcttccaggacagggagcttcgggcccccactctgtctcctgcccccgggggcctgtggctaagtaaaccatacctaacctaccccagtgtgggtgtgggcctctgaatataacccacacccagcgtagggggagtctgagccgggagggctcccgagtctctgccttcagctcccaaagtgggtggtgggcccccttcacgtgggacccacttcccatgctggatgggcagaagacattgcttattggagacaaattaaaaacaaaaacaactaacaa

SEQ ID NO: 311868 - DNA, 612 bp, Homo sapiens
  misc_feature (607)..(607): n is a, c, g, or t
gcgctctggcacgtgttgtacgaaagcgcgtctgcggccgcaatgtctgctgagagttgtagttctgtgccctatcacggccactcccatttctggtgccgtcacgggacagagcagtcggtgacaggacagagcagtcggtgacgggacacagtggttggtgacgggacagagcggtcggtgacagcctcaagggcttcagcaccgcgcccatggcagagccagaccgactcagattcagactctgagggaggagccgctggtggagaagcagacatggacttcctgcggaacttattctcccagacgctcagcctgggcagccagaaggagcgtctgctggacgagctgaccttggaaggggtggcccggtacatgcagagcgaacgctgtcgcagagtcatctgtttggtgggagctggaatctccacatccgcaggcatccccgactttcgctctccatccaccggcctctatgacaacctagagaagtaccatcttccctacccagaggccatctttgagatcagctatttcaagaaacatccggaacccttattcgcacactacgacaccggactacttacactgtggacagttacaagancaaac

SEQ ID NO: 311869 - DNA, 2457 bp, Homo sapiens
  misc_feature (2306)..(2306): n is a, c, g, or t
  misc_feature (2322)..(2322): n is a, c, g, or t
gcgctctggcacgtgttgtacgaaagcgcgtctgcggccgcaatgtctgctgagagttgtagttctgtgccctatcacggccactcccatttctggtgccgtcacgggacagagcagtcggtgacaggacagagcagtcggtgacgggacacagtggttggtgacgggacagagcggtcggtgacagcctcaagggcttcagcaccgcgcccatggcagagccagaccgactcagattcagactctgagggaggagccgctggtggagaagcagacatggacttcctgcggaacttattctcccagacgctcagcctgggcagccagaaggagcgtctgctggacgagctgaccttggaaggggtggcccggtacatgcagagcgaacgctgtcgcagagtcatctgtttggtgggagctggaatctccacatccgcaggcatccccgactttcgctctccatccaccggcctctatgacaacctagagaagtaccatcttccctacccagaggccatctttgagatcagctatttcaagaaacatccggaacccttcttcgccctcgccaaggaactctatcctgggcagttcaagccaaccatctgtcactacttcatgcgcctgctgaaggacaaggggctactcctgcgctgctacacgcagaacatagataccctggagcgaatagccgggctggaacaggaggacttggtggaggcgcacggcaccttctacacatcacactgcgtcagcgccagctgccggcacgaatacccgctaagctggatgaaagagaagatcttctctgaggtgacgcccaagtgtgaagactgtcagagcctggtgaagcctgatatcgtcttttttggtgagagcctcccagcgcgtttcttctcctgtatgcagtcagacttcctgaaggtggacctcctcctggtcatgggtacctccttgcaggtgcagccctttgcctccctcatcagcaaggcacccctctccacccctcgcctgctcatcaacaaggagaaagctggccagtcggaccctttcctggggatgattatgggcctcggaggaggcatggactttgactccaagaaggcctacagggacgtggcctggctgggtgaatgcgaccagggctgcctggcccttgctgagctccttggatggaagaaggagctggaggaccttgtccggagggagcacgccagcatagatgcccagtcgggggcgggggtccccaaccccagcacttcagcttcccccaagaagtccccgccacctgccaaggacgaggccaggacaacagagagggagaaaccccagtgacagctgcatctcccaggcgggatgccgagctcctcagggacagctgagccccaaccgggcctggccccctcttaaccagcagttcttgtctggggagctcagaacatcccccaatctcttacagctccctccccaaaactggggtcccagcaaccctggcccccaaccccagcaaatctctaacacctcctagaggccaaggcttaaacaggcatctctaccagccccactgtctctaaccactcctgggctaaggagtaacctccctcatctctaactgcccccacggggccagggctaccccagaacttttaactcttccaggacagggagcttcgggcccccactctgtctcctgcccccgggggcctgtggctaagtaaaccatacctaacctaccccagtgtgggtgtgggcctctgaatataacccacacccagcgtagggggagtctgagccgggagggctcccgagtctctgccttcagctcccaaagtgggtggtgggcccccttcacgtgggacccacttcccatgctggatgggcagaagacattgcttattggagacaaattaaaaacaaaaacaactaacaaaaaaaaaaaaaaaaaactcgagactagttctctctctcctcgtgccgaattcggcacgaggccctacgtgagctacctcgcccctgagagcgaggagacgcccctgacggccgcgcagctcttcagcgaagccgtggcgcctgccatcgaaaaggacttcaaggacggtaccttcgaccctgacaacctggaaaagtacggcttcgagcccacacaggagggaaagctcttccagctctaccccaggaacttcctgcgctagctgggcgggggaggggcggcctgccctcatctcatttctattaaacgcctttgccagctaataaaaaaaaataaaaacttgagggggggctcggaacccaattcggcctattgntgggtcggtttacaantccactggccctccgctttacaacggtcctgacttggtgccggttggcgtataagcaaagaggccccggccgatcggccttcctaaaggtgggcacctgaatgggaagtgcgacatggtagcgtgaaatttggtt

SEQ ID NO: 311870 - DNA, 2530 bp, Homo sapiens
gcgctctggcacgtgttgtacgaaagcgcgtctgcggccgcaatgtctgctgagagttgtagttctgtgccctatcacggccactcccatttctggtgccgtcacgggacagagcagtcggtgacaggacagagcagtcggtgacgggacacagtggttggtgacgggacagagcggtcggtgacagcctcaagggcttcagcaccgcgcccatggcagagccagaccgactcagattcagactctgagggaggagccgctggtggagaagcagacatggacttcctgcggaacttattctcccagacgctcagcctgggcagccagaaggagcgtctgctggacgagctgaccttggaaggggtggcccggtacatgcagagcgaacgctgtcgcagagtcatctgtttggtgggagctggaatctccacatccgcaggcatccccgactttcgctctccatccaccggcctctatgacaacctagagaagtaccatcttccctacccagaggccatctttgagatcagctatttcaagaaacatccggaacccttcttcgccctcgccaaggaactctatcctgggcagttcaagccaaccatctgtcactacttcatgcgcctgctgaaggacaaggggctactcctgcgctgctacacgcagaacatagataccctggagcgaatagccgggctggaacaggaggacttggtggaggcgcacggcaccttctacacatcacactgcgtcagcgccagctgccggcacgaatacccgctaagctggatgaaagagaagatcttctctgaggtgacgcccaagtgtgaagactgtcagagcctggtgaagcctgatatcgtcttttttggtgagagcctcccagcgcgtttcttctcctgtatgcagtcagacttcctgaaggtggacctcctcctggtcatgggtacctccttgcaggtgcagccctttgcctccctcatcagcaaggcacccctctccacccctcgcctgctcatcaacaaggagaaagctggccagtcggaccctttcctggggatgattatgggcctcggaggaggcatggactttgactccaagaaggcctacagggacgtggcctggctgggtgaatgcgaccagggctgcctggcccttgctgagctccttggatggaagaaggagctggaggaccttgtccggagggagcacgccagcatagatgcccagtcgggggcgggggtccccaaccccagcacttcagcttcccccaagaagtccccgccacctgccaaggacgaggccaggacaacagagagggagaaaccccagtgacagctgcatctcccaggcgggatgccgagctcctcagggacagctgagccccaaccgggcctggccccctcttaaccagcagttcttgtctggggagctcagaacatcccccaatctcttacagctccctccccaaaactggggtcccagcaaccctggcccccaaccccagcaaatctctaacacctcctagaggccaaggcttaaacaggcatctctaccagccccactgtctctaaccactcctgggctaaggagtaacctccctcatctctaactgcccccacggggccagggctaccccagaacttttaactcttccaggacagggagcttcgggcccccactctgtctcctgcccccgggggcctgtggctaagtaaaccatacctaacctaccccagtgtgggtgtgggcctctgaatataacccacacccagcgtagggggagtctgagccgggagggctcccgagtctctgccttcagctcccaaagtgggtggtgggcccccttcacgtgggacccacttcccatgctggatgggcagaagacattgcttattggagacaaattaaaaacaaaaacaactaacaaaaaaaaaaaaaaaaaaaaaaaaaaaaaaaaaaaaaaaaaaaaaaaaaaaaaaaaaaaaaaaaaaaagaagggggggcggcgcccgatataatacttctccccggagggggcccgacgagtaagtagcactccacgacgatatttgttacaaaaggaggggcccccaaatgagagagggcgtttatataataacagagaggagcgagggcggcgcgatataaacaacggcggtagtagaggaacaacacagcgtccgcaggggaggaatatctgtgtgaggggaaggaaaacacaccccaatcagtggcgggtgggggggggggaaacagaatattgtgggtgggaacaaaaaacaacacgctatacgaaggagagatatatattatataacgccgctccgcggggggagaaaatatatatataaatagaaatctttgagagaggaattaattaggtgggtgtgtgtaaaaacaagcaagggcgcaacaattaagtatatgagtggcgggcgtaagtgaaaaaaaaaaagtaatggtgtgacctactgtgagagtaatggtaatttatttgagtaagaacaatatatatattctctaagca

SEQ ID NO: 311871 - DNA, 2086 bp, Homo sapiens
gcgctctggcacgtgttgtacgaaagcgcgtctgcggccgcaatgtctgctgagagttgtagttctgtgccctatcacggccactcccatttctggtgccgtcacgggacagagcagtcggtgacaggacagagcagtcggtgacgggacacagtggttggtgacgggacagagcggtcggtgacagcctcaagggcttcagcaccgcgcccatggcagagccagaccgactcagattcagactctgagggaggagccgctggtggagaagcagacatggacttcctgcggaacttattctcccagacgctcagcctgggcagccagaaggagcgtctgctggacgagctgaccttggaaggggtggcccggtacatgcagagcgaacgctgtcgcagagtcatctgtttggtgggagctggaatctccacatccgcaggcatccccgactttcgctctccatccaccggcctctatgacaacctagagaagtaccatcttccctacccagaggccatctttgagatcagctatttcaagaaacatccggaacccttcttcgccctcgccaaggaactctatcctgggcagttcaagccaaccatctgtcactacttcatgcgcctgctgaaggacaaggggctactcctgcgctgctacacgcagaacatagataccctggagcgaatagccgggctggaacaggaggacttggtggaggcgcacggcaccttctacacatcacactgcgtcagcgccagctgccggcacgaatacccgctaagctggatgaaagagaagatcttctctgaggtgacgcccaagtgtgaagactgtcagagcctggtgaagcctgatatcgtcttttttggtgagagcctcccagcgcgtttcttctcctgtatgcagtcagacttcctgaaggtggacctcctcctggtcatgggtacctccttgcaggtgcagccctttgcctccctcatcagcaaggcacccctctccacccctcgcctgctcatcaacaaggagaaagctggccagtcggaccctttcctggggatgattatgggcctcggaggaggcatggactttgactccaagaaggcctacagggacgtggcctggctgggtgaatgcgaccagggctgcctggcccttgctgagctccttggatggaagaaggagctggaggaccttgtccggagggagcacgccagcatagatgcccagtcgggggcgggggtccccaaccccagcacttcagcttcccccaagaagtccccgccacctgccaaggacgaggccaggacaacagagagggagaaaccccagtgacagctgcatctcccaggcgggatgccgagctcctcagggacagctgagccccaaccgggcctggccccctcttaaccagcagttcttgtctggggagctcagaacatcccccaatctcttacagctccctccccaaaactggggtcccagcaaccctggcccccaaccccagcaaatctctaacacctcctagaggccaaggcttaaacaggcatctctaccagccccactgtctctaaccactcctgggctaaggagtaacctccctcatctctaactgcccccacggggccagggctaccccagaacttttaactcttccaggacagggagcttcgggcccccactctgtctcctgcccccgggggcctgtggctaagtaaaccatacctaacctaccccagtgtgggtgtgggcctctgaatataacccacacccagcgtagggggagtctgagccgggagggctcccgagtctctgccttcagctcccaaagtgggtggtgggcccccttcacgtgggacccacttcccatgctggatgggcagaagaccacttgccttatcgggagaacaacaatgaacacaacccaacacccactacacaaatcacaacgacgcgacacaagacacggggcgggcggcgtacacacacgaacacaccaagaaaggggcccccaaaggctagacgggtcacccagggtcacacggaaccaagcggtggccccccaaccgcagagccggtaccacgg

SEQ ID NO: 311872 - DNA, 2494 bp, Homo sapiens
gcgctctggcacgtgttgtacgaaagcgcgtctgcggccgcaatgtctgctgagagttgtagttctgtgccctatcacggccactcccatttctggtgccgtcacgggacagagcagtcggtgacaggacagagcagtcggtgacgggacacagtggttggtgacgggacagagcggtcggtgacagcctcaagggcttcagcaccgcgcccatggcagagccagaccgactcagattcagactctgagggaggagccgctggtggagaagcagacatggacttcctgcggaacttattctcccagacgctcagcctgggcagccagaaggagcgtctgctggacgagctgaccttggaaggggtggcccggtacatgcagagcgaacgctgtcgcagagtcatctgtttggtgggagctggaatctccacatccgcaggcatccccgactttcgctctccatccaccggcctctatgacaacctagagaagtaccatcttccctacccagaggccatctttgagatcagctatttcaagaaacatccggaacccttcttcgccctcgccaaggaactctatcctgggcagttcaagccaaccatctgtcactacttcatgcgcctgctgaaggacaaggggctactcctgcgctgctacacgcagaacatagataccctggagcgaatagccgggctggaacaggaggacttggtggaggcgcacggcaccttctacacatcacactgcgtcagcgccagctgccggcacgaatacccgctaagctggatgaaagagaagatcttctctgaggtgacgcccaagtgtgaagactgtcagagcctggtgaagcctgatatcgtcttttttggtgagagcctcccagcgcgtttcttctcctgtatgcagtcagacttcctgaaggtggacctcctcctggtcatgggtacctccttgcaggtgcagccctttgcctccctcatcagcaaggcacccctctccacccctcgcctgctcatcaacaaggagaaagctggccagtcggaccctttcctggggatgattatgggcctcggaggaggcatggactttgactccaagaaggcctacagggacgtggcctggctgggtgaatgcgaccagggctgcctggcccttgctgagctccttggatggaagaaggagctggaggaccttgtccggagggagcacgccagcatagatgcccagtcgggggcgggggtccccaaccccagcacttcagcttcccccaagaagtccccgccacctgccaaggacgaggccaggacaacagagagggagaaaccccagtgacagctgcatctcccaggcgggatgccgagctcctcagggacagctgagccccaaccgggcctggccccctcttaaccagcagttcttgtctggggagctcagaacatcccccaatctcttacagctccctccccaaaactggggtcccagcaaccctggcccccaaccccagcaaatctctaacacctcctagaggccaaggcttaaacaggcatctctaccagccccactgtctctaaccactcctgggctaaggagtaacctccctcatctctaactgcccccacggggccagggctaccccagaacttttaactcttccaggacagggagcttcgggcccccactctgtctcctgcccccgggggcctgtggctaagtaaaccatacctaacctaccccagtgtggggggagtctgagccgggagggctcccgagtctctgccttcagctcccaaagtgggtggtgggcccccttcacgtgggacccacttcccatgctggatgggcagaagacattgcttattggagacaaattaaaaacaaaaacaactaacaaaaaaaaaaaaaaaaaaaaaaaaaaaaaaaaaaaaaaaaaaaaaaaaaaaaaaaaaaaaaaaaaaaagaagggggggcggcgcccgatataatacttctccccggagggggcccgacgagtaagtagcactccacgacgatatttgttacaaaaggaggggcccccaaatgagagagggcgtttatataataacagagaggagcgagggcggcgcgatataaacaacggcggtagtagaggaacaacacagcgtccgcaggggaggaatatctgtgtgaggggaaggaaaacacaccccaatcagtggcgggtgggggggggggaaacagaatattgtgggtgggaacaaaaaacaacacgctatacgaaggagagatatatattatataacgccgctccgcggggggagaaaatatatatataaatagaaatctttgagagaggaattaattaggtgggtgtgtgtaaaaacaagcaagggcgcaacaattaagtatatgagtggcgggcgtaagtgaaaaaaaaaaagtaatggtgtgacctactgtgagagtaatggtaatttatttgagtaagaacaatatatatattctctaagca

SEQ ID NO: 311873 - DNA, 1894 bp, Homo sapiens
gcgctctggcacgtgttgtacgaaagcgcgtctgcggccgcaatgtctgctgagagttgtagttctgtgccctatcacggccactcccatttctggtgccgtcacgggacagagcagtcggtgacaggacagagcagtcggtgacgggacacagtggttggtgacgggacagagcggtcggtgacagcctcaagggcttcagcaccgcgcccatggcagagccagaccgactcagattcagactctgagggaggagccgctggtggagaagcagacatggacttcctgcggaacttattctcccagacgctcagcctgggcagccagaaggagcgtctgctggacgagctgaccttggaaggggtggcccggtacatgcagagcgaacgctgtcgcagagtcatctgtttggtgggagctggaatctccacatccgcaggcatccccgactttcgctctccatccaccggcctctatgacaacctagagaagtaccatcttccctacccagaggccatctttgagatcagctatttcaagaaacatccggaacccttcttcgccctcgccaaggaactctatcctgggcagttcaagccaaccatctgtcactacttcatgcgcctgctgaaggacaaggggctactcctgcgctgctacacgcagaacatagataccctggagcgaatagccgggctggaacaggaggacttggtggaggcgcacggcaccttctacacatcacactgcgtcagcgccagctgccggcacgaatacccgctaagctggatgaaagagaagatcttctctgaggtgacgcccaagtgtgaagactgtcagagcctggtgaagcctgatatcgtcttttttggtgagagcctcccagcgcgtttcttctcctgtatgcagtcagacttcctgaaggtggacctcctcctggtcatgggtacctccttgcaggtgcagccctttgcctccctcatcagcaaggcacccctctccacccctcgcctgctcatcaacaaggagaaagctggccagtcggaccctttcctggggatgattatgggcctcggaggaggcatggactttgactccaagaaggcctacagggacgtggcctggctgggtgaatgcgaccagggctgcctggcccttgctgagctccttggatggaagaaggagctggaggaccttgtccggagggagcacgccagcatagatgcccagtcgggggcgggggtccccaaccccagcacttcagcttcccccaagaagtccccgccacctgccaaggacgaggccaggacaacagagagggagaaaccccagtgacagctgcatctcccaggcgggatgccgagctcctcagggacagctgagccccaaccgggcctggccccctcttaaccagcagttcttgtctggggagctcagaacatcccccaatctcttacagctccctccccaaaactggggtcccagcaaccctggcccccaaccccagcaaatctctaacacctcctagaggccaaggcttaaacaggcatctctaccagccccactgtctctaaccactcctgggctaaggagtaacctccctcatctctaactgcccccacggggccagggctaccccagaacttttaactcttccaggacagggagcttcgggcccccactctgtctcctgcccccgggggcctgtggctaagtaaaccatacctaacctaccccagtgtggggggagtctgagccgggagggctcccgagtctctgccttcagctcccaaagtgggtggtgggcccccttcacgtgggacccacttcccatgctggatgggcagaagacattgcttattggagacaaattaaaaacaaaaacaactaacaa

SEQ ID NO: 311874 - DNA, 2381 bp, Homo sapiens
ggtgatctaaggatcgcccctcgatagccgacagcctgactagcccagaaaccacagcttagcgatctgtatcgctaggctggtgggtttctgggtcgcagtgtgttcagggttcgtttaccacatccacttgccaagttgccaatgatcgcgtgtttctcgcaccttggttgctaaggtccctcgctgcaaagaacataagttgccccggtcccgcttgctatgggtacctgattgttagaggcaaccagaggatgctgagggacccctgctgacccctcctatggcttccccttgttccgcgcctctcctaaacctaccgcctccactgcaccactgcacctccctcctaaacctgcctcccagccaaagcgtctcttcccttctcttttcctttctaaacttccctctgccttgtaaatctaaccctccccgcacacacactcacacactgtcgtgtccttcctaactcctcctgagtgttccttcatgccctgaatcccctaggtaggaggaggaggatcgcttgagcccaggaatttgaggctgcagtgagctatgatcgcactattgcactccaacctgggtgacatgagcgagaccctttctctaaaaagtaaaaaagaaagaaacctctcaccctctggagacccaggcagggaaggtgcaggaggctcaggactcagattcagactctgagggaggagccgctggtggagaagcagacatggacttcctgcggaacttattctcccagacgctcagcctgggcagccagaaggagcgtctgctggacgagctgaccttggaaggggtggcccggtacatgcagagcgaacgctgtcgcagagtcatctgtttggtgggagctggaatctccacatccgcaggcatccccgactttcgctctccatccaccggcctctatgacaacctagagaagtaccatcttccctacccagaggccatctttgagatcagctatttcaagaaacatccggaacccttcttcgccctcgccaaggaactctatcctgggcagttcaagccaaccatctgtcactacttcatgcgcctgctgaaggacaaggggctactcctgcgctgctacacgcagaacatagataccctggagcgaatagccgggctggaacaggaggacttggtggaggcgcacggcaccttctacacatcacactgcgtcagcgccagctgccggcacgaatacccgctaagctggatgaaagagaagatcttctctgaggtgacgcccaagtgtgaagactgtcagagcctggtgaagcctgatatcgtcttttttggtgagagcctcccagcgcgtttcttctcctgtatgcagtcagacttcctgaaggtggacctcctcctggtcatgggtacctccttgcaggtgcagccctttgcctccctcatcagcaaggcacccctctccacccctcgcctgctcatcaacaaggagaaagctggccagtcggaccctttcctggggatgattatgggcctcggaggaggcatggactttgactccaagaaggcctacagggacgtggcctggctgggtgaatgcgaccagggctgcctggcccttgctgagctccttggatggaagaaggagctggaggaccttgtccggagggagcacgccagcatagatgcccagtcgggggcgggggtccccaaccccagcacttcagcttcccccaagaagtccccgccacctgccaaggacgaggccaggacaacagagagggagaaaccccagtgacagctgcatctcccaggcgggatgccgagctcctcagggacagctgagccccaaccgggcctggccccctcttaaccagcagttcttgtctggggagctcagaacatcccccaatctcttacagctccctccccaaaactggggtcccagcaaccctggcccccaaccccagcaaatctctaacacctcctagaggccaaggcttaaacaggcatctctaccagccccactgtctctaaccactcctgggctaaggagtaacctccctcatctctaactgcccccacggggccagggctaccccagaacttttaactcttccaggacagggagcttcgggcccccactctgtctcctgcccccgggggcctgtggctaagtaaaccatacctaacctaccccagtgtgggtgtgggcctctgaatataacccacacccagcgtagggggagtctgagccgggagggctcccgagtctctgccttcagctcccaaagtgggtggtgggcccccttcacgtgggacccacttcccatgctggatgggcagaagacattgcttattggagacaaattaaaaacaaaaacaactaacaa

SEQ ID NO: 311875 - DNA, 2055 bp, Homo sapiens
gcgctctggcacgtgttgtacgaaagcgcgtctgcggccgcaatgtctgctgagagttgtagttctgtgccctatcacggccactcccatttctggtgccgtcacgggacagagcagtcggtgacaggacagagcagtcggtgacgggacacagtggttggtgacgggacagagcggtcggtgacagcctcaagggcttcagcaccgcgcccatggcagagccagaccgtaggaggaggaggatcgcttgagcccaggaatttgaggctgcagtgagctatgatcgcactattgcactccaacctgggtgacatgagcgagaccctttctctaaaaagtaaaaaagaaagaaagactcagattcagactctgagggaggagccgctggtggagaagcagacatggacttcctgcggaacttattctcccagacgctcagcctgggcagccagaaggagcgtctgctggacgagctgaccttggaaggggtggcccggtacatgcagagcgaacgctgtcgcagagtcatctgtttggtgggagctggaatctccacatccgcaggcatccccgactttcgctctccatccaccggcctctatgacaacctagagaagtaccatcttccctacccagaggccatctttgagatcagctatttcaagaaacatccggaacccttcttcgccctcgccaaggaactctatcctgggcagttcaagccaaccatctgtcactacttcatgcgcctgctgaaggacaaggggctactcctgcgctgctacacgcagaacatagataccctggagcgaatagccgggctggaacaggaggacttggtggaggcgcacggcaccttctacacatcacactgcgtcagcgccagctgccggcacgaatacccgctaagctggatgaaagagaagatcttctctgaggtgacgcccaagtgtgaagactgtcagagcctggtgaagcctgatatcgtcttttttggtgagagcctcccagcgcgtttcttctcctgtatgcagtcagacttcctgaaggtggacctcctcctggtcatgggtacctccttgcaggtgcagccctttgcctccctcatcagcaaggcacccctctccacccctcgcctgctcatcaacaaggagaaagctggccagtcggaccctttcctggggatgattatgggcctcggaggaggcatggactttgactccaagaaggcctacagggacgtggcctggctgggtgaatgcgaccagggctgcctggcccttgctgagctccttggatggaagaaggagctggaggaccttgtccggagggagcacgccagcatagatgcccagtcgggggcgggggtccccaaccccagcacttcagcttcccccaagaagtccccgccacctgccaaggacgaggccaggacaacagagagggagaaaccccagtgacagctgcatctcccaggcgggatgccgagctcctcagggacagctgagccccaaccgggcctggccccctcttaaccagcagttcttgtctggggagctcagaacatcccccaatctcttacagctccctccccaaaactggggtcccagcaaccctggcccccaaccccagcaaatctctaacacctcctagaggccaaggcttaaacaggcatctctaccagccccactgtctctaaccactcctgggctaaggagtaacctccctcatctctaactgcccccacggggccagggctaccccagaacttttaactcttccaggacagggagcttcgggcccccactctgtctcctgcccccgggggcctgtggctaagtaaaccatacctaacctaccccagtgtgggtgtgggcctctgaatataacccacacccagcgtagggggagtctgagccgggagggctcccgagtctctgccttcagctcccaaagtgggtggtgggcccccttcacgtgggacccacttcccatgctggatgggcagaagacattgcttattggagacaaattaaaaacaaaaacaactaacaa

SEQ ID NO: 311876 - DNA, 1934 bp, Homo sapiens
agcaaagccactcacatgaggtcttgctcctggggacgggcatggccaggactccaaccccggcagcctgtcccagagccctggagctagccccagtgcagtctctccaccaccccgcacttcctcaggccaccttcctgccacagccttttccccaaacctggtatcaccccctctcctccctccctaatcccacctctcgggcctggccactccaccccaccccttccaggactcagattcagactctgagggaggagccgctggtggagaagcagacatggacttcctgcggaacttattctcccagacgctcagcctgggcagccagaaggagcgtctgctggacgagctgaccttggaaggggtggcccggtacatgcagagcgaacgctgtcgcagagtcatctgtttggtgggagctggaatctccacatccgcaggcatccccgactttcgctctccatccaccggcctctatgacaacctagagaagtaccatcttccctacccagaggccatctttgagatcagctatttcaagaaacatccggaacccttcttcgccctcgccaaggaactctatcctgggcagttcaagccaaccatctgtcactacttcatgcgcctgctgaaggacaaggggctactcctgcgctgctacacgcagaacatagataccctggagcgaatagccgggctggaacaggaggacttggtggaggcgcacggcaccttctacacatcacactgcgtcagcgccagctgccggcacgaatacccgctaagctggatgaaagagaagatcttctctgaggtgacgcccaagtgtgaagactgtcagagcctggtgaagcctgatatcgtcttttttggtgagagcctcccagcgcgtttcttctcctgtatgcagtcagacttcctgaaggtggacctcctcctggtcatgggtacctccttgcaggtgcagccctttgcctccctcatcagcaaggcacccctctccacccctcgcctgctcatcaacaaggagaaagctggccagtcggaccctttcctggggatgattatgggcctcggaggaggcatggactttgactccaagaaggcctacagggacgtggcctggctgggtgaatgcgaccagggctgcctggcccttgctgagctccttggatggaagaaggagctggaggaccttgtccggagggagcacgccagcatagatgcccagtcgggggcgggggtccccaaccccagcacttcagcttcccccaagaagtccccgccacctgccaaggacgaggccaggacaacagagagggagaaaccccagtgacagctgcatctcccaggcgggatgccgagctcctcagggacagctgagccccaaccgggcctggccccctcttaaccagcagttcttgtctggggagctcagaacatcccccaatctcttacagctccctccccaaaactggggtcccagcaaccctggcccccaaccccagcaaatctctaacacctcctagaggccaaggcttaaacaggcatctctaccagccccactgtctctaaccactcctgggctaaggagtaacctccctcatctctaactgcccccacggggccagggctaccccagaacttttaactcttccaggacagggagcttcgggcccccactctgtctcctgcccccgggggcctgtggctaagtaaaccatacctaacctaccccagtgtgggtgtgggcctctgaatataacccacacccagcgtagggggagtctgagccgggagggctcccgagtctctgccttcagctcccaaagtgggtggtgggcccccttcacgtgggacccacttcccatgctggatgggcagaagacattgcttattggagacaaattaaaaacaaaaacaactaacaa

SEQ ID NO: 311877 - DNA, 2034 bp, Homo sapiens
gcgctctggcacgtgttgtacgaaagcgcgtctgcggccgcaatgtctgctgagagttgtagttctgtgccctatcacggccactcccatttctggtgccgtcacgggacagagcagtcggtgacaggacagagcagtcggtgacgggacacagtggttggtgacgggacagagcggtcggtgacagcctcaagggcttcagcaccgcgcccatggcagagccagaccgccaccttcctgccacagccttttccccaaacctggtatcaccccctctcctccctccctaatcccacctctcgggcctggccactccaccccaccccttccaggactcagattcagactctgagggaggagccgctggtggagaagcagacatggacttcctgcggaacttattctcccagacgctcagcctgggcagccagaaggagcgtctgctggacgagctgaccttggaaggggtggcccggtacatgcagagcgaacgctgtcgcagagtcatctgtttggtgggagctggaatctccacatccgcaggcatccccgactttcgctctccatccaccggcctctatgacaacctagagaagtaccatcttccctacccagaggccatctttgagatcagctatttcaagaaacatccggaacccttcttcgccctcgccaaggaactctatcctgggcagttcaagccaaccatctgtcactacttcatgcgcctgctgaaggacaaggggctactcctgcgctgctacacgcagaacatagataccctggagcgaatagccgggctggaacaggaggacttggtggaggcgcacggcaccttctacacatcacactgcgtcagcgccagctgccggcacgaatacccgctaagctggatgaaagagaagatcttctctgaggtgacgcccaagtgtgaagactgtcagagcctggtgaagcctgatatcgtcttttttggtgagagcctcccagcgcgtttcttctcctgtatgcagtcagacttcctgaaggtggacctcctcctggtcatgggtacctccttgcaggtgcagccctttgcctccctcatcagcaaggcacccctctccacccctcgcctgctcatcaacaaggagaaagctggccagtcggaccctttcctggggatgattatgggcctcggaggaggcatggactttgactccaagaaggcctacagggacgtggcctggctgggtgaatgcgaccagggctgcctggcccttgctgagctccttggatggaagaaggagctggaggaccttgtccggagggagcacgccagcatagatgcccagtcgggggcgggggtccccaaccccagcacttcagcttcccccaagaagtccccgccacctgccaaggacgaggccaggacaacagagagggagaaaccccagtgacagctgcatctcccaggcgggatgccgagctcctcagggacagctgagccccaaccgggcctggccccctcttaaccagcagttcttgtctggggagctcagaacatcccccaatctcttacagctccctccccaaaactggggtcccagcaaccctggcccccaaccccagcaaatctctaacacctcctagaggccaaggcttaaacaggcatctctaccagccccactgtctctaaccactcctgggctaaggagtaacctccctcatctctaactgcccccacggggccagggctaccccagaacttttaactcttccaggacagggagcttcgggcccccactctgtctcctgcccccgggggcctgtggctaagtaaaccatacctaacctaccccagtgtgggtgtgggcctctgaatataacccacacccagcgtagggggagtctgagccgggagggctcccgagtctctgccttcagctcccaaagtgggtggtgggcccccttcacgtgggacccacttcccatgctggatgggcagaagacattgcttattggagacaaattaaaaacaaaaacaactaacaa

SEQ ID NO: 311878 - DNA, 1910 bp, Homo sapiens
gcgctctggcacgtgttgtacgaaagcgcgtctgcggccgcaatgtctgctgagagttgtagttctgtgccctatcacggccactcccatttctggtgccgtcacgggacagagcagtcggtgacaggacagagcagtcggtgacgggacacagtggttggtgacgggacagagcggtcggtgacagcctcaagggcttcagcaccgcgcccatggcagagccagaccgactcagattcagactctgagggaggagccgctggtggagaagcagacatggacttcctgcggaacttattctcccagacgctcagcctgggcagccagaaggagcgtctgctggacgagctgaccttggaaggggtggcccggtcgcagagtcatctgtttggtgggagctggaatctccacatccgcaggcatccccgactttcgctctccatccaccggcctctatgacaacctagagaagtaccatcttccctacccagaggccatctttgagatcagctatttcaagaaacatccggaacccttcttcgccctcgccaaggaactctatcctgggcagttcaagccaaccatctgtcactacttcatgcgcctgctgaaggacaaggggctactcctgcgctgctacacgcagaacatagataccctggagcgaatagccgggctggaacaggaggacttggtggaggcgcacggcaccttctacacatcacactgcgtcagcgccagctgccggcacgaatacccgctaagctggatgaaagagaagatcttctctgaggtgacgcccaagtgtgaagactgtcagagcctggtgaagcctgatatcgtcttttttggtgagagcctcccagcgcgtttcttctcctgtatgcagtcagacttcctgaaggtggacctcctcctggtcatgggtacctccttgcaggtgcagccctttgcctccctcatcagcaaggcacccctctccacccctcgcctgctcatcaacaaggagaaagctggccagtcggaccctttcctggggatgattatgggcctcggaggaggcatggactttgactccaagaaggcctacagggacgtggcctggctgggtgaatgcgaccagggctgcctggcccttgctgagctccttggatggaagaaggagctggaggaccttgtccggagggagcacgccagcatagatgcccagtcgggggcgggggtccccaaccccagcacttcagcttcccccaagaagtccccgccacctgccaaggacgaggccaggacaacagagagggagaaaccccagtgacagctgcatctcccaggcgggatgccgagctcctcagggacagctgagccccaaccgggcctggccccctcttaaccagcagttcttgtctggggagctcagaacatcccccaatctcttacagctccctccccaaaactggggtcccagcaaccctggcccccaaccccagcaaatctctaacacctcctagaggccaaggcttaaacaggcatctctaccagccccactgtctctaaccactcctgggctaaggagtaacctccctcatctctaactgcccccacggggccagggctaccccagaacttttaactcttccaggacagggagcttcgggcccccactctgtctcctgcccccgggggcctgtggctaagtaaaccatacctaacctaccccagtgtgggtgtgggcctctgaatataacccacacccagcgtagggggagtctgagccgggagggctcccgagtctctgccttcagctcccaaagtgggtggtgggcccccttcacgtgggacccacttcccatgctggatgggcagaagacattgcttattggagacaaattaaaaacaaaaacaactaacaa

SEQ ID NO: 311879 - DNA, 1443 bp, Homo sapiens
gcgctctggcacgtgttgtacgaaagcgcgtctgcggccgcaatgtctgctgagagttgtagttctgtgccctatcacggccactcccatttctggtgccgtcacgggacagagcagtcggtgacaggacagagcagtcggtgacgggacacagtggttggtgacgggacagagcggtcggtgacagcctcaagggcttcagcaccgcgcccatggcagagccagaccgactcagattcagactctgagggaggagccgctggtggagaagcagacatggacttcctgcggaacttattctcccagacgctcagcctgggcagccagaaggagcgtctgctggacgagctgaccttggaaggggtggcccggtacatgcagagcgaacgctgtcgcagagtcatctgtttggtgggagctggaatctccacatccgcaggcatccccgactttcgctctccatccaccggcctctatgacaacctagagaagtaccatcttccctacccagaggccatctttgagatcagctatttcaagaaacatccggaacccttcttcgccctcgccaaggaactctatcctgggcagttcaagccaaccatctgtcactacttcatgcgcctgctgaaggacaaggggctactcctgcgctgctacacgcagaacatagataccctggagcgaatagccgggctggaacaggaggacttggtggaggcgcacggcaccttctacacatcacactgcgtcagcgccagctgccggcacgaatacccgctaagctggatgaaagagaagatcttctctgaggtgacgcccaagtgtgaagactgtcagagcctggtgaagcctgatatcgtcttttttggtgagagcctcccagcgcgtttcttctcctgtatgcagtcagacttcctgaaggtggacctcctcctggtcatgggtacctccttgcaggtgcagccctttgcctccctcatcagcaaggcacccctctccacccctcgcctgctcatcaacaaggagaaagctggccagtcggaccctttcctggggatgattatgggcctcggaggaggcatggactttgactccaagaaggcctacagggacgtggcctggctgggtgaatgcgaccagggctgccccagaacttttaactcttccaggacagggagcttcgggcccccactctgtctcctgcccccgggggcctgtggctaagtaaaccatacctaacctaccccagtgtgggtgtgggcctctgaatataacccacacccagcgtagggggagtctgagccgggagggctcccgagtctctgccttcagctcccaaagtgggtggtgggcccccttcacgtgggacccacttcccatgctggatgggcagaagacattgcttattggagacaaattaaaaacaaaaacaactaacaa

SEQ ID NO: 311880 - DNA, 1089 bp, Homo sapiens
ctggggaagcatgaatatacgtgggagcgggtagaagccgcgcagcgcgtttctcctccggtatgcagtcagacttcctgaaggtggacctcctcctggtcatgggtacctccttgcaggtgcagccctttgcctccctcatcagcaaggcacccctctccacccctcgcctgctcatcaacaaggagaaagctggccagtcggaccctttcctggggatgattatgggcctcggaggaggcatggactttgactccaagaaggcctacagggacgtggcctggctgggtgaatgcgaccagggctgcctggcccttgctgagctccttggatggaagaaggagctggaggaccttgtccggagggagcacgccagcatagatgcccagtcgggggcgggggtccccaaccccagcacttcagcttcccccaagaagtccccgccacctgccaaggacgaggccaggacaacagagagggagaaaccccagtgacagctgcatctcccaggcgggatgccgagctcctcagggacagctgagccccaaccgggcctggccccctcttaaccagcagttcttgtctggggagctcagaacatcccccaatctcttacagctccctccccaaaactggggtcccagcaaccctggcccccaaccccagcaaatctctaacacctcctagaggccaaggcttaaacaggcatctctaccagccccactgtctctaaccactcctgggctaaggagtaacctccctcatctctaactgcccccacggggccagggctaccccagaacttttaactcttccaggacagggagcttcgggcccccactctgtctcctgcccccgggggcctgtggctaagtaaaccatacctaacctaccccagtgtgggtgtgggcctctgaatataacccacacccagcgtagggggagtctgagccgggagggctcccgagtctctgccttcagctcccaaagtgggtggtgggcccccttcacgtgggacccacttcccatgctggatgggcagaagacattgcttattggagacaaattaaaaacaaaaacaactaacaa

SEQ ID NO: 311881 - DNA, 1944 bp, Homo sapiens
gcgctctggcacgtgttgtacgaaagcgcgtctgcggccgcaatgtctgctgagagttgtagttctgtgccctatcacggccactcccatttctggtgccgtcacgggacagagcagtcggtgacaggacagagcagtcggtgacgggacacagtggttggtgacgggacagagcggtcggtgacagcctcaagggcttcagcaccgcgcccatggcagagccagaccgactcagattcagactctgagggaggagccgctggtggagaagcagacatggacttcctgcggaacttattctcccagacgctcagcctgggcagccagaaggagcgtctgctggacgagctgaccttggaaggggtggcccggtacatgcagagcgaacgctgtcgcagagtcatctgtttggtgggagctggaatctccacatccgcaggcatccccgactttcgctctccatccaccggcctctatgacaacctagagaagtaccatcttccctacccagaggccatctttgagatcagctatttcaagaaacatccggaacccttcttcgccctcgccaaggaactctatcctgggcagttcaagccaaccatctgtcactacttcatgcgcctgctgaaggacaaggggctactcctgcgctgctacacgcagaacatagataccctggagcgaatagccgggctggaacaggaggacttggtggaggcgcacggcaccttctacacatcacactgcgtcagcgccagctgccggcacgaatacccgctaagctggatgaaagagaagatcttctctgaggtgacgcccaagtgtgaagactgtcagagcctggtgaagcctgatatcgtcttttttggtgagagcctcccagcgcgtttcttctcctgtatgcagtcagacttcctgaaggtggacctcctcctggtcatgggtacctccttgcaggtgcagccctttgcctccctcatcagcaaggcacccctctccacccctcgcctgctcatcaacaaggagaaagctggccaggtaagagcccttcttcaagcccccgtcgtcacaggctcccccttccctctcacccttttcctcagagggaacccccactgtggctaagtaaaccatacctaacctaccccagtgtgggtgtgggcctctgaatataacccacacccagcgtagggggagtctgagccgggagggctcccgagtctctgccttcagctcccaaagtgggtggtgggcccccttcacgtgggacccacttcccatgctggatgggcagaagacattgcttattggagacaaattaaaaacaaaaacaactaacaaaaaaaaaaaaaaaaaaaaaaaaaaaaaaaaaaaaaaaaaaaaaaaaaaaaaaaaaaaaaaaaaaaagaagggggggcggcgcccgatataatacttctccccggagggggcccgacgagtaagtagcactccacgacgatatttgttacaaaaggaggggcccccaaatgagagagggcgtttatataataacagagaggagcgagggcggcgcgatataaacaacggcggtagtagaggaacaacacagcgtccgcaggggaggaatatctgtgtgaggggaaggaaaacacaccccaatcagtggcgggtgggggggggggaaacagaatattgtgggtgggaacaaaaaacaacacgctatacgaaggagagatatatattatataacgccgctccgcggggggagaaaatatatatataaatagaaatctttgagagaggaattaattaggtgggtgtgtgtaaaaacaagcaagggcgcaacaattaagtatatgagtggcgggcgtaagtgaaaaaaaaaaagtaatggtgtgacctactgtgagagtaatggtaatttatttgagtaagaacaatatatatattctctaagca

SEQ ID NO: 311882 - DNA, 440 bp, Homo sapiens
tcgcccgccgagctgtgtcttcagagattcacacctacccgccaaggcttaaacaggcatctctaccagccccactgtctctaaccactcctgggctaaggagtaacctccctcatctctaactgcccccacggggccagggctaccccagaacttttaactcttccaggacagggagcttcgggcccccactctgtctcctgcccccgggggcctgtggctaagtaaaccatacctaacctaccccagtgtgggtgtgggcctctgaatataacccacacccagcgtagggggagtctgagccgggagggctcccgagtctctgccttcagctcccaaagtgggtggtgggcccccttcacgtgggacccacttcccatgctggatgggcagaagacattgcttattggagacaaattaaaaacaaaaacaactaacaa

SEQ ID NO: 311883 - DNA, 1104 bp, Homo sapiens
gcgctctggcacgtgttgtacgaaagcgcgtctgcggccgcaatgtctgctgagagttgtagttctgtgccctatcacggccactcccatttctggtgccgtcacgggacagagcagtcggtgacaggacagagcagtcggtgacgggacacagtggttggtgacgggacagagcggtcggtgacagcctcaagggcttcagcaccgcgcccatggcagagccagacctgagtcggggatccgggtaggagggtcgggccgcgccggggcctggctgaatgctgcaggccccggggcccaagggtggccgcggtggggcgggaagtagggagcgcttcggggagtgggattctgagggctgttgcttagcgatctgtatcgctaggctggtgggtttctgggtcgcagtgtgttcagggttcgtttaccacatccacttgccaagttgccaatgatcgcgtgtttctcgcaccttggttgctaaggtccctcgctgcaaagaacataagttgccccggtcccgcttgctatgggtacctgattgttagaggcaaccagaggatgctgagggacccctgctgacccctcctatggcttccccttgttccgcgcctctcctaaacctaccgcctccactgcaccactgcacctccctcctaaacctgcctcccagccaaagcgtctcttcccttctcttttcctttctaaacttccctctgccttgtaaatctaaccctccccgcacacacactcacacactgtcgtgtccttcctaactcctcctgagtgttccttcatgccctgaatcccctaggtaggaggaggaggatcgcttgagcccaggaatttgaggctgcagtgagctatgatcgcactattgcactccaacctgggtgacatgagcgagaccctttctctaaaaagtaaaaaagaaagaaagtaagtcagggccagaaacaatggctcatgcttgtaatcccagtactttgggaggccaaggtggttggatcgcttgagcccaggagttcaagaccagcctgggcaaaagcccctactttctccctgtccccctaaatcttcctctccagcctctctgcccctcac

SEQ ID NO: 311884 - DNA, 1977 bp, Homo sapiens
gcgctctggcacgtgttgtacgaaagcgcgtctgcggccgcaatgtctgctgagagttgtagttctgtgccctatcacggccactcccatttctggtgccgtcacgggacagagcagtcggtgacaggacagagcagtcggtgacgggacacagtggttggtgacgggacagagcggtcggtgacagcctcaagggcttcagcaccgcgcccatggcagagccagacccctctcaccctctggagacccaggcagggaaggtgcaggaggctcaggactcagattcagactctgagggaggagccgctggtggagaagcagacatggacttcctgcggaacttattctcccagacgctcagcctgggcagccagaaggagcgtctgctggacgagctgaccttggaaggggtggcccggtacatgcagagcgaacgctgtcgcagagtcatctgtttggtgggagctggaatctccacatccgcaggcatccccgactttcgctctccatccaccggcctctatgacaacctagagaagtaccatcttccctacccagaggccatctttgagatcagctatttcaagaaacatccggaacccttcttcgccctcgccaaggaactctatcctgggcagttcaagccaaccatctgtcactacttcatgcgcctgctgaaggacaaggggctactcctgcgctgctacacgcagaacatagataccctggagcgaatagccgggctggaacaggaggacttggtggaggcgcacggcaccttctacacatcacactgcgtcagcgccagctgccggcacgaatacccgctaagctggatgaaagagaagatcttctctgaggtgacgcccaagtgtgaagactgtcagagcctggtgaagcctgatatcgtcttttttggtgagagcctcccagcgcgtttcttctcctgtatgcagtcagacttcctgaaggtggacctcctcctggtcatgggtacctccttgcaggtgcagccctttgcctccctcatcagcaaggcacccctctccacccctcgcctgctcatcaacaaggagaaagctggccagtcggaccctttcctggggatgattatgggcctcggaggaggcatggactttgactccaagaaggcctacagggacgtggcctggctgggtgaatgcgaccagggctgcctggcccttgctgagctccttggatggaagaaggagctggaggaccttgtccggagggagcacgccagcatagatgcccagtcgggggcgggggtccccaaccccagcacttcagcttcccccaagaagtccccgccacctgccaaggacgaggccaggacaacagagagggagaaaccccagtgacagctgcatctcccaggcgggatgccgagctcctcagggacagctgagccccaaccgggcctggccccctcttaaccagcagttcttgtctggggagctcagaacatcccccaatctcttacagctccctccccaaaactggggtcccagcaaccctggcccccaaccccagcaaatctctaacacctcctagaggccaaggcttaaacaggcatctctaccagccccactgtctctaaccactcctgggctaaggagtaacctccctcatctctaactgcccccacggggccagggctaccccagaacttttaactcttccaggacagggagcttcgggcccccactctgtctcctgcccccgggggcctgtggctaagtaaaccatacctaacctaccccagtgtgggtgtgggcctctgaatataacccacacccagcgtagggggagtctgagccgggagggctcccgagtctctgccttcagctcccaaagtgggtggtgggcccccttcacgtgggacccacttcccatgctggatgggcagaagacattgcttattggagacaaattaaaaacaaaaacaactaacaa

SEQ ID NO: 311885 - DNA, 2251 bp, Homo sapiens
gcgctctggcacgtgttgtacgaaagcgcgtctgcggccgcaatgtctgctgagagttgtagttctgtgccctatcacggccactcccatttctggtgccgtcacgggacagagcagtcggtgacaggacagagcagtcggtgacgggacacagtggttggtgacgggacagagcggtcggtgacagcctcaagggcttcagcaccgcgcccatggcagagccagaccgactcagattcagactctgagggaggagccgctggtggagaagcagacatggacttcctgcggaacttattctcccagacgctcagcctgggcagccagaaggagcgtctgctggacgagctgaccttggaaggggtggcccggtacatgcagagcgaacgctgtcgcagagtcatctgtttggtgggagctggaatctccacatccgcaggcatccccgactttcgctctccatccaccggcctctatgacaacctagagaagtaccatcttccctacccagaggccatctttgagatcagctatttcaagaaacatccggaacccttcttcgccctcgccaaggaactctatcctgggcagttcaagccaaccatctgtcactacttcatgcgcctgctgaaggacaaggggctactcctgcgctgctacacgcagaacatagataccctggagcgaatagccgggctggaacaggaggacttggtggaggcgcacggcaccttctacacatcacactgcgtcagcgccagctgccggcacgaatacccgctaagctggatgaaagagaagatcttctctgaggtgacgcccaagtgtgaagactgtcagagcctggtgaagcctgatatcgtcttttttggtgagagcctcccagcgcgtttcttctcctgtatgcagtcagacttcctgaaggtggacctcctcctggtcatgggtacctccttgcaggtgcagccctttgcctccctcatcagcaaggcacccctctccacccctcgcctgctcatcaacaaggagaaagctggccagtcggaccctttcctggggatgattatgggcctcggaggaggcatggactttgactccaagaaggcctacagggacgtggcctggctgggtgaatgcgaccagggctgcctggcccttgctgagctccttggatggaagaaggagctggaggaccttgtccggagggagcacgccagcatagatgcccagtcgggggcgggggtccccaaccccagcacttcagcttcccccaagaagtccccgccacctgccaaggacgaggccaggacaacagagagggagaaaccccagtgacagctgcatctcccaggcgggatgccgagctcctcagggacagctgagccccaaccgggcctggccccctcttaaccagcagttcttgtctggggagctcagaacatcccccaatctcttacagctccctccccaaaactggggtcccagcaaccctggcccccaaccccagcaaatctctaacacctcctagaggccaaggcttaaacaggcatctctaccagccccactgtctctaaccactcctgggctaaggagtaacctccctcatctctaactgcccccacggggccagggctaccccagaacttttaactcttccaggacagggagcttcgggcccccactctgtctcctgcccccgggggcctgtggctaagtaaaccatacctaacctaccccagtgtgggtgtgggcctctgaatataacccacacccagcgtagggggagtctgagccgggagggctcccgagtctctgccttcagctcccaaagtgggtggtgggcccccttcacgtgggacccacttcccatgctggatgggcagaagacattgcttattggagacaaattaaaaacaaaaacaactaacaaaaaaaaaaaaaaaaaactcgagactagttctctctctcctcgtgccgaattcggcacgaggccctacgtgagctacctcgcccctgagagcgaggagacgcccctgacggccgcgcagctcttcagcgaagccgtggcgcctgccatcgaaaaggacttcaaggacggtaccttcgaccctgacaacctggaaaagtacggcttcgagcccacacaggagggaaagctcttccagctctaccccaggaacttcctgcgctagctgggcgggggaggggcggcctgccctcatctcatttctattaaacgcctttgccagct

SEQ ID NO: 311886 - DNA, 2434 bp, Homo sapiens
  misc_feature (2434)..(2434): n is a, c, g, or t
gcgctctggcacgtgttgtacgaaagcgcgtctgcggccgcaatgtctgctgagagttgtagttctgtgccctatcacggccactcccatttctggtgccgtcacgggacagagcagtcggtgacaggacagagcagtcggtgacgggacacagtggttggtgacgggacagagcggtcggtgacagcctcaagggcttcagcaccgcgcccatggcagagccagaccgactcagattcagactctgagggaggagccgctggtggagaagcagacatggacttcctgcggaacttattctcccagacgctcagcctgggcagccagaaggagcgtctgctggacgagctgaccttggaaggggtggcccggtacatgcagagcgaacgctgtcgcagagtcatctgtttggtgggagctggaatctccacatccgcaggcatccccgactttcgctctccatccaccggcctctatgacaacctagagaagtaccatcttccctacccagaggccatctttgagatcagctatttcaagaaacatccggaacccttcttcgccctcgccaaggaactctatcctgggcagttcaagccaaccatctgtcactacttcatgcgcctgctgaaggacaaggggctactcctgcgctgctacacgcagaacatagataccctggagcgaatagccgggctggaacaggaggacttggtggaggcgcacggcaccttctacacatcacactgcgtcagcgccagctgccggcacgaatacccgctaagctggatgaaagagaagatcttctctgaggtgacgcccaagtgtgaagactgtcagagcctggtgaagcctgatatcgtcttttttggtgagagcctcccagcgcgtttcttctcctgtatgcagtcagacttcctgaaggtggacctcctcctggtcatgggtacctccttgcaggtgcagccctttgcctccctcatcagcaaggcacccctctccacccctcgcctgctcatcaacaaggagaaagctggccagtcggaccctttcctggggatgattatgggcctcggaggaggcatggactttgactccaagaaggcctacagggacgtggcctggctgggtgaatgcgaccagggctgcctggcccttgctgagctccttggatggaagaaggagctggaggaccttgtccggagggagcacgccagcatagatgcccagtcgggggcgggggtccccaaccccagcacttcagcttcccccaagaagtccccgccacctgccaaggacgaggccaggacaacagagagggagaaaccccagtgacagctgcatctcccaggcgggatgccgagctcctcagggacagctgagccccaaccgggcctggccccctcttaaccagcagttcttgtctggggagctcagaacatcccccaatctcttacagctccctccccaaaactggggtcccagcaaccctggcccccaaccccagcaaatctctaacacctcctagaggccaaggcttaaacaggcatctctaccagccccactgtctctaaccactcctgggctaaggagtaacctccctcatctctaactgcccccacggggccagggctaccccagaacttttaactcttccaggacagggagcttcgggcccccactctgtctcctgcccccgggggcctgtggctaagtaaaccatacctaacctaccccagtgtgggtgtgggcctctgaatataacccacacccagcgtagggggagtctgagccgggagggctcccgagtctctgccttcagctcccaaagtgggtggtgggcccccttcacgtgggacccacttcccatgctggatgggcagaagacattgcttattggagacaaattaaaaacaaaaacaactaacaaaaaaaaaaaaaaaaaaaaaaaaaaaaaaaaaaaaaaaaaaaaaaaaaaaaaaaaaaaaaaaaaaaagggggggggaaaaaacccccggggggggccaaaccccccccattttgtgtttcaaagaagggggcccccaaaagggagggcgagttaataaataagcaaagagagaagagggccgcagataaaacaacgctgggagagagggaaaaaaaagctgggacggggagaaacttgctgtgggagaggaacacctttctttggggtgggggggggccaatgatgtgggggcaccaaaattctactcaagaggatagatatatgagaggtgtagagggaaaatatataaaacatattatggaagggtgagttattgtggttggttaacaaacaaagcgtgtatattatactctggcgagttgtgagaaaatattggtggtacgacgggagtatttatatgttgagaaaatttttttttagcgagggcgtgttatgtaaagcggn

SEQ ID NO: 311887 - DNA, 1782 bp, Homo sapiens
gcgctctggcacgtgttgtacgaaagcgcgtctgcggccgcaatgtctgctgagagttgtagttctgtgccctatcacggccactcccatttctggtgccgtcacgggacagagcagtcggtgacaggacagagcagtcggtgacgggacacagtggttggtgacgggacagagcggtcggtgacagcctcaagggcttcagcaccgcgcccatggcagagccagaccgactcagattcagactctgagggaggagccgctggtggagaagcagacatggacttcctgcggaacttattctcccagacgctcagcctgggcagccagaaggagcgtctgctggacgagctgaccttggaaggggtggcccggtacatgcagagcgaacgctgtcgcagagtcatctgtttggtgggagctggaatctccacatccgcaggcatccccgactttcgctctccatccaccggcctctatgacaacctagagaagtaccatcttccctacccagaggccatctttgagatcagctatttcaagaaacatccggaacccttcttcgccctcgccaaggaactctatcctgggcagttcaagccaaccatctgtcactacttcatgcgcctgctgaaggacaaggggctactcctgcgctgctacacgcagaacatagataccctggagcgaatagccgggctggaacaggaggacttggtggaggcgcacggcaccttctacacatcacactgcgtcagcgccagctgccggcacgaatacccgctaagctggatgaaagagaagatcttctctgaggtgacgcccaagtgtgaagactgtcagagcctggtgaagcctgatatcgtcttttttggtgagagcctcccagcgcgtttcttctcctgtatgcagtcagacttcctgaaggtggacctcctcctggtcatgggtacctccttgcaggtgcggacgtggcctggctgggtgaatgcgaccagggctgcctggcccttgctgagctccttggatggaagaaggagctggaggaccttgtccggagggagcacgccagcatagatgcccagtcgggggcgggggtccccaaccccagcacttcagcttcccccaagaagtccccgccacctgccaaggacgaggccaggacaacagagagggagaaaccccagtgacagctgcatctcccaggcgggatgccgagctcctcagggacagctgagccccaaccgggcctggccccctcttaaccagcagttcttgtctggggagctcagaacatcccccaatctcttacagctccctccccaaaactggggtcccagcaaccctggcccccaaccccagcaaatctctaacacctcctagaggccaaggcttaaacaggcatctctaccagccccactgtctctaaccactcctgggctaaggagtaacctccctcatctctaactgcccccacggggccagggctaccccagaacttttaactcttccaggacagggagcttcgggcccccactctgtctcctgcccccgggggcctgtggctaagtaaaccatacctaacctaccccagtgtgggtgtgggcctctgaatataacccacacccagcgtagggggagtctgagccgggagggctcccgagtctctgccttcagctcccaaagtgggtggtgggcccccttcacgtgggacccacttcccatgctggatgggcagaagacattgcttattggagacaaattaaaaacaaaaacaactaacaa

SEQ ID NO: 311888 - DNA, 2688 bp, Homo sapiens
gcgctctggcacgtgttgtacgaaagcgcgtctgcggccgcaatgtctgctgagagttgtagttctgtgccctatcacggccactcccatttctggtgccgtcacgggacagagcagtcggtgacaggacagagcagtcggtgacgggacacagtggttggtgacgggacagagcggtcggtgacagcctcaagggcttcagcaccgcgcccatggcagagccagacctgagtcggggatccgggtaggagggtcgggccgcgccggggcctggctgaatgctgcaggccccggggcccaagggtggccgcggtggggcgggaagtagggagcgcttcggggagtgggattctgagggctgttgcttagcgatctgtatcgctaggctggtgggtttctgggtcgcagtgtgttcagggttcgtttaccacatccacttgccaagttgccaatgatcgcgtgtttctcgcaccttggttgctaaggtccctcgctgcaaagaacataagttgccccggtcccgcttgctatgggtacctgattgttagaggcaaccagaggatgctgagggacccctgctgacccctcctatggcttccccttgttccgcgcctctcctaaacctaccgcctccactgcaccactgcacctccctcctaaacctgcctcccagccaaagcgtctcttcccttctcttttcctttctaaacttccctctgccttgtaaatctaaccctccccgcacacacactcacacactgtcgtgtccttcctaactcctcctgagtgttccttcatgccctgaatcccctaggtaggaggaggaggatcgcttgagcccaggaatttgaggctgcagtgagctatgatcgcactattgcactccaacctgggtgacatgagcgagaccctttctctaaaaagtaaaaaagaaagaaacctctcaccctctggagacccaggcagggaaggtgcaggaggctcaggactcagattcagactctgagggaggagccgctggtggagaagcagacatggacttcctgcggaacttattctcccagacgctcagcctgggcagccagaaggagcgtctgctggacgagctgaccttggaaggggtggcccggtacatgcagagcgaacgctgtcgcagagtcatctgtttggtgggagctggaatctccacatccgcaggcatccccgactttcgctctccatccaccggcctctatgacaacctagagaagtaccatcttccctacccagaggccatctttgagatcagctatttcaagaaacatccggaacccttcttcgccctcgccaaggaactctatcctgggcagttcaagccaaccatctgtcactacttcatgcgcctgctgaaggacaaggggctactcctgcgctgctacacgcagaacatagataccctggagcgaatagccgggctggaacaggaggacttggtggaggcgcacggcaccttctacacatcacactgcgtcagcgccagctgccggcacgaatacccgctaagctggatgaaagagaagatcttctctgaggtgacgcccaagtgtgaagactgtcagagcctggtgaagcctgatatcgtcttttttggtgagagcctcccagcgcgtttcttctcctgtatgcagtcagacttcctgaaggtggacctcctcctggtcatgggtacctccttgcaggtgcagccctttgcctccctcatcagcaaggcacccctctccacccctcgcctgctcatcaacaaggagaaagctggccagtcggaccctttcctggggatgattatgggcctcggaggaggcatggactttgactccaagaaggcctacagggacgtggcctggctgggtgaatgcgaccagggctgcctggcccttgctgagctccttggatggaagaaggagctggaggaccttgtccggagggagcacgccagcatagatgcccagtcgggggcgggggtccccaaccccagcacttcagcttcccccaagaagtccccgccacctgccaaggacgaggccaggacaacagagagggagaaaccccagtgacagctgcatctcccaggcgggatgccgagctcctcagggacagctgagccccaaccgggcctggccccctcttaaccagcagttcttgtctggggagctcagaacatcccccaatctcttacagctccctccccaaaactggggtcccagcaaccctggcccccaaccccagcaaatctctaacacctcctagaggccaaggcttaaacaggcatctctaccagccccactgtctctaaccactcctgggctaaggagtaacctccctcatctctaactgcccccacggggccagggctaccccagaacttttaactcttccaggacagggagcttcgggcccccactctgtctcctgcccccgggggcctgtggctaagtaaaccatacctaacctaccccagtgtgggtgtgggcctctgaatataacccacacccagcgtagggggagtctgagccgggagggctcccgagtctctgccttcagctcccaaagtgggtggtgggcccccttcacgtgggacccacttcccatgctggatgggcagaagacattgcttattggagacaaattaaaaacaaaaacaactaacaa

SEQ ID NO: 311889 - DNA, 2102 bp, Homo sapiens
gcgctctggcacgtgttgtacgaaagcgcgtctgcggccgcaatgtctgctgagagttgtagttctgtgccctatcacggccactcccatttctggtgccgtcacgggacagagcagtcggtgacaggacagagcagtcggtgacgggacacagtggttggtgacgggacagagcggtcggtgacagcctcaagggcttcagcaccgcgcccatggcagagccagaccgtaggaggaggaggatcgcttgagcccaggaatttgaggctgcagtgagctatgatcgcactattgcactccaacctgggtgacatgagcgagaccctttctctaaaaagtaaaaaagaaagaaacctctcaccctctggagacccaggcagggaaggtgcaggaggctcaggactcagattcagactctgagggaggagccgctggtggagaagcagacatggacttcctgcggaacttattctcccagacgctcagcctgggcagccagaaggagcgtctgctggacgagctgaccttggaaggggtggcccggtacatgcagagcgaacgctgtcgcagagtcatctgtttggtgggagctggaatctccacatccgcaggcatccccgactttcgctctccatccaccggcctctatgacaacctagagaagtaccatcttccctacccagaggccatctttgagatcagctatttcaagaaacatccggaacccttcttcgccctcgccaaggaactctatcctgggcagttcaagccaaccatctgtcactacttcatgcgcctgctgaaggacaaggggctactcctgcgctgctacacgcagaacatagataccctggagcgaatagccgggctggaacaggaggacttggtggaggcgcacggcaccttctacacatcacactgcgtcagcgccagctgccggcacgaatacccgctaagctggatgaaagagaagatcttctctgaggtgacgcccaagtgtgaagactgtcagagcctggtgaagcctgatatcgtcttttttggtgagagcctcccagcgcgtttcttctcctgtatgcagtcagacttcctgaaggtggacctcctcctggtcatgggtacctccttgcaggtgcagccctttgcctccctcatcagcaaggcacccctctccacccctcgcctgctcatcaacaaggagaaagctggccagtcggaccctttcctggggatgattatgggcctcggaggaggcatggactttgactccaagaaggcctacagggacgtggcctggctgggtgaatgcgaccagggctgcctggcccttgctgagctccttggatggaagaaggagctggaggaccttgtccggagggagcacgccagcatagatgcccagtcgggggcgggggtccccaaccccagcacttcagcttcccccaagaagtccccgccacctgccaaggacgaggccaggacaacagagagggagaaaccccagtgacagctgcatctcccaggcgggatgccgagctcctcagggacagctgagccccaaccgggcctggccccctcttaaccagcagttcttgtctggggagctcagaacatcccccaatctcttacagctccctccccaaaactggggtcccagcaaccctggcccccaaccccagcaaatctctaacacctcctagaggccaaggcttaaacaggcatctctaccagccccactgtctctaaccactcctgggctaaggagtaacctccctcatctctaactgcccccacggggccagggctaccccagaacttttaactcttccaggacagggagcttcgggcccccactctgtctcctgcccccgggggcctgtggctaagtaaaccatacctaacctaccccagtgtgggtgtgggcctctgaatataacccacacccagcgtagggggagtctgagccgggagggctcccgagtctctgccttcagctcccaaagtgggtggtgggcccccttcacgtgggacccacttcccatgctggatgggcagaagacattgcttattggagacaaattaaaaacaaaaacaactaacaa

SEQ ID NO: 311890 - DNA, 2081 bp, Homo sapiens
gcgctctggcacgtgttgtacgaaagcgcgtctgcggccgcaatgtctgctgagagttgtagttctgtgccctatcacggccactcccatttctggtgccgtcacgggacagagcagtcggtgacaggacagagcagtcggtgacgggacacagtggttggtgacgggacagagcggtcggtgacagcctcaagggcttcagcaccgcgcccatggcagagccagacccctctcaccctctggagacccaggcagggaaggtgcaggaggctcaggccaccttcctgccacagccttttccccaaacctggtatcaccccctctcctccctccctaatcccacctctcgggcctggccactccaccccaccccttccaggactcagattcagactctgagggaggagccgctggtggagaagcagacatggacttcctgcggaacttattctcccagacgctcagcctgggcagccagaaggagcgtctgctggacgagctgaccttggaaggggtggcccggtacatgcagagcgaacgctgtcgcagagtcatctgtttggtgggagctggaatctccacatccgcaggcatccccgactttcgctctccatccaccggcctctatgacaacctagagaagtaccatcttccctacccagaggccatctttgagatcagctatttcaagaaacatccggaacccttcttcgccctcgccaaggaactctatcctgggcagttcaagccaaccatctgtcactacttcatgcgcctgctgaaggacaaggggctactcctgcgctgctacacgcagaacatagataccctggagcgaatagccgggctggaacaggaggacttggtggaggcgcacggcaccttctacacatcacactgcgtcagcgccagctgccggcacgaatacccgctaagctggatgaaagagaagatcttctctgaggtgacgcccaagtgtgaagactgtcagagcctggtgaagcctgatatcgtcttttttggtgagagcctcccagcgcgtttcttctcctgtatgcagtcagacttcctgaaggtggacctcctcctggtcatgggtacctccttgcaggtgcagccctttgcctccctcatcagcaaggcacccctctccacccctcgcctgctcatcaacaaggagaaagctggccagtcggaccctttcctggggatgattatgggcctcggaggaggcatggactttgactccaagaaggcctacagggacgtggcctggctgggtgaatgcgaccagggctgcctggcccttgctgagctccttggatggaagaaggagctggaggaccttgtccggagggagcacgccagcatagatgcccagtcgggggcgggggtccccaaccccagcacttcagcttcccccaagaagtccccgccacctgccaaggacgaggccaggacaacagagagggagaaaccccagtgacagctgcatctcccaggcgggatgccgagctcctcagggacagctgagccccaaccgggcctggccccctcttaaccagcagttcttgtctggggagctcagaacatcccccaatctcttacagctccctccccaaaactggggtcccagcaaccctggcccccaaccccagcaaatctctaacacctcctagaggccaaggcttaaacaggcatctctaccagccccactgtctctaaccactcctgggctaaggagtaacctccctcatctctaactgcccccacggggccagggctaccccagaacttttaactcttccaggacagggagcttcgggcccccactctgtctcctgcccccgggggcctgtggctaagtaaaccatacctaacctaccccagtgtgggtgtgggcctctgaatataacccacacccagcgtagggggagtctgagccgggagggctcccgagtctctgccttcagctcccaaagtgggtggtgggcccccttcacgtgggacccacttcccatgctggatgggcagaagacattgcttattggagacaaattaaaaacaaaaacaactaacaa

SEQ ID NO: 311891 - DNA, 2000 bp, Homo sapiens
gcgctctggcacgtgttgtacgaaagcgcgtctgcggccgcaatgtctgctgagagttgtagttctgtgccctatcacggccactcccatttctggtgccgtcacgggacagagcagtcggtgacaggacagagcagtcggtgacgggacacagtggttggtgacgggacagagcggtcggtgacagcctcaagggcttcagcaccgcgcccatggcagagccagaccgactcagattcagactctgagggaggagccgctggtggagaagcagacatggacttcctgcggaacttattctcccagacgctcagcctgggcagccagaaggagcgtctgctggacgagctgaccttggaaggggtggcccggtacatgcagagcgaacgctgtcgcagagtcatctgtttggtgggagctggaatctccacatccgcaggcatccccgactttcgctctccatccaccggcctctatgacaacctagagaagtaccatcttccctacccagaggccatctttgagatcagctatttcaagaaacatccggaacccttcttcgccctcgccaaggaactctatcctgggcagttcaagtttcctcatctgtgatctggggatagcagtggtctctccccgacgcggctgctgtgacggttccctggggccaaccatctgtcactacttcatgcgcctgctgaaggacaaggggctactcctgcgctgctacacgcagaacatagataccctggagcgaatagccgggctggaacaggaggacttggtggaggcgcacggcaccttctacacatcacactgcgtcagcgccagctgccggcacgaatacccgctaagctggatgaaagagaagatcttctctgaggtgacgcccaagtgtgaagactgtcagagcctggtgaagcctgatatcgtcttttttggtgagagcctcccagcgcgtttcttctcctgtatgcagtcagacttcctgaaggtggacctcctcctggtcatgggtacctccttgcaggtgcagccctttgcctccctcatcagcaaggcacccctctccacccctcgcctgctcatcaacaaggagaaagctggccagtcggaccctttcctggggatgattatgggcctcggaggaggcatggactttgactccaagaaggcctacagggacgtggcctggctgggtgaatgcgaccagggctgcctggcccttgctgagctccttggatggaagaaggagctggaggaccttgtccggagggagcacgccagcatagatgcccagtcgggggcgggggtccccaaccccagcacttcagcttcccccaagaagtccccgccacctgccaaggacgaggccaggacaacagagagggagaaaccccagtgacagctgcatctcccaggcgggatgccgagctcctcagggacagctgagccccaaccgggcctggccccctcttaaccagcagttcttgtctggggagctcagaacatcccccaatctcttacagctccctccccaaaactggggtcccagcaaccctggcccccaaccccagcaaatctctaacacctcctagaggccaaggcttaaacaggcatctctaccagccccactgtctctaaccactcctgggctaaggagtaacctccctcatctctaactgcccccacggggccagggctaccccagaacttttaactcttccaggacagggagcttcgggcccccactctgtctcctgcccccgggggcctgtggctaagtaaaccatacctaacctaccccagtgtgggtgtgggcctctgaatataacccacacccagcgtagggggagtctgagccgggagggctcccgagtctctgccttcagctcccaaagtgggtggtgggcccccttcacgtgggacccacttcccatgctggatgggcagaagacattgcttattggagacaaattaaaaacaaaaacaactaacaa

SEQ ID NO: 311892 - DNA, 1758 bp, Homo sapiens
  misc_feature (18)..(18): n is a, c, g, or t
  misc_feature (28)..(28): n is a, c, g, or t
  misc_feature (36)..(36): n is a, c, g, or t
  misc_feature (39)..(39): n is a, c, g, or t
  misc_feature (64)..(64): n is a, c, g, or t
  misc_feature (73)..(74): n is a, c, g, or t
  misc_feature (80)..(80): n is a, c, g, or t
  misc_feature (89)..(89): n is a, c, g, or t
  misc_feature (91)..(91): n is a, c, g, or t
  misc_feature (95)..(95): n is a, c, g, or t
  misc_feature (101)..(101): n is a, c, g, or t
  misc_feature (106)..(107): n is a, c, g, or t
  misc_feature (110)..(110): n is a, c, g, or t
  misc_feature (115)..(115): n is a, c, g, or t
  misc_feature (117)..(117): n is a, c, g, or t
  misc_feature (123)..(123): n is a, c, g, or t
  misc_feature (125)..(125): n is a, c, g, or t
  misc_feature (133)..(133): n is a, c, g, or t
  misc_feature (136)..(136): n is a, c, g, or t
  misc_feature (138)..(138): n is a, c, g, or t
  misc_feature (153)..(153): n is a, c, g, or t
  misc_feature (160)..(160): n is a, c, g, or t
  misc_feature (162)..(162): n is a, c, g, or t
  misc_feature (165)..(165): n is a, c, g, or t
  misc_feature (177)..(178): n is a, c, g, or t
  misc_feature (182)..(183): n is a, c, g, or t
  misc_feature (185)..(185): n is a, c, g, or t
  misc_feature (187)..(187): n is a, c, g, or t
  misc_feature (199)..(199): n is a, c, g, or t
  misc_feature (201)..(202): n is a, c, g, or t
  misc_feature (204)..(204): n is a, c, g, or t
  misc_feature (206)..(206): n is a, c, g, or t
  misc_feature (214)..(214): n is a, c, g, or t
  misc_feature (219)..(219): n is a, c, g, or t
  misc_feature (223)..(223): n is a, c, g, or t
  misc_feature (227)..(228): n is a, c, g, or t
  misc_feature (231)..(231): n is a, c, g, or t
  misc_feature (234)..(235): n is a, c, g, or t
  misc_feature (241)..(242): n is a, c, g, or t
  misc_feature (265)..(265): n is a, c, g, or t
  misc_feature (285)..(285): n is a, c, g, or t
  misc_feature (294)..(294): n is a, c, g, or t
  misc_feature (303)..(303): n is a, c, g, or t
  misc_feature (306)..(306): n is a, c, g, or t
  misc_feature (314)..(314): n is a, c, g, or t
  misc_feature (328)..(329): n is a, c, g, or t
  misc_feature (333)..(333): n is a, c, g, or t
  misc_feature (339)..(339): n is a, c, g, or t
  misc_feature (348)..(348): n is a, c, g, or t
agacccctctcaccctcnggccgacccnggccggcnccngtgccggcggctccggcctcagccntccccctcnncgggcngcgccgccngnggcnccgccnccctnnccntcctncngccctncntctcccanccncnccgcctgggcccccngccggcncntcncccggccgcccnncccnngncnggggtgcgcccngnncntnccgagcgnccgcngtcnccgnntcntcnntctggnnggacgccggactctccccatccnccgcctccccgcctttcgcnctccatccnccggcctcnctncccccctngcgccgtcccaccnncccngccccnaggccatcnttgagctcccctatttccacaaacatccggaacccttcttcgccctcgccaaggaactctatcctgggcagttcaagccaaccatctgtcactacttcatgcgcctgctgaaggacaaggggctactcctgcgctgctacacgcagaacatagataccctggagcgaatagccgggctggaacaggaggacttggtggaggcgcacggcaccttctacacatcacactgcgtcagcgccagctgccggcacgaatacccgctaagctggatgaaagagaagatcttctctgaggtgacgcccaagtgtgaagactgtcagagcctggtgaagcctgatatcgtcttttttggtgagagcctcccagcgcgtttcttctcctgtatgcagtcagacttcctgaaggtggacctcctcctggtcatgggtacctccttgcaggtgcagccctttgcctccctcatcagcaaggcacccctctccacccctcgcctgctcatcaacaaggagaaagctggccagtcggaccctttcctggggatgattatgggcctcggaggaggcatggactttgactccaagaaggcctacagggacgtggcctggctgggtgaatgcgaccagggctgcctggcccttgctgagctccttggatggaagaaggagctggaggaccttgtccggagggagcacgccagcatagatgcccagtcgggggcgggggtccccaaccccagcacttcagcttcccccaagaagtccccgccacctgccaaggacgaggccaggacaacagagagggagaaaccccagtgacagctgcatctcccaggcgggatgccgagctcctcagggacagctgagccccaaccgggcctggccccctcttaaccagcagttcttgtctggggagctcagaacatcccccaatctcttacagctccctccccaaaactggggtcccagcaaccctggcccccaaccccagcaaatctctaacacctcctagaggccaaggcttaaacaggcatctctaccagccccactgtctctaaccactcctgggctaaggagtaacctccctcatctctaactgcccccacggggccagggctaccccagaacttttaactcttccaggacagggagcttcgggcccccactctgtctcctgcccccgggggcctgtggctaagtaaaccatacctaacctaccccagtgtgggtgtgggcctctgaatataacccacacccagcgtagggggagtctgagccgggagggctcccgagtctctgccttcagctcccaaagtgggtggtgggcccccttcacgtgggacccacttcccatgctggatgggcagaagacattgcttattggagacaaattaaaaacaaaaacaactaacaa

SEQ ID NO: 311893 - DNA, 1344 bp, Homo sapiens
gcgctctggcacgtgttgtacgaaagcgcgtctgcggccgcaatgtctgctgagagttgtagttctgtgccctatcacggccactcccatttctggtgccgtcacgggacagagcagtcggtgacaggacagagcagtcggtgacgggacacagtggttggtgacgggacagagcggtcggtgacagcctcaagggcttcagcaccgcgcccatggcagagccagaccgactcagattcagactctgagggaggagccgctggtggagaagcagacatggacttcctgcggaacttattctcccagacgctcagcctgggcagccagaaggagcgtctgctggacgagctgaccttggaaggggtggcccggtacatgcagagcgaacgctgtcgcagagtcatctgtttggtgggagctggaatctccacatccgcaggcatccccgactttcgctctccatccaccggcctctatgacaacctagagaagtaccatcttccctacccagaggccatctttgagatcagctatttcaagaaacatccggaacccttcttcgccctcgccaaggaactctatcctgggcagttcaagccaaccatctgtcactacttcatgcgcctgctgaaggacaaggggctactcctgcgctgctacacgcagaacatagataccctggagcgaatagccgggctggaacaggaggacttggtggaggcgcacggcaccttctacacatcacactgcgtcagcgccagctgccggcacgaatacccgctaagctggatgaaagagaagatcttctctgaggtgacgcccaagtgtgaagactgtcagagcctggtgaagcctgatatcgtcttttttggtgagagcctcccagcgcgtttcttctcctgtatgcagtcagacttcctgaaggtggacctcctcctggtcatgggtacctccttgcaggtgcagccctttgcctccctcatcagcaaggcacccctctccacccctcgcctgctcatcaacaaggagaaagctggccaggtaagagcccttcttcaagcccccgtcgtcacaggctcccccttccctctcacccttttcctcagagggaacccccactgtggctaagtaaaccatacctaacctaccccagtgtgggtgtgggcctctgaatataacccacacccagcgtagggggagtctgagccgggagggctcccgagtctctgccttcagctcccaaagtgggtggtgggcccccttcacgtgggacccacttcccatgctggatgggcagaagacattgcttattggagacaaattaaaaacaaaaacaactaacaa

SEQ ID NO: 311894 - DNA, 1061 bp, Homo sapiens
gcgctctggcacgtgttgtacgaaagcgcgtctgcggccgcaatgtctgctgagagttgtagttctgtgccctatcacggccactcccatttctggtgccgtcacgggacagagcagtcggtgacaggacagagcagtcggtgacgggacacagtggttggtgacgggacagagcggtcggtgacagcctcaagggcttcagcaccgcgcccatggcagagccagaccgactcagattcagactctgagggaggagccgctggtggagaagcagacatggacttcctgcggaacttattctcccagacgctcagcctgggcagccagaaggagcgtctgctggacgagctgaccttggaaggggtggcccggtacatgcagagcgaacgctgtcgcagagtcatctgtttggtgggagctggaatctccacatccgcaggcatccccgactttcgctctccatccaccggcctctatgacaacctagagaagtaccatcttccctacccagaggccatctttgagatcagctatttcaagaaacatccggaacccttcttcgccctcgccaaggaactctatcctgggcagttcaagccaaccatctgtcactacttcatgcgcctgctgaaggacaaggggctactcctgcgctgctacacgcagaacatagataccctggagcgaatagccgggctggaacaggaggacttggtggaggcgcacggcaccttctacacatcacactgcgtcagcgccagctgccggcacgaatacccgctaagctggatgaaagagaagatcttctctgaggtgacgcccaagtgtgaagactgtcagagcctggtgaagcctgatatcgtcttttttggtgagagcctcccagcgcgtttcttctcctgtatgcagtcagacttcctgaaggtggacctcctcctggtcatgggtacctccttgcaggtgcttggctcctcataggaggcaccctttcaaccttgctggtctcacagggaaagtggcagtggaccttctgggggatatggcccgagggctggatgggc

SEQ ID NO: 311895 - DNA, 923 bp, Homo sapiens
  misc_feature (862)..(862): n is a, c, g, or t
tgtgtgtgttcctctagagtgccaaaaaagaaaaaaaaaagtgctgaagagtcctagggagatgaggctatttttgtttgaagctgatacttctagctgagccacaagtgctgcttggaaagggcttaggttgtttccaggggagaactctgcagaggagaggcaaagttcaacaggacaacaaagaagcagcagaaacagccaggaaaacgaagagcccccaggttttgacacagaaccctccaccagagttctcaaatccccaaatactctgcaaagtgcaacttgacgggaacttttcaactgacttttacttttgacgaccaccatgactgagatcactgctgaaggaaatgcatctacaaccacaactgtgatagacagcaaaaatggatctgtgcccaaatcccccggaaaagtgctgaagaggacagtcacagaagacatagtgacgacgttcagctcccctgcagcctggcttctggtcattgccctgataatcacgtggtcagctgttgccatcgttatgtttgatttagtggattacaaaaacttttcagcaagctctattgccaagattggctcagatcctttaaaactggtacgtgatgctatggaggaaaccacggactggatctatggcttcttttctttgttatctgacatcatctcatctgaagatgaagaagatgatgatggtgacgaagatactgataaaggagaaatagatgagcctcccttgagaaaaaaagaaatacacaaagataagactgaaaaacaagagaaacctgaaggaaaatacaaactaaaggtttcccacaagaacgaaaggcagaacagttgagaaagaaactgaagaagntccaggaaaatggaaaagaaaccgaaaaagaaggggagaaaagaacttgggaaggggaata

SEQ ID NO: 311896 - DNA, 1908 bp, Homo sapiens
  misc_feature (23)..(23): n is a, c, g, or t
  misc_feature (1672)..(1672): n is a, c, g, or t
aagcagtggtatcaacgcagagngcccattacggccgggggagaggagaggcaaagttcaacaggacaacaaagaagcagcagaaacagccaggaaaacgaagagcccccaggttttgacacagaaccctccaccagagttctcaaatccccaaatactctgcaaagtgcaacttgacgggaacttttcaactgacttttacttttgacgaccaccatgactgagatcactgctgaaggaaatgcatctacaaccacaactgtgatagacagcaaaaatggatctgtgcccaaatcccccggaaaagtgctgaagaggacagtcacagaagacatagtgacgacgttcagctcccctgcagcctggcttctggtcattgccctgataatcacgtggtcagctgttgccatcgttatgtttgatttagtggattacaaaaacttttcagcaagctctattgccaagattggctcagatcctttaaaactggtacgtgatgctatggaggaaaccacggactggatctatggcttcttttctttgttatctgacatcatctcatctgaagatgaagaagatgatgatggtgacgaagatactgataaaggagaaatagatgagcctcccttgagaaaaaaagaaatacacaaagataagactgaaaaacaagagaaacctgaaggaaaatacaaactaaagttacacacaaagaaaaagaaaaaggaaaagaaaaagtaagagaaaaagaaaaacctgaaaagaaagcaactcacaaggaaaaaattgagaaaaaagaaaaaccagaaacaaagacagtggcgaaagaacagaagaaagctaagactgcagaaaagagtgaagaaaagactaaaaaggaagtgaaaggtggaaaacaggagaaagtgaagcaaacagctgcaaaagtaaaagaagtacagaaaacaccatcaaaacccaaagaaaaggaggacaaagagaaagcagctgtgtcaaagcatgaacagaaagatcagtatgcattctgtcgatatatgattgacatatttgtccatggggatttaaaaccaggacaaagcccagccattccacctcccttaccgacagaacaagcttccagacccactccggcatcacctgcccttgaagaaaaagaaggggaaaagaagaaggctgagaagaaagttacttctgaaacaaaaaagaaagagaaaaagaagatatcaaaaagaaaagtgagaaggaaactgccattgatgtggaaaaaaaaagagccgggaaaagcttctgaaaccaaacaagggactgtaaaaattgcagcacaagcagcagctaagaaggatgaaaagaaggaagattccaagaaaacaaaaaaacctgcagaagtagaacaacccaagggaaaaaaacaggaaaagaaagaaaaacatgtggaaccagcaaagtcaccaaagaaagaacactcagttccaagtgacaaacaagtaaaagcaaaaactgaacgagccaaagaggagattggtgcggtttcaagtaaaaaagctgtacctggaaagaaggaagagaaaacaaccaagacagtggagccagaaattagacaacgaaacatctgcgacgacttctccaattcttgaagataaagaacttattagggcacgaccagaaagtccaggtncctaaggaaaagaactggaattaagaagatgaaagatgtccaagcggaagaagtcagctaaactccaaatacggggaaaggaggagccgagcccataaaagaagaacggttttggaggcttccacggatttgaccaaatggttctggacccaaaatctgggaatgggtaaaagcggcaaaaaaaaaggggggcgataaatgggggaagaatctgcgatgggaccgcggcaattggg

SEQ ID NO: 311897 - DNA, 832 bp, Homo sapiens
  misc_feature (63)..(63): n is a, c, g, or t
  misc_feature (69)..(69): n is a, c, g, or t
  misc_feature (71)..(71): n is a, c, g, or t
  misc_feature (83)..(83): n is a, c, g, or t
cacacacacacactcatccctcccttcccctcaagaacaaaaagacctcagtagtcaacaaanataagnanctaaaaagaagnaaacaacctgaaaggaaaatacaaactaaaagttggacacagctcttgagtacggattgactaagcgaaccatgactgaactggctctgtgtttctatctgctgaaggttaaacagaaactcaactggttccacaccatttgggtccctgctgtttttttcttgcagactgtgctattaatttaataacagtgctgctggagtggcggtagtaatgtagatggcaccatttgcattttggacctggctatattagaattctgatgtcaaagaccgagcagtgggctgtagagtaggtttattaaactagcaagtcttccataattaagacagtgaatttggctgaagtctaaaataaatttctcaaagactgagctggagattatcaacctgaatatatttcttgagtagaccaaatatgttttgtaaaagtaactatttcttaagaaagtgaaagtagagcttcagttgctccacactgagctggaaatcagagagagcttatgttttccacagtttttctgtgtgaatatgaacaaaagatttcactttattgcttagtttcccgtctgtaaatggggtagactaatgcctgctctttattctcaaatagttcagtgaaaataaatgttttgctttacaactgctcttgtatgtggataaatactgttttctgtatgccatgttccatgtcagttatggttgtatgtgatggatagttaggaatttaagttattatcaaagcatttt

SEQ ID NO: 311898 - DNA, 1531 bp, Homo sapiens
tgtgtgtgttcctctagagtgccaaaaaagaaaaaaaaaagtgctgaagagtcctagggagatgaggctatttttgtttgaagctgatacttctagctgagccacaagtgctgcttggaaagggcttaggttgtttccaggggagaactctgcagaggagaggcaaagttcaacaggacaacaaagaagcagcagaaacagccaggaaaacgaagagcccccaggttttgacacagaaccctccaccagagttctcaaatccccaaatactctgcaaagtgcaacttgacgggaacttttcaactgacttttacttttgacgaccaccatgactgagatcactgctgaaggaaatgcatctacaaccacaactgtgatagacagcaaaaatggatctgtgcccaaatcccccggaaaagtgctgaagaggacagtcacagaagacatagtgacgacgttcagctcccctgcagcctggcttctggtcattgccctgataatcacgtggtcagctgttgccatcgttatgtttgatttagtggattacaaaaacttttcagcaagctctattgccaagattggctcagatcctttaaaactggtacgtgatgctatggaggaaaccacggactggatctatggcttcttttctttgttatctgacatcatctcatctgaagatgaagaagatgatgatggtgacgaagatactgataaaggagaaatagatgagcctcccttgagaaaaaaagaaatacacaaagataagactgaaaaacaagagaaacctgaaggaaaatacaaactaaagaagttggacacagctcttgagtacggattgactaagcgaaccatgactgaactggctctgtgtttctatctgctgaaggttaaacagaaactcaactggttccacaccatttgggtccctgctgtttttttcttgcagactgtgctattaatttaataacagtgctgctggagtggcggtagtaatgtagatggcaccatttgcattttggacctggctatattagaattctgatgtcaaagaccgagcagtgggctgtagagtaggtttattaaactagcaagtcttccataattaagacagtgaatttggctgaagtctaaaataaatttctcaaagactgagctggagattatcaacctgaatatatttcttgagtagaccaaatatgttttgtaaaagtaactatttcttaagaaagtgaaagtagagcttcagttgctccacactgagctggaaatcagagagagcttatgttttccacagtttttctgtgtgaatatgaacaaaagatttcactttattgcttagtttcccgtctgtaaatggggtagactaatgcctgctctttattctcaaatagttcagtgaaaataaatgttttgctttacaactgctcttgtatgtggataaatactgttttctgtatgccatgttccatgtcagttatggttgtatgtgatggatagttaggaatttaagttattatcaaagcatttt

SEQ ID NO: 311899 - DNA, 1574 bp, Homo sapiens
tgtgtgtgttcctctagagtgccaaaaaagaaaaaaaaaagtgctgaagagtcctagggagatgaggctatttttgtttgaagctgatacttctagctgagccacaagtgctgcttggaaagggcttaggttgtttccaggggagaactctgcagaggagaggcaaagttcaacaggacaacaaagaagcagcagaaacagccaggaaaacgaagagcccccaggttttgacacagaaccctccaccagagttctcaaatccccaaatactctgcaaagtgcaacttgacgggaacttttcaactgacttttacttttgacgaccaccatgactgagatcactgctgaaggaaatgcatctacaaccacaactgtgatagacagcaaaaatggatctgtgcccaaatcccccggaaaagtgctgaagaggacagtcacagaagacatagtgacgacgttcagctcccctgcagcctggcttctggtcattgccctgataatcacgtggtcagctgttgccatcgttatgtttgatttagtggattacaaaaacttttcagcaagctctattgccaagattggctcagatcctttaaaactggtacgtgatgctatggaggaaaccacggactggatctatggcttcttttctttgttatctgacatcatctcatctgaagatgaagaagatgatgatggtgacgaagatactgataaaggagaaatagatgagcctcccttgagaaaaaaagaaatacacaaagataagactgaaaaacaagagaaacctgaaggaaaatacaaactaaagttacacacaaagaaaaagaaaaaggaaaagaaaaagtaagagaaaaagaaaaacctgaaaagaaagcaactcacaaggaaaaaattgagaaaaaagaaaaaccagaaacaaagacagtggcgaaagaacagaagaaagctaagactgcagaaaagagtgaagaaaagactaaaaaggaagtgaaaggtggaaaacaggagaaagtgaagcaaacagctgcaaaagtaaaagaagtacagaaaacaccatcaaaacccaaagaaaaggaggacaaagagaaagcagctgtgtcaaagcatgaacagaaagggttcccaggtcctgggatcagaaactccagctattactgccagtacatcaaagggcaaatcaatgcatggaatgacctgaggactagcctccttcccattccctacctctcctgtgggaaaatgtgctccaatttcaacaactaaaatacatctaaatttttggaactttatgagttttggcctgcccttatttaggtattaatgaaaaagattatatttttatatcttcttcaataactatatttattttttaaagacctaacagaatttcataataaaatggattcctctaaaaatgctgttactactctaaaaagaacgagatttacaaaaatccttagaggtgtatctgtttagtaacaagctttgttatttcatatgtttgatatgcataatttggagcaattaagaatgtaacatgttgcttaaattcaataaactctcttggtcct

SEQ ID NO: 311900 - DNA, 1326 bp, Homo sapiens
tgtgtgtgttcctctagagtgccaaaaaagaaaaaaaaaagtgctgaagagtcctagggagatgaggctatttttgtttgaagctgatacttctagctgagccacaagtgctgcttggaaagggcttaggttgtttccaggggagaactctgcagaggagaggcaaagttcaacaggacaacaaagaagcagcagaaacagccaggaaaacgaagagcccccaggttttgacacagaaccctccaccagagttctcaaatccccaaatactctgcaaagtgcaacttgacgggaacttttcaactgacttttacttttgacgaccaccatgactgagatcactgctgaaggaaatgcatctacaaccacaactgtgatagacagcaaaaatggatctgtgcccaaatcccccggaaaagtgctgaagaggacagtcacagaagacatagtgacgacgttcagctcccctgcagcctggcttctggtcattgccctgataatcacgtggtcagctgttgccatcgttatgtttgatttagtggattacaaaaacttttcagcaagctctattgccaagattggctcagatcctttaaaactggtacgtgatgctatggaggaaaccacggactggatctatggcttcttttctttgttatctgacatcatctcatctgaagatgaagaagatgatgatggtgacgaagatactgataaaggagaaatagatgagcctcccttgagaaaaaaagaaatacacaaagataagactgaaaaacaagagaaacctgaaggaaaatacaaactaaagttacacacaaagaaaaagaaaaaggaaaagaaaaagtaagagaaaaagaaaaacctgaaaagaaagcaactcacaaggaaaaaattgagaaaaaagaaaaaccagaaacaaagacagtggcgaaagaacagaagaaagctaagactgcagaaaagagtgaagaaaagactaaaaaggaagtgaaaggtggaaaacaggagaaagtgaagcaaacagctgcaaaagtaaaagaagtacagaaaacaccatcaaaacccaaagaaaaggaggacaaagagaaagcagctgtgtcaaagcatgaacagaaagatcagtatgcattctgtcgatatatgattgacatatttgtccatggggatttaaaaccaggtattccaagcaattcttgtacttgtctgttttaatagtctttgtttctaagattgtgggctttttatgtacctaactgtattttcattttttaaaaattgcataatgcatgtgtagatctagaataaaaccaataaaaagcggta

SEQ ID NO: 311901 - DNA, 1666 bp, Homo sapiens
tgtgtgtgttcctctagagtgccaaaaaagaaaaaaaaaagtgctgaagagtcctagggagatgaggctatttttgtttgaagctgatacttctagctgagccacaagtgctgcttggaaagggcttaggttgtttccaggggagaactctgcagaggagaggcaaagttcaacaggacaacaaagaagcagcagaaacagccaggaaaacgaagagcccccaggttttgacacagaaccctccaccagagttctcaaatccccaaatactctgcaaagtgcaacttgacgggaacttttcaactgacttttacttttgacgaccaccatgactgagatcactgctgaaggaaatgcatctacaaccacaactgtgatagacagcaaaaatggatctgtgcccaaatcccccggaaaagtgctgaagaggacagtcacagaagacatagtgacgacgttcagctcccctgcagcctggcttctggtcattgccctgataatcacgtggtcagctgttgccatcgttatgtttgatttagtggattacaaaaacttttcagcaagctctattgccaagattggctcagatcctttaaaactggtacgtgatgctatggaggaaaccacggactggatctatggcttcttttctttgttatctgacatcatctcatctgaagatgaagaagatgatgatggtgacgaagatactgataaaggagaaatagatgagcctcccttgagaaaaaaagaaatacacaaagataagactgaaaaacaagagaaacctgaaggaaaatacaaactaaagattggtcagccaattcttcaacaatcagaacattgaagctcactcagttgaaacctatttatatttgtacttaggaaactaatgtctccttactgttctctttccttttttcggttcttaattcctttgatcacaaagttggacacagctcttgagtacggattgactaagcgaaccatgactgaactggctctgtgtttctatctgctgaaggttaaacagaaactcaactggttccacaccatttgggtccctgctgtttttttcttgcagactgtgctattaatttaataacagtgctgctggagtggcggtagtaatgtagatggcaccatttgcattttggacctggctatattagaattctgatgtcaaagaccgagcagtgggctgtagagtaggtttattaaactagcaagtcttccataattaagacagtgaatttggctgaagtctaaaataaatttctcaaagactgagctggagattatcaacctgaatatatttcttgagtagaccaaatatgttttgtaaaagtaactatttcttaagaaagtgaaagtagagcttcagttgctccacactgagctggaaatcagagagagcttatgttttccacagtttttctgtgtgaatatgaacaaaagatttcactttattgcttagtttcccgtctgtaaatggggtagactaatgcctgctctttattctcaaatagttcagtgaaaataaatgttttgctttacaactgctcttgtatgtggataaatactgttttctgtatgccatgttccatgtcagttatggttgtatgtgatggatagttaggaatttaagttattatcaaagcatttt

SEQ ID NO: 311902 - DNA, 297 bp, Homo sapiens
gtaacttttcaatttattatttccataactaaattctttttactctgaaagattaatttttgggtaacagatagttggatatttgtaaacttttatcatttatattaaaaagttaatttggtcttacctttaaaatttaatatctaaaagaataattaaactgaacacttaatagagaatctcataatgtgagaggaaaatgaagagctccatcatatgtggtagacagaattttgagccccataaccctcattcaccccttggtgtcatccctatggctatgttatattacatggc

SEQ ID NO: 311903 - DNA, 2020 bp, Homo sapiens
  misc_feature (1784)..(1784): n is a, c, g, or t
tgtgtgtgttcctctagagtgccaaaaaagaaaaaaaaaagtgctgaagagtcctagggagatgaggctatttttgtttgaagctgatacttctagctgagccacaagtgctgcttggaaagggcttaggttgtttccaggggagaactctgcagaggagaggcaaagttcaacaggacaacaaagaagcagcagaaacagccaggaaaacgaagagcccccaggttttgacacagaaccctccaccagagttctcaaatccccaaatactctgcaaagtgcaacttgacgggaacttttcaactgacttttacttttgacgaccaccatgactgagatcactgctgaaggaaatgcatctacaaccacaactgtgatagacagcaaaaatggatctgtgcccaaatcccccggaaaagtgctgaagaggacagtcacagaagacatagtgacgacgttcagctcccctgcagcctggcttctggtcattgccctgataatcacgtggtcagctgttgccatcgttatgtttgatttagtggattacaaaaacttttcagcaagctctattgccaagattggctcagatcctttaaaactggtacgtgatgctatggaggaaaccacggactggatctatggcttcttttctttgttatctgacatcatctcatctgaagatgaagaagatgatgatggtgacgaagatactgataaaggagaaatagatgagcctcccttgagaaaaaaagaaatacacaaagataagactgaaaaacaagagaaacctgaaggaaaatacaaactaaagttacacacaaagaaaaagaaaaaggaaaagaaaaagtaagagaaaaagaaaaacctgaaaagaaagcaactcacaaggaaaaaattgagaaaaaagaaaaaccagaaacaaagacagtggcgaaagaacagaagaaagctaagactgcagaaaagagtgaagaaaagactaaaaaggaagtgaaaggtggaaaacaggagaaagtgaagcaaacagctgcaaaagtaaaagaagtacagaaaacaccatcaaaacccaaagaaaaggaggacaaagagaaagcagctgtgtcaaagcatgaacagaaagatcagtatgcattctgtcgatatatgattgacatatttgtccatggggatttaaaaccaggacaaagcccagccattccacctcccttaccgacagaacaagcttccagacccactccggcatcacctgcccttgaagaaaaagaaggggaaaagaagaaggctgagaagaaagttacttctgaaacaaaaaagaaagagaaaaagaagatatcaaaaagaaaagtgagaaggaaactgccattgatgtggaaaaaaaaagagccgggaaaagcttctgaaaccaaacaagggactgtaaaaattgcagcacaagcagcagctaagaaggatgaaaagaaggaagattccaagaaaacaaaaaaacctgcagaagtagaacaacccaagggaaaaaaacaggaaaagaaagaaaaacatgtggaaccagcaaagtcaccaaagaaagaacactcagttccaagtgacaaacaagtaaaagcaaaaactgaacgagccaaagaggagattggtgcggtttcaagtaaaaaagctgtacctggaaagaaggaagagaaaacaaccaagacagtggagccagaaattagacaacgaaacatctgcgacgacttctccaattcttgaagataaagaacttattagggcacgaccagaaagtccaggtncctaaggaaaagaactggaattaagaagatgaaagatgtccaagcggaagaagtcagctaaactccaaatacggggaaaggaggagccgagcccataaaagaagaacggttttggaggcttccacggatttgaccaaatggttctggacccaaaatctgggaatgggtaaaagcggcaaaaaaaaaggggggcgataaatgggggaagaatctgcgatgggaccgcggcaattggg

SEQ ID NO: 311904 - DNA, 1941 bp, Homo sapiens
  misc_feature (23)..(23): n is a, c, g, or t
  misc_feature (1705)..(1705): n is a, c, g, or t
aagcagtggtatcaacgcagagngcccattacggccgggggagggcttaggttgtttccaggggagaactctgcagaggagaggcaaagttcaacaggacaacaaagaagcagcagaaacagccaggaaaacgaagagcccccaggttttgacacagaaccctccaccagagttctcaaatccccaaatactctgcaaagtgcaacttgacgggaacttttcaactgacttttacttttgacgaccaccatgactgagatcactgctgaaggaaatgcatctacaaccacaactgtgatagacagcaaaaatggatctgtgcccaaatcccccggaaaagtgctgaagaggacagtcacagaagacatagtgacgacgttcagctcccctgcagcctggcttctggtcattgccctgataatcacgtggtcagctgttgccatcgttatgtttgatttagtggattacaaaaacttttcagcaagctctattgccaagattggctcagatcctttaaaactggtacgtgatgctatggaggaaaccacggactggatctatggcttcttttctttgttatctgacatcatctcatctgaagatgaagaagatgatgatggtgacgaagatactgataaaggagaaatagatgagcctcccttgagaaaaaaagaaatacacaaagataagactgaaaaacaagagaaacctgaaggaaaatacaaactaaagttacacacaaagaaaaagaaaaaggaaaagaaaaagtaagagaaaaagaaaaacctgaaaagaaagcaactcacaaggaaaaaattgagaaaaaagaaaaaccagaaacaaagacagtggcgaaagaacagaagaaagctaagactgcagaaaagagtgaagaaaagactaaaaaggaagtgaaaggtggaaaacaggagaaagtgaagcaaacagctgcaaaagtaaaagaagtacagaaaacaccatcaaaacccaaagaaaaggaggacaaagagaaagcagctgtgtcaaagcatgaacagaaagatcagtatgcattctgtcgatatatgattgacatatttgtccatggggatttaaaaccaggacaaagcccagccattccacctcccttaccgacagaacaagcttccagacccactccggcatcacctgcccttgaagaaaaagaaggggaaaagaagaaggctgagaagaaagttacttctgaaacaaaaaagaaagagaaaaagaagatatcaaaaagaaaagtgagaaggaaactgccattgatgtggaaaaaaaaagagccgggaaaagcttctgaaaccaaacaagggactgtaaaaattgcagcacaagcagcagctaagaaggatgaaaagaaggaagattccaagaaaacaaaaaaacctgcagaagtagaacaacccaagggaaaaaaacaggaaaagaaagaaaaacatgtggaaccagcaaagtcaccaaagaaagaacactcagttccaagtgacaaacaagtaaaagcaaaaactgaacgagccaaagaggagattggtgcggtttcaagtaaaaaagctgtacctggaaagaaggaagagaaaacaaccaagacagtggagccagaaattagacaacgaaacatctgcgacgacttctccaattcttgaagataaagaacttattagggcacgaccagaaagtccaggtncctaaggaaaagaactggaattaagaagatgaaagatgtccaagcggaagaagtcagctaaactccaaatacggggaaaggaggagccgagcccataaaagaagaacggttttggaggcttccacggatttgaccaaatggttctggacccaaaatctgggaatgggtaaaagcggcaaaaaaaaaggggggcgataaatgggggaagaatctgcgatgggaccgcggcaattggg

SEQ ID NO: 311905 - DNA, 1383 bp, Homo sapiens
tgtgtgtgttcctctagagtgccaaaaaagaaaaaaaaaagtgctgaagagtcctagggagatgaggctatttttgtttgaagctgatacttctagctgagccacaagtgctgcttggaaagggcttaggttgtttccaggggagaactctgcagaggagaggcaaagttcaacaggacaacaaagaagcagcagaaacagccaggaaaacgaagagcccccaggttttgacacagaaccctccaccagagttctcaaatccccaaatactctgcaaagtgcaacttgacgggaacttttcaactgacttttacttttgacgaccaccatgactgagatcactgctgaaggaaatgcatctacaaccacaactgtgatagacagcaaaaatggatctgtgcccaaatcccccggaaaagtgctgaagaggacagtcacagaagacatagtgacgacgttcagctcccctgcagcctggcttctggtcattgccctgataatcacgtggtcagctgttgccatcgttatgtttgatttagtggattacaaaaacttttcagcaagctctattgccaagattggctcagatcctttaaaactggtacgtgatgctatggaggaaaccacggactggatctatggcttcttttctttgttatctgacatcatctcatctgaagatgaagaagatgatgatggtgacgaagatactgataaaggagaaatagatgagcctcccttgagaaaaaaagaaatacacaaagataagactgaaaaacaagagaaacctgaaggaaaatacaaactaaagttacacacaaagaaaaagaaaaaggaaaagaaaaagtaagagaaaaagaaaaacctgaaaagaaagcaactcacaaggaaaaaattgagaaaaaagaaaaaccagaaacaaagacagtggcgaaagaacagaagaaagctaagactgcagaaaagagtgaagaaaagactaaaaaggaagtgaaaggtggaaaacaggagaaagtgaagcaaacagctgcaaaagtaaaagaagtacagaaaacaccatcaaaacccaaagaaaaggaggacaaagagaaagcagctgtgtcaaagcatgaacagaaagatcagtatgcattctgtcgatatatgattgacatatttgtccatggggatttaaaaccaggacaaagcccagccattccacctcccttaccgacagaacaagcttccagacccactccggcatcacctgcccttgaagaaaagaaggggaccaagaagaggtgagaagaagtacttctgaaacaaaaaagaagaaacgagactatcaagaaggagaggaacgctggtgggaaaaagagcggaagttgaacaaaaggcggaatg

SEQ ID NO: 311906 - DNA, 1698 bp, Homo sapiens
  misc_feature (23)..(23): n is a, c, g, or t
  misc_feature (1462)..(1462): n is a, c, g, or t
aagcagtggtatcaacgcagagngcccattacggccgggggagaggagaggcaaagttcaacaggacaacaaagaagcagcagaaacagccaggaaaacgaagagcccccaggttttgacacagaaccctccaccagagttctcaaatccccaaatactctgcaaagtgcaacttgacgggaacttttcaactgacttttacttttgacgaccaccatgactgagatcactgctgaagcaagctctattgccaagattggctcagatcctttaaaactggtacgtgatgctatggaggaaaccacggactggatctatggcttcttttctttgttatctgacatcatctcatctgaagatgaagaagatgatgatggtgacgaagatactgataaaggagaaatagatgagcctcccttgagaaaaaaagaaatacacaaagataagactgaaaaacaagagaaacctgaaggaaaatacaaactaaagttacacacaaagaaaaagaaaaaggaaaagaaaaagtaagagaaaaagaaaaacctgaaaagaaagcaactcacaaggaaaaaattgagaaaaaagaaaaaccagaaacaaagacagtggcgaaagaacagaagaaagctaagactgcagaaaagagtgaagaaaagactaaaaaggaagtgaaaggtggaaaacaggagaaagtgaagcaaacagctgcaaaagtaaaagaagtacagaaaacaccatcaaaacccaaagaaaaggaggacaaagagaaagcagctgtgtcaaagcatgaacagaaagatcagtatgcattctgtcgatatatgattgacatatttgtccatggggatttaaaaccaggacaaagcccagccattccacctcccttaccgacagaacaagcttccagacccactccggcatcacctgcccttgaagaaaaagaaggggaaaagaagaaggctgagaagaaagttacttctgaaacaaaaaagaaagagaaaaagaagatatcaaaaagaaaagtgagaaggaaactgccattgatgtggaaaaaaaaagagccgggaaaagcttctgaaaccaaacaagggactgtaaaaattgcagcacaagcagcagctaagaaggatgaaaagaaggaagattccaagaaaacaaaaaaacctgcagaagtagaacaacccaagggaaaaaaacaggaaaagaaagaaaaacatgtggaaccagcaaagtcaccaaagaaagaacactcagttccaagtgacaaacaagtaaaagcaaaaactgaacgagccaaagaggagattggtgcggtttcaagtaaaaaagctgtacctggaaagaaggaagagaaaacaaccaagacagtggagccagaaattagacaacgaaacatctgcgacgacttctccaattcttgaagataaagaacttattagggcacgaccagaaagtccaggtncctaaggaaaagaactggaattaagaagatgaaagatgtccaagcggaagaagtcagctaaactccaaatacggggaaaggaggagccgagcccataaaagaagaacggttttggaggcttccacggatttgaccaaatggttctggacccaaaatctgggaatgggtaaaagcggcaaaaaaaaaggggggcgataaatgggggaagaatctgcgatgggaccgcggcaattggg

SEQ ID NO: 311907 - DNA, 710 bp, Homo sapiens
acgaaaagcgcgcgcggggattccaggagtcgtggtttcttgccttgatgtactggagcaatcagatcacacggcggcttggagaaacccagggaccatgggcgcctccaggctctataccctggtgctggtcctgcagcctcagcgagttctcctgggcatgaaaaagcgaggcttcggggccggccggtggaatggctttgggggcaaagtgcaagaaggagagaccatcgaggatggggctaggagggagctgcaggaggagagcggtctgacagtggacgccctgcacaaggtgggccagatcgtgtttgagttcgtgggcgagcctgagctcatggacgtgcatgtcttctgcacagacagcatccaggggacccccgtggagagcgacgaaatgcgcccatgctggttccagctggatcagatccccttcaaggacatgtggcccgacgacagctactggtttccactcctgcttcagaagaagaaattccacgggtacttcaagttccagggtcaggacaccatcctggactacacactccgcgaggtggacacggtctagcgggagcccagggcagcccctgggcaggagacgtggctgctgaacagccgcaaaccatcttcacctgggggcattgagtggcgcagagccgggtttcatctggaattaactggatggaagggaaaataaagctatctagcgg

SEQ ID NO: 311908 - DNA, 660 bp, Homo sapiens
ggtcagaggccacgcccccggaagcggcggtgcagaacccagggaccatgggcgcctccaggctctataccctggtgctggtcctgcagcctcagcgagttctcctgggcatgaaaaagcgaggcttcggggccggccggtggaatggctttgggggcaaagtgcaagaaggagagaccatcgaggatggggctaggagggagctgcaggaggagagcggtctgacagtggacgccctgcacaaggtgggccagatcgtgtttgagttcgtgggcgagcctgagctcatggacgtgcatgtcttctgcacagacagcatccaggggacccccgtggagagcgacgaaatgcgcccatgctggttccagctggatcagatccccttcaaggacatgtggcccgacgacagctactggtttccactcctgcttcagaagaagaaattccacgggtacttcaagttccagggtcaggacaccatcctggactacacactccgcgaggtggacacggtctagcgggagcccagggcagcccctgggcaggagacgtggctgctgaacagccgcaaaccatcttcacctgggggcattgagtggcgcagagccgggtttcatctggaattaactggatggaagggaaaataaagctatctagcgg

SEQ ID NO: 311909 - DNA, 772 bp, Homo sapiens
ggcacgaggaagcggcggtgcaggtttcttgccttgatgtactggagcaatcagatcacacggcggcttggagagtgagtgcaaggttttatgagtggaattagccctcagcagatgggggagccagaaggcagttggagtgggaagaacccagggaccatgggcgcctccaggctctataccctggtgctggtcctgcagcctcagcgagttctcctgggcatgaaaaagcgaggcttcggggccggccggtggaatggctttgggggcaaagtgcaagaaggagagaccatcgaggatggggctaggagggagctgcaggaggagagcggtctgacagtggacgccctgcacaaggtgggccagatcgtgtttgagttcgtgggcgagcctgagctcatggacgtgcatgtcttctgcacagacagcatccaggggacccccgtggagagcgacgaaatgcgcccatgctggttccagctggatcagatccccttcaaggacatgtggcccgacgacagctactggtttccactcctgcttcagaagaagaaattccacgggtacttcaagttccagggtcaggacaccatcctggactacacactccgcgaggtggacacggtctagcgggagcccagggcagcccctgggcaggagacgtggctgctgaacagccgcaaaccatcttcacctgggggcattgagtggcgcagagccgggtttcatctggaattaactggatggaagggaaaataaagctatctagcgg

SEQ ID NO: 311910 - DNA, 747 bp, Homo sapiens
ggcacgaggaagcggcggtgcaggtttcttgccttgatgtactggagcaatcagatcacacggcggcttggagagtgagtgcaaggttttatgagtggaattagccctcagcagatgggggagccagaaggcagttggagtgggaagaacccagggaccatgggcgcctccaggctctataccctggtgctggtcctgcagcctcagcgagttctcctggcggccggtggaatggctttgggggcaaagtgcaagaaggagagaccatcgaggatggggctaggagggagctgcaggaggagagcggtctgacagtggacgccctgcacaaggtgggccagatcgtgtttgagttcgtgggcgagcctgagctcatggacgtgcatgtcttctgcacagacagcatccaggggacccccgtggagagcgacgaaatgcgcccatgctggttccagctggatcagatccccttcaaggacatgtggcccgacgacagctactggtttccactcctgcttcagaagaagaaattccacgggtacttcaagttccagggtcaggacaccatcctggactacacactccgcgaggtggacacggtctagcgggagcccagggcagcccctgggcaggagacgtggctgctgaacagccgcaaaccatcttcacctgggggcattgagtggcgcagagccgggtttcatctggaattaactggatggaagggaaaataaagctatctagcgg

SEQ ID NO: 311911 - DNA, 828 bp, Homo sapiens
ggtcagaggccacgcccccggaagcggcggtgcagaacccagggaccatgggcgcctccaggctctataccctggtgctggtcctgcagcctcagcgagttctcctgggcatgaaaaagcgaggcttcggggccggccggtggaatggctttgggggcaaagtgcaagaaggagagaccatcgaggatggggctaggagggagctgcaggaggagagcggtctgacagtggacgccctgcacaaggtgggccagatcgtgtttgagttcgtgggcgagcctgagctcatggacgtgcatgtcttctgcacagacagcatccaggggacccccgtggagagcgacgaaatgcgcccatgctggttccagctggatcagatccccttcaaggacatgtggcccgacgacagctactggtttccactcctgcttcagaagaagaaattccacgggtacttcaagttccagggtcaggacaccatcctggactacacactccgcgaggtggacacggtctagcgggagcccagggcagcccctgggcaggagacgtggctgctgaacagccgcaaaccatcttcacctgggggcattgagtggcgcagagccgggtttcatctggaattaactggatggaagggaaaataaagctatctagcgggggtttttttttttttttttggaaatggagtctctctctgttgcccaggctggagtgcaatggcacgatctcggctcacgtcaacctccgcctcccaggttcaagcgatcctcccatctcagcctcccgaagaggtgggattacaggcgcacattgccacacccaact

SEQ ID NO: 311912 - DNA, 775 bp, Homo sapiens
cccagagcaagcgtcccagggccccggcggtcgtaactaccgctgcatgggctctgatgctcagccgcggaaaagcaagtaaccgggaatgaaggaagtggggtcagtcccaaccctgccacgtgcgggtctcgagacggtggacaagtggctggactccactgggcctgggctgtcactggtacacagagggcactgggctagaactgcgttcctcccaccagaggctccacaccatctccgggcccctccccagagcctctcaaccaaaatcagtgtcttcaaagttcaagttgattctgaagctcagccagggagctgcaggaggagagcggtctgacagtggacgccctgcacaaggtgggccagatcgtgtttgagttcgtgggcgagcctgagctcatggacgtgcatgtcttctgcacagacagcatccaggggacccccgtggagagcgacgaaatgcgcccatgctggttccagctggatcagatccccttcaaggacatgtggcccgacgacagctactggtttccactcctgcttcagaagaagaaattccacgggtacttcaagttccagggtcaggacaccatcctggactacacactccgcgaggtggacacggtctagcgggagcccagggcagcccctgggcaggagacgtggctgctgaacagccgcaaaccatcttcacctgggggcattgagtggcgcagagccgggtttcatctggaattaactggatggaagggaaaataaagctatctagcgg

SEQ ID NO: 311913 - DNA, 990 bp, Homo sapiens
acgaaaagcgcgcgcggggattccaggagtcgtggtgaccagggaggggagccgggccagcgggcggcaggagactaggggagctgagccatgggcttgggggagagcggggccgggagctcgaaggagaccagaagagccgggggtttgggagagagacaaggagagcggggcggaggcttgggggagaccaggagtaaatcacaaaaatttactttggaaaccgtggcttctggcagaaacagatcagtgtcgggacaaagtacacgggcctggtgtgaaactaagccacaaacccatttaccctgtctgacctgcctccgccaccaggacccagtctcagtgaaatgggaaaggttcccttgtcctcctcgaagggcgtgcgatgaggatgtggctcacttcttcagtgccccgcttctcaagcctctaggggaacatacagacaggcaggctgaggggctcccaccccacggcagtgtctaggggtgaatgtttgcagctcctgaagccccagcaggcatgtgttagagggtgctctttcagtttagccttgtaggtggcttgtgttagtcagctgttagactccctgccttatcgcaaggacagagggctttctgtatccctaggtttcttgccttgatgtactggagcaatcagatcacacggcggcttggagaaacccagggaccatgggcgcctccaggctctataccctggtgctggtcctgcagcctcagcgagttctcctgggcatgaaaaagcgaggcttcggggccggccggtggaatggctttgggggcaaagtgcaagaaggagagaccatcgaggatggggctaggagtccctgcagtttaagctgaggaggcatcgcttaaatcagaccatttagaccaggcatggtggctcacacctgaaatcccagcactttgggaggccaaagcagaaggatcgcttgagcccaggagttcaggaccagcctgggcaaca

SEQ ID NO: 311914 - DNA, 318 bp, Homo sapiens
ggcacgaggaagcggcggtgcaggtttcttgccttgatgtactggagcaatcagatcacacggcggcttggagagtgagtgcaaggttttatgagtggaattagccctcagcagatgggggagccagaaggcagttggagtgggaagaacccagggaccatgggcgcctccaggctctataccctggtgctggtcctgcagcctcagcgagttctcctgggcatgaaaaagcgaggcttcggggcggcattgagtggcgcagagccgggtttcatctggaattaactggatggaagggaaaataaagctatctagcgg

SEQ ID NO: 311915 - DNA, 236 bp, Homo sapiens
agctcaagcccaactttaattagccatctgtatgaataaatgctgattccaggtccgtttcctctccagtccctgcagtttaagctgaggaggcatcgcttaaatcagaccatttagaccaggcatggtggctcacacctgaaatcccagcactttgggaggccaaagcagaaggatcgcttgagcccaggagttcaggaccagcctgggcaacatagcaagaccctgtctctaca

SEQ ID NO: 311916 - DNA, 903 bp, Homo sapiens
gctgtggggagcatgtcccgagaaggcgcaggaagaggcccaggccacgtgtcccgtgtggtcagcctggggaccagagttaaaaccagagctcctccttcaggaaacagatcatagaagcctgtggtttcatcctgtgttctcagagaagaggcaccaggctggaaagacatttctttgggcagacaggcccagagtatagggcccaggttcccagagcaagcgtcccagggccccggcggtcgtaactaccgctgcatgggctctgatgctcagccgcggaaaagcaagtaaccgggaatgaaggaagtggggtcagtcccaaccctgccacgtgcgggtctcgagacggtggacaagtggctggactccactgggcctgggctgtcactggtacacagagggcactgggctagaactgcgttcctcccaccagaggctccacaccatctccgggcccctccccagagcctctcaaccaaaatcagtgtcttcaaagttcaagttgattctgaagctcagccaggtcgggaccagataatgcattctaggggacatcctcctgggtctcccatccaccctggtggctccctgggctgtgtgtagatgcccagctcctcctccctgccatcgtgtgggcatggcaccatgccctgacggcctccctcccctgcccacctctgcccgcagggagctgcaggaggagagcggtctgacagtggacgccctgcacaaggtgggccagatcgtgtttgagttcgtgggcgagcctgagctcatggacgtgcatgtcttctgcacagacagcatccaggggacccccgtggagagcgacggtgagtctcacagggcctgctccccctccccactatgcgggtcccatctcctggctgggagaaaggc

SEQ ID NO: 311917 - DNA, 783 bp, Homo sapiens
acgaaaagcgcgcgcggggattccaggagtcgtggtttcttgccttgatgtactggagcaatcagatcacacggcggcttggagagtgagtgcaaggttttatgagtggaattagccctcagcagatgggggagccagaaggcagttggagtgggaagaacccagggaccatgggcgcctccaggctctataccctggtgctggtcctgcagcctcagcgagttctcctgggcatgaaaaagcgaggcttcggggccggccggtggaatggctttgggggcaaagtgcaagaaggagagaccatcgaggatggggctaggagggagctgcaggaggagagcggtctgacagtggacgccctgcacaaggtgggccagatcgtgtttgagttcgtgggcgagcctgagctcatggacgtgcatgtcttctgcacagacagcatccaggggacccccgtggagagcgacgaaatgcgcccatgctggttccagctggatcagatccccttcaaggacatgtggcccgacgacagctactggtttccactcctgcttcagaagaagaaattccacgggtacttcaagttccagggtcaggacaccatcctggactacacactccgcgaggtggacacggtctagcgggagcccagggcagcccctgggcaggagacgtggctgctgaacagccgcaaaccatcttcacctgggggcattgagtggcgcagagccgggtttcatctggaattaactggatggaagggaaaataaagctatctagcgg

SEQ ID NO: 311918 - DNA, 546 bp, Homo sapiens
ctagaggatccccgcatcacaacattgcaagacagcattcagggacccccgtggagagcgatgaaatgcgcccatgctggttccagctggatcagatccccttcaaggacatgtggcccgacgacagctactggtttccactcctgcttcagaagaagaaattccacgggtacttcaagttccagggtcaggacaccatcctggactacacactccgcgaggtggacacggtctagcgggagcccagggcagcccctgggcaggagacgtggctgctgaacagccgcaaaccatcttcacctgggggcattgagtggcgcagagccgggtttcatctggaattaactggatggaagggaaaataaagctatctagcgggggtttttttttttttttttggaaatggagtctctctctgttgcccaggctggagtgcaatggcacgatctcggctcacgtcaacctccgcctcccaggttcaagcgatcctcccatctcagcctcccgaagaggtgggattacaggcgcacattgccacacccaact

SEQ ID NO: 311919 - DNA, 1305 bp, Homo sapiens
acgaaaagcgcgcgcggggattccaggagtcgtggtgaccagggaggggagccgggccagcgggcggcaggagactaggggagctgagccatgggcttgggggagagcggggccgggagctcgaaggagaccagaagagccgggggtttgggagagagacaaggagagcggggcggaggcttgggggagaccaggagtaaatcacaaaaatttactttggaaaccgtggcttctggcagaaacagatcagtgtcgggacaaagtacacgggcctggtgtgaaactaagccacaaacccatttaccctgtctgacctgcctccgccaccaggacccagtctcagtgaaatgggaaaggttcccttgtcctcctcgaagggcgtgcgatgaggatgtggctcacttcttcagtgccccgcttctcaagcctctaggggaacatacagacaggcaggctgaggggctcccaccccacggcagtgtctaggggtgaatgtttgcagctcctgaagccccagcaggcatgtgttagagggtgctctttcagtttagccttgtaggtggcttgtgttagtcagctgttagactccctgccttatcgcaaggacagagggctttctgtatccctaggtttcttgccttgatgtactggagcaatcagatcacacggcggcttggagaaacccagggaccatgggcgcctccaggctctataccctggtgctggtcctgcagcctcagcgagttctcctgggcatgaaaaagcgaggcttcggggccggccggtggaatggctttgggggcaaagtgcaagaaggagagaccatcgaggatggggctaggagggagctgcaggaggagagcggtctgacagtggacgccctgcacaaggtgggccagatcgtgtttgagttcgtgggcgagcctgagctcatggacgtgcatgtcttctgcacagacagcatccaggggacccccgtggagagcgacgaaatgcgcccatgctggttccagctggatcagatccccttcaaggacatgtggcccgacgacagctactggtttccactcctgcttcagaagaagaaattccacgggtacttcaagttccagggtcaggacaccatcctggactacacactccgcgaggtggacacggtctagcgggagcccagggcagcccctgggcaggagacgtggctgctgaacagccgcaaaccatcttcacctgggggcattgagtggcgcagagccgggtttcatctggaattaactggatggaagggaaaataaagctatctagcgg

SEQ ID NO: 311920 - DNA, 1473 bp, Homo sapiens
acgaaaagcgcgcgcggggattccaggagtcgtggtgaccagggaggggagccgggccagcgggcggcaggagactaggggagctgagccatgggcttgggggagagcggggccgggagctcgaaggagaccagaagagccgggggtttgggagagagacaaggagagcggggcggaggcttgggggagaccaggagtaaatcacaaaaatttactttggaaaccgtggcttctggcagaaacagatcagtgtcgggacaaagtacacgggcctggtgtgaaactaagccacaaacccatttaccctgtctgacctgcctccgccaccaggacccagtctcagtgaaatgggaaaggttcccttgtcctcctcgaagggcgtgcgatgaggatgtggctcacttcttcagtgccccgcttctcaagcctctaggggaacatacagacaggcaggctgaggggctcccaccccacggcagtgtctaggggtgaatgtttgcagctcctgaagccccagcaggcatgtgttagagggtgctctttcagtttagccttgtaggtggcttgtgttagtcagctgttagactccctgccttatcgcaaggacagagggctttctgtatccctaggtttcttgccttgatgtactggagcaatcagatcacacggcggcttggagaaacccagggaccatgggcgcctccaggctctataccctggtgctggtcctgcagcctcagcgagttctcctgggcatgaaaaagcgaggcttcggggccggccggtggaatggctttgggggcaaagtgcaagaaggagagaccatcgaggatggggctaggagggagctgcaggaggagagcggtctgacagtggacgccctgcacaaggtgggccagatcgtgtttgagttcgtgggcgagcctgagctcatggacgtgcatgtcttctgcacagacagcatccaggggacccccgtggagagcgacgaaatgcgcccatgctggttccagctggatcagatccccttcaaggacatgtggcccgacgacagctactggtttccactcctgcttcagaagaagaaattccacgggtacttcaagttccagggtcaggacaccatcctggactacacactccgcgaggtggacacggtctagcgggagcccagggcagcccctgggcaggagacgtggctgctgaacagccgcaaaccatcttcacctgggggcattgagtggcgcagagccgggtttcatctggaattaactggatggaagggaaaataaagctatctagcgggggtttttttttttttttttggaaatggagtctctctctgttgcccaggctggagtgcaatggcacgatctcggctcacgtcaacctccgcctcccaggttcaagcgatcctcccatctcagcctcccgaagaggtgggattacaggcgcacattgccacacccaact

SEQ ID NO: 311921 - DNA, 1331 bp, Homo sapiens
acgaaaagcgcgcgcggggattccaggagtcgtggtgaccagggaggggagccgggccagcgggcggcaggagactaggggagctgagccatgggcttgggggagagcggggccgggagctcgaaggagaccagaagagccgggggtttgggagagagacaaggagagcggggcggaggcttgggggagaccaggagtaaatcacaaaaatttactttggaaaccgtggcttctggcagaaacagatcagtgtcgggacaaagtacacgggcctggtgtgaaactaagccacaaacccatttaccctgtctgacctgcctccgccaccaggacccagtctcagtgaaatgggaaaggttcccttgtcctcctcgaagggcgtgcgatgaggatgtggctcacttcttcagtgccccgcttctcaagcctctaggggaacatacagacaggcaggctgaggggctcccaccccacggcagtgtctaggggtgaatgtttgcagctcctgaagccccagcaggcatgtgttagagggtgctctttcagtttagccttgtaggtggcttgtgttagtcagctgttagactccctgccttatcgcaaggacagagggctttctgtatccctaggtttcttgccttgatgtactggagcaatcagatcacacggcggcttggagaaacccagggaccatgggcgcctccaggctctataccctggtgctggtcctgcagcctcagcgagttctcctgggcatgaaaaagcgaggcttcggggccggccggtggaatggctttgggggcaaagtgcaagaaggagagaccatcgaggatggggctaggagggagctgcaggaggagagcggtctgacagtggacgccctgcacaaggtgggccagatcgtgtttgagttcgtgggcgagcctgagctcatggacgtgcatgtcttctgcacagacagcatccaggggacccccgtggagagcgacgtgcctcctcttcccccattggtacagaaatgcgcccatgctggttccagctggatcagatccccttcaaggacatgtggcccgacgacagctactggtttccactcctgcttcagaagaagaaattccacgggtacttcaagttccagggtcaggacaccatcctggactacacactccgcgaggtggacacggtctagcgggagcccagggcagcccctgggcaggagacgtggctgctgaacagccgcaaaccatcttcacctgggggcattgagtggcgcagagccgggtttcatctggaattaactggatggaagggaaaataaagctatctagcgg

SEQ ID NO: 311922 - DNA, 1616 bp, Homo sapiens
  misc_feature (1532)..(1532): n is a, c, g, or t
  misc_feature (1559)..(1559): n is a, c, g, or t
atggtggtgcatgcctgtagtcccagctacttgggaggctgaggcaggagaatggcatgaacccaggaagcggaggttgcagtgagccaagatcgcgccattgcactccagcctgggtaacagaacaagactccgtctcaaaaaataaataaataaattccaaatgtaaggtggaaatggcagattataacttcatttcccccatttttaacttagaaaaaacaaagtccttaattttcaagtattagccccccagaagtttcagcagatagctggactcttgaataatgatttcttttgatatgtctgactttgctatttaaagtctcctttcccagccctcagtcttaaaactcagttttattactgacggatttaacagactcttacttgaaaattgtccaattatcagtactgaaaattagatttggaaaatgaaaaaataataaaatcgcatcaagaaaacttattaccttagagattcccaattgatatctgtacccctgatccaagtaaggcctttatgaatgtattttatatttcctaaagaaatagggaatatgccatcagtgtaatcacctctattcacagtcatttaatttgaaaatctaactcatgtctcttgaattagacattccaattgggataggtagagtcatgttaaaacaatagaatagcaactgccatattggtagtttcactgctcaatatgatttctaataagagcagagctttattggaagctaaaactcatttttctccatagatgattctaacagtttaataaaaaagtataattatactttaagtgtcaacagattttgagtctagaagcaaatttcattttccttgtgttatatctaatatccattgacatgggtaagaaaactaattatgtctttttagtatgatgaaatgtgggcccagagtattggaaagaaagcaatagccctattcagtgtccactaggatggatattgcagaaggcatgagtttgtccttttttcccccttaccttaaataacacttcaatagctaactttttccaaaatatccatttaggccatctcttatttcttaaagccaaatatttcgtccccagtcttaactctgagttgcaagatcaggctggttggaagaatctttatatttagaaataggatggtgagtggtttgtttattctcttgtaaaattcctttttcagagacataactgcagggagagtcccaagagaactgaagaactgggattatatcattaaacacatttgtgttgtaggaatttggggagttttcattttgaactgataagatattagacataaacccttgttccagcccacatgtgtcatccctgtgtacaaaagctctctggattcttttttttttttgagacggagtttcgctcttatcgtccaggctggagtgagtgtagtggcttgatctcagctcactgcaacctttgcctcccgggctcaggagaatggcatgaacccaggaagcggaggttgcagtgagccaagatcgcgccnttgcactccagcctgagtaacagaacnaagctccgtctcaaaaaataaataaataaattccaaatgtaaggtggaaatggcaga

SEQ ID NO: 311923 - DNA, 388 bp, Homo sapiens
tgatcgagctcggtaccatcttattaaaattaaggtctgatctagatgtacaattagagtttaggttggaaattactttaaaatgtgttttttggggatgtcttcaatctctgtgtaaatacccacatgcttatgcattgtaaaccaagtgtgtattcctgtgtatgaatttgtagaactgatttctgcttcaagagaagctgcacctttaattttataaggtcccctccacctgtaaccctataaatgtctgtaaataaaacactaaaatttttaataaggatcccctaggttgaaatgggcacagaaatttcactttccttagctgcattctagtagcttggccaagttatctcgtaattctgttagttcaaatatctttccatcc

SEQ ID NO: 311924 - DNA, 3220 bp, Homo sapiens
ttccagtcagataatggcattgtacagacatgggaaacaaccaatttttttgtttttcagttgttgctatgaatgattttgagcctttttttttaagcttggcaaacatcccagctaatcaaaatagtcatattcctgagaagtaggaaactaaaacttcttttcatataattgttagaaggtttgtttcccaaactaccatagttacaaaggtgaaaagccaaattttaggaacagaatcaaaagaataaaaatctgtgaagagatcctactactcttccttctatgttttggttttggtttctattgtccctatcatttcagcaagtggaacagcagcaagtttttcagtgcatatgctgcacaagaacaaaatataaatctgtatggcaccaaaaatcaaagtgaaaaccaaaccaaaaacccaaacaccctatgtaactatcggaggcatatacgtggtataaatgactgtagctgtgatacacacatggctacttgtcacatcactttccataattatttactgcaaaatgattgagaggcttttggtgcaggcagccgttaacctcctgcttcctttgttacctctggattactttgcagtaaattgcaggtcttttaagagatttaagcttcagttttctcaaaacaaaacaattatcctgtcttatctgaagatgcagggttgtgggcaaaagaggctggttataataatgccctcatattgagtggtctgtaaacggctgcacacttcaggcactgtagttgctgaagatgctttgttaaatgtgaccttgactggctttacaggggtgtagaatgtaatctacacaaggtgactttgcatctatcttgctcttgaggtggatgaaattgagaagctggagtgtgtaagccatgcacataagtattcttcactgtaaattttgttttcatttttaacccaattatggtactttatccaatgcacaactgatctctcagtagatattcatttgaaaatagtgtggccttgatcagtgagaaagggaaggagaaaagtgacttttttgcttatgtagaaatgactcatttgctgagagtttgtctttctgcagcactcttggtataatgttagtgatcggtctcctttttgattggggaaagttaatgtttttgaccctggagttaattcagttgagttatcttatatttttaggaagtatcagaattgctctgatgaataacaaagttgactgttttgatgtccaatctcaggttttagaatatagtggtgtaaagtcccactatttttaattcttaaaacaactttaatttcgtacaccctaaaagtcacatgcataaggcctgttcagagagcagagcctccatctttttgctccttttctactttgtacttcacttgaaaaaatatcaagtgactttacattgtatatttccattgtaaccctgacatttctcaaagataaagcactttttgatcatgaaatacatgaaatctttgtgtgatgtggatcatagtttctcaggctcccttagataattgcttatgaatattgttctaactctgtgtaagaagagtagaaatctttgctaatgttagaaggtttgtattattgatccagaatgcattttgctagtttccaatggatgggagagtaaataatgctgcattcacaatttaataagttactttcccttgagccttaaggtaactttttcttttctgtcaactacagcactgaagttatagtaagtgaatgagattatcagttttcagggttggttttagagtactgtaaatcaattagctgtcttcctaaagagttacaactcccattcagtatactggataatgggtgtgtgggtggggctggggagggcgggagatagtttgtagaaaagaaaaaagaaaaaaaaaaaaacacatttaccttaagaaaatacagacaaaaaagaataaagtatgtgtcatatgctccatcacgcctagcctactctctgaatttctaaaagtcagtaggttgaccaaaaagtctagaaactggctttaagtcagtatgggacgtacttataaagagtccatggttttgcacgtttcggtagacaagtaaatctgagttatttttcaatgacttaccaatatttgaatagtaactaagatcgtcagtgtatctggacttctttttttgaagttctaaaacaattatagtagggatttattattttgggcctccatccagatgtttttccaagatcatttttaaaattcatttgtcttctgtttccagataacatactttccgttctataggaatcttcactgccaatcatagtatctaccagtggctttcttagactattcactccaaagctgggactgatgtcctgccagtagagaatctacagaaataatttgaatgaattaaaaccaaatcttgatagcaggagacagcttcctgatctagatgtacaattagagtttaggttggaaattactttaaaatgtgttttttggggatgtcttcaatctctgtgtaaatacccacatgcttatgcattgtaaaccaagtgtgtattcctgtgtatgaatttgtagaactgatttctgcttcaagagaagctgcacctttaattttataaggtcccctccacctgtaaccctataaatgtctgtaaataaaacactaaaatttgtagtgataggatcaatttgggaatatctgctgagagaccaaaaagttcatttttttaagtaccttggttaaagagtaaagattattcctcttattttttaaagaagaatgcactttaacaaacatagagctgcatgggcaattcaaacaaatctgtgaagtgcagtacccattcagaaatcacacttcctgaaaaccgttcaaaagcagagtccagacgggctgttgatctcactgcctgtaggttgaagctcagattctgatcaattttgagaggagcagggctgcttcaaaagagcaatgtgaatacagtcagaagcttcagactggtctgtaaaaatggcgggtcccgtatttaccactaactagcaaaactgacagaaaaactcacagagaaaaaatgtaagaatccttcctgctggtgtgcactccttacaatagacttttgcaaatggagttttacagtctatatttaaaaaaaattgtatgtttgtaacaaataaagtatgcagaaaagtgaa

SEQ ID NO: 311925 - DNA, 3166 bp, Homo sapiens
ttccagtcagataatggcattgtacagacatgggaaacaaccaatttttttgtttttcagttgttgctatgaatgattttgagcctttttttttaagcttggcaaacatcccagctaatcaaaatagtcatattcctgagaagtaggaaactaaaacttcttttcatataattgttagaaggtttgtttcccaaactaccatagttacaaaggtgaaaagccaaattttaggaacagaatcaaaagaataaaaatctgtgaagagatcctactactcttccttctatgttttggttttggtttctattgtccctatcatttcagcaagtggaacagcagcaagtttttcagtgcatatgctgcacaagaacaaaatataaatctgtatggcaccaaaaatcaaagtgaaaaccaaaccaaaaacccaaacaccctatgtaactatcggaggcatatacgtggtataaatgactgtagctgtgatacacacatggctacttgtcacatcactttccataattatttactgcaaaatgattgagaggcttttggtgcaggcagccgttaacctcctgcttcctttgttacctctggattactttgcagtaaattgcaggtcttttaagagatttaagcttcagttttctcaaaacaaaacaattatcctgtcttatctgaagatgcagggttgtgggcaaaagaggctggttataataatgccctcatattgagtggtctgtaaacggctgcacacttcaggcactgtagttgctgaagatgctttgttaaatgtgaccttgactggctttacaggggtgtagaatgtaatctacacaaggtgactttgcatctatcttgctcttgaggtggatgaaattgagaagctggagtgtgtaagccatgcacataagtattcttcactgtaaattttgttttcatttttaacccaattatggtactttatccaatgcacaactgatctctcagtagatattcatttgaaaatagtgtggccttgatcagtgagaaagggaaggagaaaagtgacttttttgcttatgtagaaatgactcatttgctgagagtttgtctttctgcagcactcttggtataatgttagtgatcggtctcctttttgattggggaaagttaatgtttttgaccctggagttaattcagttgagttatcttatatttttaggaagtatcagaattgctctgatgaataacaaagttgactgttttgatgtccaatctcaggttttagaatatagtggtgtaaagtcccactatttttaattcttaaaacaactttaatttcgtacaccctaaaatctactttgtacttcacttgaaaaaatatcaagtgactttacattgtatatttccattgtaaccctgacatttctcaaagataaagcactttttgatcatgaaatacatgaaatctttgtgtgatgtggatcatagtttctcaggctcccttagataattgcttatgaatattgttctaactctgtgtaagaagagtagaaatctttgctaatgttagaaggtttgtattattgatccagaatgcattttgctagtttccaatggatgggagagtaaataatgctgcattcacaatttaataagttactttcccttgagccttaaggtaactttttcttttctgtcaactacagcactgaagttatagtaagtgaatgagattatcagttttcagggttggttttagagtactgtaaatcaattagctgtcttcctaaagagttacaactcccattcagtatactggataatgggtgtgtgggtggggctggggagggcgggagatagtttgtagaaaagaaaaaagaaaaaaaaaaaaacacatttaccttaagaaaatacagacaaaaaagaataaagtatgtgtcatatgctccatcacgcctagcctactctctgaatttctaaaagtcagtaggttgaccaaaaagtctagaaactggctttaagtcagtatgggacgtacttataaagagtccatggttttgcacgtttcggtagacaagtaaatctgagttatttttcaatgacttaccaatatttgaatagtaactaagatcgtcagtgtatctggacttctttttttgaagttctaaaacaattatagtagggatttattattttgggcctccatccagatgtttttccaagatcatttttaaaattcatttgtcttctgtttccagataacatactttccgttctataggaatcttcactgccaatcatagtatctaccagtggctttcttagactattcactccaaagctgggactgatgtcctgccagtagagaatctacagaaataatttgaatgaattaaaaccaaatcttgatagcaggagacagcttcctgatctagatgtacaattagagtttaggttggaaattactttaaaatgtgttttttggggatgtcttcaatctctgtgtaaatacccacatgcttatgcattgtaaaccaagtgtgtattcctgtgtatgaatttgtagaactgatttctgcttcaagagaagctgcacctttaattttataaggtcccctccacctgtaaccctataaatgtctgtaaataaaacactaaaatttgtagtgataggatcaatttgggaatatctgctgagagaccaaaaagttcatttttttaagtaccttggttaaagagtaaagattattcctcttattttttaaagaagaatgcactttaacaaacatagagctgcatgggcaattcaaacaaatctgtgaagtgcagtacccattcagaaatcacacttcctgaaaaccgttcaaaagcagagtccagacgggctgttgatctcactgcctgtaggttgaagctcagattctgatcaattttgagaggagcagggctgcttcaaaagagcaatgtgaatacagtcagaagcttcagactggtctgtaaaaatggcgggtcccgtatttaccactaactagcaaaactgacagaaaaactcacagagaaaaaatgtaagaatccttcctgctggtgtgcactccttacaatagacttttgcaaatggagttttacagtctatatttaaaaaaaattgtatgtttgtaacaaataaagtatgcagaaaagtgaa

SEQ ID NO: 311926 - DNA, 2901 bp, Homo sapiens
atggtggtgcatgcctgtagtcccagctacttgggaggctgaggcaggagaatggcatgaacccaggaagcggaggttgcagtgagccaagatcgcgccattgcactccagcctgggtaacagaacaagactccgtctcaaaaaataaataaataaattccaaatgtaaggtggaaatggcagattataacttcatttcccccatttttaacttagaaaaaacaaagtccttaattttcaagtattagccccccagaagtttcagcagatagctggactcttgaataatgatttcttttgatatgtctgactttgctatttaaagtctcctttcccagccctcagtcttaaaactcagttttattactgacggatttaacagactcttacttgaaaattgtccaattatcagtactgaaaattagatttggaaaatgaaaaaataataaaatcgcatcaagaaaacttattaccttagagattcccaattgatatctgtacccctgatccaagtaaggcctttatgaatgtattttatatttcctaaagaaatagggaatatgccatcagtgtaatcacctctattcacagtcatttaatttgaaaatctaactcatgtctcttgaattagacattccaattgggataggtagagtcatgttaaaacaatagaatagcaactgccatattggtagtttcactgctcaatatgatttctaataagagcagagctttattggaagctaaaactcatttttctccatagatgattctaacagtttaataaaaaagtataattatactttaagtgtcaacagattttgagtctagaagcaaatttcattttccttgtgttatatctaatatccattgacatgggtaagaaaactaattatgtctttttagtatgatgaaatgtgggcccagagtattggaaagaaagcaatagccctattcagtgtccactaggatggatattgcagaaggcatgagtttgtccttttttcccccttaccttaaataacacttcaatagctaactttttccaaaatatccatttaggccatctcttatttcttaaagccaaatatttcgtccccagtcttaactctgagttgcaagatcaggctggttggaagaatctttatatttagaaataggatggtgagtggtttgtttattctcttgtaaaattcctttttcagagacataactgcagggagagtcccaagagaactgaagaactgggattatatcattaaacacatttgtgttgtaggaatttggggagttttcattttgaactgataagatattagacataaacccttgttccagcccacatgtgtcatccctgtgtacaaaagctctctggattcttttttttttttgagacggagtttcgctcttatcgtccaggctggagtgagtgtagtggcttgatctcagctcactgcaacctttgcctcccgggctcaagcgattctcctgcctcagcctcccaagtagctgggattacaagcatgtgccaccatgcccagctaattttttgtatttttagtagagacggggtttcaccatgttggccaggctggtctcgaactcctgacctcaagtgatctgcccgcctcagcttcccaaaatgctggaattacaggcatgagccatcacgcctagcctactctctgaatttctaaaagtcagtaggttgaccaaaaagtctagaaactggctttaagtcagtatgggacgtacttataaagagtccatggttttgcacgtttcggtagacaagtaaatctgagttatttttcaatgacttaccaatatttgaatagtaactaagatcgtcagtgtatctggacttctttttttgaagttctaaaacaattatagtagggatttattattttgggcctccatccagatgtttttccaagatcatttttaaaattcatttgtcttctgtttccagataacatactttccgttctataggaatcttcactgccaatcatagtatctaccagtggctttcttagactattcactccaaagctgggactgatgtcctgccagtagagaatctacagaaataatttgaatgaattaaaaccaaatcttgatagcaggagacagcttcctgatctagatgtacaattagagtttaggttggaaattactttaaaatgtgttttttggggatgtcttcaatctctgtgtaaatacccacatgcttatgcattgtaaaccaagtgtgtattcctgtgtatgaatttgtagaactgatttctgcttcaagagaagctgcacctttaattttataaggtcccctccacctgtaaccctataaatgtctgtaaataaaacactaaaatttgtagtgataggatcaatttgggaatatctgctgagagaccaaaaagttcatttttttaagtaccttggttaaagagtaaagattattcctcttattttttaaagaagaatgcactttaacaaacatagagctgcatgggcaattcaaacaaatctgtgaagtgcagtacccattcagaaatcacacttcctgaaaaccgttcaaaagcagagtccagacgggctgttgatctcactgcctgtaggttgaagctcagattctgatcaattttgagaggagcagggctgcttcaaaagagcaatgtgaatacagtcagaagcttcagactggtctgtaaaaatggcgggtcccgtatttaccactaactagcaaaactgacagaaaaactcacagagaaaaaatgtaagaatccttcctgctggtgtgcactccttacaatagacttttgcaaatggagttttacagtctatatttaaaaaaaattgtatgtttgtaacaaataaagtatgcagaaaagtgaa

SEQ ID NO: 311927 - DNA, 3440 bp, Homo sapiens
ttccagtcagataatggcattgtacagacatgggaaacaaccaatttttttgtttttcagttgttgctatgaatgattttgagcctttttttttaagcttggcaaacatcccagctaatcaaaatagtcatattcctgagaagtaggaaactaaaacttcttttcatataattgttagaaggtttgtttcccaaactaccatagttacaaaggtgaaaagccaaattttaggaacagaatcaaaagaataaaaatctgtgaagagatcctactactcttccttctatgttttggttttggtttctattgtccctatcatttcagcaagtggaacagcagcaagtttttcagtgcatatgctgcacaagaacaaaatataaatctgtatggcaccaaaaatcaaagtgaaaaccaaaccaaaaacccaaacaccctatgtaactatcggaggcatatacgtggtataaatgactgtagctgtgatacacacatggctacttgtcacatcactttccataattatttactgcaaaatgattgagaggcttttggtgcaggcagccgttaacctcctgcttcctttgttacctctggattactttgcagtaaattgcaggtcttttaagagatttaagcttcagttttctcaaaacaaaacaattatcctgtcttatctgaagatgcagggttgtgggcaaaagaggctggttataataatgccctcatattgagtggtctgtaaacggctgcacacttcaggcactgtagttgctgaagatgctttgttaaatgtgaccttgactggctttacaggggtgtagaatgtaatctacacaaggtgactttgcatctatcttgctcttgaggtggatgaaattgagaagctggagtgtgtaagccatgcacataagtattcttcactgtaaattttgttttcatttttaacccaattatggtactttatccaatgcacaactgatctctcagtagatattcatttgaaaatagtgtggccttgatcagtgagaaagggaaggagaaaagtgacttttttgcttatgtagaaatgactcatttgctgagagtttgtctttctgcagcactcttggtataatgttagtgatcggtctcctttttgattggggaaagttaatgtttttgaccctggagttaattcagttgagttatcttatatttttaggaagtatcagaattgctctgatgaataacaaagttgactgttttgatgtccaatctcaggttttagaatatagtggtgtaaagtcccactatttttaattcttaaaacaactttaatttcgtacaccctaaaagtcacatgcataaggcctgttcagagagcagagcctccatctttttgctccttttctactttgtacttcacttgaaaaaatatcaagtgactttacattgtatatttccattgtaaccctgacatttctcaaagataaagcactttttgatcatgaaatacatgaaatctttgtgtgatgtggatcatagtttctcaggctcccttagataattgcttatgaatattgttctaactctgtgtaagaagagtagaaatctttgctaatgttagaaggtttgtattattgatccagaatgcattttgctagtttccaatggatgggagagtaaataatgctgcattcacaatttaataagttactttcccttgagccttaaggtaactttttcttttctgtcaactacagcactgaagttatagtaagtgaatgagattatcagttttcagggttggttttagagtactgtaaatcaattagctgtcttcctaaagagttacaactcccattcagtatactggataatgggtgtgtgggtggggctggggagggcgggagatagtttgtagaaaagaaaaaagaaaaaaaaaaaaacacatttaccttaagaaaatacagacaaaaaagaataaagtatgtgtcatatgctccatcacgcctagcctactctctgaatttctaaaagtcagtaggttgaccaaaaagtctagaaactggctttaagtcagtatgggacgtacttataaagagtccatggttttgcacgtttcggtagacaagtaaatctgagttatttttcaatgacttaccaatatttgaatagtaactaagatcgtcagtgtatctggacttctttttttgaagttctaaaacaattatagtagggatttattattttgggcctccatccagatgtttttccaagatcatttttaaaattcatttgtcttctgtttccagataacatactttccgttctataggaatcttcactgccaatcatagtatctaccagtggctttcttagactattcactccaaagctgggactgatgtcctgccagtagagaatctacagaaataatttgaatgaattaaaaccaaatcttgatagcaggagacagcttcctgatctagatgtacaattagagtttaggttggaaattactttaaaatgtgttttttggggatgtcttcaatctctgtgtaaatacccacatgcttatgcattgtaaaccaagtgtgtattcctgtgtatgaatttgtagaactgatttctgcttcaagagaagctgcacctttaattttataaggtcccctccacctgtaaccctataaatgtctgtaaataaaacactaaaatttgtagtgataggatcaatttgggaatatctgctgagagaccaaaaagttcatttttttaagtaccttggttaaagagtaaagattattcctcttattttttaaagaagaatgcactttaacaaacatagagctgcatgggcaattcaaacaaatctgtgaagtgcagtacccattcagaaatcacacttcctgaaaaccgttcaaaagcagagtccagacgggctgttgatctcactgcctgtaggttgaagctcagattctgatcaattttgagaggagcagggctgcttcaaaagagcaatgtgaatacagtcagaagcttcagactggtctgtaaaaatggcgggtcccgtatttaccactaactagcaaaactgacagaaaaactcacagagaaaaaatgtaagaatccttcctgctggtgtgcactccttacaatagacttttgcaaatggagttttacagtctatatttaaaaaaaattgtatgtttgtaacaaataaagtatgcagaaaagtgaaaaaaaaaaaaagagggggcgcttaaaatcccgcagggccagtagcgcacccaggcttggtaagggcctatgagagcgttaaacagacagggcgcctaaacggacgaagcgtctggattggcgaccaccggtgggctgacaccccaacgcgaaactcagatgtaacgctgggagtagtaatcacaaacacacgaacgccacccggcgagcatcacaagcac

SEQ ID NO: 311928 - DNA, 939 bp, Homo sapiens
tatctctaacattataccaagagtgctgcagaaagacaaactctcagcaaatgagtcatttctacataagcaaaaaagtcacttttctccttccctttctcactgatgtcctgccagtagagaatctacagaaataatttgaatgaattaaaaccaaatcttgatagcaggagacagcttcctgatctagatgtacaattagagtttaggttggaaattactttaaaatgtgttttttggggatgtcttcaatctctgtgtaaatacccacatgcttatgcattgtaaaccaagtgtgtattcctgtgtatgaatttgtagaactgatttctgcttcaagagaagctgcacctttaattttataaggtcccctccacctgtaaccctataaatgtctgtaaataaaacactaaaatttgtagtgataggatcaatttgggaatatctgctgagagaccaaaaagttcatttttttaagtaccttggttaaagagtaaagattattcctcttattttttaaagaagaatgcactttaacaaacatagagctgcatgggcaattcaaacaaatctgtgaagtgcagtacccattcagaaatcacacttcctgaaaaccgttcaaaagcagagtccagacgggctgttgatctcactgcctgtaggttgaagctcagattctgatcaattttgagaggagcagggctgcttcaaaagagcaatgtgaatacagtcagaagcttcagactggtctgtaaaaatggcgggtcccgtatttaccactaactagcaaaactgacagaaaaactcacagagaaaaaatgtaagaatccttcctgctggtgtgcactccttacaatagacttttgcaaatggagttttacagtctatatttaaaaaaaattgtatgtttgtaacaaataaagtatgcagaaaagtgaa

SEQ ID NO: 311929 - DNA, 794 bp, Homo sapiens
tgatcgagctcggtaccatcttattaaaattaaggtctgatctagatgtacaattagagtttaggttggaaattactttaaaatgtgttttttggggatgtcttcaatctctgtgtaaatacccacatgcttatgcattgtaaaccaagtgtgtattcctgtgtatgaatttgtagaactgatttctgcttcaagagaagctgcacctttaattttataaggtcccctccacctgtaaccctataaatgtctgtaaataaaacactaaaatttgtagtgataggatcaatttgggaatatctgctgagagaccaaaaagttcatttttttaagtaccttggttaaagagtaaagattattcctcttattttttaaagaagaatgcactttaacaaacatagagctgcatgggcaattcaaacaaatctgtgaagtgcagtacccattcagaaatcacacttcctgaaaaccgttcaaaagcagagtccagacgggctgttgatctcactgcctgtaggttgaagctcagattctgatcaattttgagaggagcagggctgcttcaaaagagcaatgtgaatacagtcagaagcttcagactggtctgtaaaaatggcgggtcccgtatttaccactaactagcaaaactgacagaaaaactcacagagaaaaaatgtaagaatccttcctgctggtgtgcactccttacaatagacttttgcaaatggagttttacagtctatatttaaaaaaaattgtatgtttgtaacaaataaagtatgcagaaaagtgaa

SEQ ID NO: 311930 - DNA, 3006 bp, Homo sapiens
ttccagtcagataatggcattgtacagacatgggaaacaaccaatttttttgtttttcagttgttgctatgaatgattttgagcctttttttttaagcttggcaaacatcccagctaatcaaaatagtcatattcctgagaagtaggaaactaaaacttcttttcatataattgttagaaggtttgtttcccaaactaccatagttacaaaggtgaaaagccaaattttaggaacagaatcaaaagaataaaaatctgtgaagagatcctactactcttccttctatgttttggttttggtttctattgtccctatcatttcagcaagtggaacagcagcaagtttttcagtgcatatgctgcacaagaacaaaatataaatctgtatggcaccaaaaatcaaagtgaaaaccaaaccaaaaacccaaacaccctatgtaactatcggaggcatatacgtggtataaatgactgtagctgtgatacacacatggctacttgtcacatcactttccataattatttactgcaaaatgattgagaggcttttggtgcaggcagccgttaacctcctgcttcctttgttacctctggattactttgcagtaaattgcaggtcttttaagagatttaagcttcagttttctcaaaacaaaacaattatcctgtcttatctgaagatgcagggttgtgggcaaaagaggctggttataataatgccctcatattgagtggtctgtaaacggctgcacacttcaggcactgtagttgctgaagatgctttgttaaatgtgaccttgactggctttacaggggtgtagaatgtaatctacacaaggtgactttgcatctatcttgctcttgaggtggatgaaattgagaagctggagtgtgtaagccatgcacataagtattcttcactgtaaattttgttttcatttttaacccaattatggtactttatccaatgcacaactgatctctcagtagatattcatttgaaaatagtgtggccttgatcagtgagaaagggaaggagaaaagtgacttttttgcttatgtagaaatgactcatttgctgagagtttgtctttctgcagcactcttggtataatgttagtgatcggtctcctttttgattggggaaagttaatgtttttgaccctggagttaattcagttgagttatcttatatttttaggaagtatcagaattgctctgatgaataacaaagttgactgttttgatgtccaatctcaggttttagaatatagtggtgtaaagtcccactatttttaattcttaaaacaactttaatttcgtacaccctaaaagtcacatgcataaggcctgttcagagagcagagcctccatctttttgctccttttctactttgtacttcacttgaaaaaatatcaagtgactttacattgtatatttccattgtaaccctgacatttctcaaagataaagcactttttgatcatgaaatacatgaaatctttgtgtgatgtggatcatagtttctcaggctcccttagataattgcttatgaatattgttctaactctgtgtaagaagagtagaaatctttgctaatgttagaaggtttgtattattgatccagaatgcattttgctagtttccaatggatgggagagtaaataatgctgcattcacaatttaataagttactttcccttgagccttaaggtaactttttcttttctgtcaactacagcactgaagttatagtaagtgaatgagattatcagttttcagggttggttttagagtactgtaaatcaattagctgtcttcctaaagagttacaactcccattcagtatactggataatgggtgtgtgggtggggctggggagggcgggagatagtttgtagaaaagaaaaaagaaaaaaaaaaaaacacatttaccttaagaaaatacagacaaaaaagaataaagtatgtgtcatatgctccatcacgcctagcctactctctgaatttctaaaagtcagtaggttgaccaaaaagtctagaaactggctttaagtcagtatgggacgtacttataaagagtccatggttttgcacgtttcggtagacaagtaaatctgagttatttttcaatgacttaccaatatttgaatagtaactaagatcgtcagtgtatctggacttctttttttgaagttctaaaacaattatagtagggatttattattttgggcctccatccagatgtttttccaagatcatttttaaaattcatttgtcttctgtttccagataacatactttccgttctataggaatcttcactgccaatcatagtatctaccagtggctttcttagactattcactccaaagctgggactgatgtcctgccagtagagaatctacagaaataatttgaatgaattaaaaccaaatcttgatagcaggagacagcttcctgatctagatgtacaattagagtttaggttggaaattactttaaaatgtgttttttggggatgtcttcaatctctgtgtaaatacccacatgcttatgcattgtaaaccaagtgtgtattcctgtgtatgaatttgtagaactgatttctgcttcaagagaagctgcacctttaattttataaggtcccctccacctgtaaccctataaatgtctgtaaataaaacactaaaatttgtagtgataggatcaatttgggaatatctgctgagagaccaaaaagttcatttttttaagtaccttggttaaagagtaaagattattcctcttattttttaaagaagaatgcactttaacaaacatagagctgcatgggcaattcaaacaaatctgtgaagtgcagtacccattcagaaatcacacttcctgaaaaccgttcaaaagcagagtccagacgggctgttgatctcactgcctgtaggttgaagctcagattctgatcaattttgagagggccagtacatcaagcaggggatctctagag

SEQ ID NO: 311931 - DNA, 607 bp, Homo sapiens
cttcctctgactgtgtcttgatttcctattctgagaggctattgctcagcggtttccgtggcaacagtaaagcgtgggaattacagataaattaaaactgtggaacccctttcctcggctgccgccaaggtgttcggtccttccgaggaagctaaggccgcgttggggtgagaccctcacttcatccgagtcattcttatagaagagcatcagaggaagataaaaaagaatcctcaatgtcaggcccctgagcccaagctaagccatcataaccctgtgacctgcacatatacatccagatggcctgaagcaactgaagaaccataaacgtgaaatagccagttcctgccttaactgatgacattccaccattgtgatttgttcctgctccaccctaactgatcaattgatcttgtgacattccttctcctggacaatgagtctcaggagctcctcaccaagcaccttgttacccccacccctgcccacaagagaaaacgcacgttaactgtaatttttccactacctacccaaatcctataaaactgccccaccccatctccttttgctgactccaggtgattaaaaaactattgctcacacaaag

SEQ ID NO: 311932 - DNA, 750 bp, Homo sapiens
cttcctctgactgtgtcttgatttcctattctgagaggctattgctcagcggtttccgtggcaacagtaaagcgtgggaattacagataaattaaaactgtggaacccctttcctcggctgccgccaaggtgttcggtccttccgaggaagctaaggccgcgttggggtgagaccctcacttcatccggggactccaaccagcccgagcaacacggatcctgagggcgctcctggttaggcatttgccccactgggacgcctcgccagagcactgtatggcaggcccccatggaggatcaacgcagtggctgaacaccgggaaggaacgggcacttggagtctggacatctaaaacttgaatttctagtaaaccagcaccagcctgaagatcacattctcatcgaaaggtggaaagaagaaaaactcgagccagcctggaaggaccctaccttgtgttgctaaccaccaagactgctgttcgtacagcaaaaaaggatggactcgtcacaccagaatcaagaaagtgccaccccctccagagtcatgggccacagtcccagaggaaaaccctgccaaactaaagctacgaaaaatctcttttcatctattctattactcttctttctttcctcgtgctattgctgaccatctagttattaacataaccaagtcaatttcacctcaaactattgcatttaatgcttgccttgttataccctgtggggacttgccaagtcaaagacagctct

SEQ ID NO: 311933 - DNA, 890 bp, Homo sapiens
cttcctctgactgtgtcttgatttcctattctgagaggctattgctcagcggtttccgtggcaacagtaaagcgtgggaattacagataaattaaaactgtggaacccctttcctcggctgccgccaaggtgttcggtccttccgaggaagctaaggccgcgttggggtgagaccctcacttcatccgttttgtctgcagctcgatttcttggttccctgactgggaagcgaggtgaatggcggatggtcaaggcagctccttaggcggcttaaacctgccctgtggaacatccctgcaggggactccaaccagcccgagcaacacggatcctgagggcgctcctggttaggcatttgccccactgggacgcctcgccagagcactgtatggcaggcccccatggaggatcaacgcagtggctgaacaccgggaaggaacgggcacttggagtctggacatctaaaacttgagtcattcttatagaagagcatcagaggaagataaaaaagaatcctcaatgtcaggcccctgagcccaagctaagccatcataaccctgtgacctgcacatatacatccagatggcctgaagcaactgaagaaccataaacgtgaaatagccagttcctgccttaactgatgacattccaccattgtgatttgttcctgctccaccctaactgatcaattgatcttgtgacattccttctcctggacaatgagtctcaggagctcctcaccaagcaccttgttacccccacccctgcccacaagagaaaacgcacgttaactgtaatttttccactacctacccaaatcctataaaactgccccaccccatctccttttgctgactccaggtgattaaaaaactattgctcacacaaag

SEQ ID NO: 311934 - DNA, 874 bp, Homo sapiens
aatctggctctgcaactcagcagagtgcttctcggagaatgttagtctcctcatctgcaacatgggaaggcccctttcttccaaggagtttgtgaatatcacaaaagaatggctatgaaagtctttccttgtaaagggaatcttaccgtgatgtttctatacccagtccatggcccaacaccaggcggcagcacccaatcacggtacaaagaacccgaagcagattcctcaggacggggttctacccaaaccaaatcgagttcctcatccttctcccagggatgactgaactatggaagaaacaaagcactgttaaacagcatacaattcctgtcttcaaaaaagttatctcattaggtagatgagacttataatgaattaaaaggaatgaatacagatttggagatagtggttgttgtgatggaaaatcttaattgcgttttcttccaaaacagagtcattcttatagaagagcatcagaggaagataaaaaagaatcctcaatgtcaggcccctgagcccaagctaagccatcataaccctgtgacctgcacatatacatccagatggcctgaagcaactgaagaaccataaacgtgaaatagccagttcctgccttaactgatgacattccaccattgtgatttgttcctgctccaccctaactgatcaattgatcttgtgacattccttctcctggacaatgagtctcaggagctcctcaccaagcaccttgttacccccacccctgcccacaagagaaaacgcacgttaactgtaatttttccactacctacccaaatcctataaaactgccccaccccatctccttttgctgactccaggtgattaaaaaactattgctcacacaaag

SEQ ID NO: 311935 - DNA, 1033 bp, Homo sapiens
ggccccgacccggccggggagccccgtccctccccggaccgccttggccaatcagctccgctcctccttggccatccggctccgccccttcccggccagccccgccccgtcgtttctctccctgctttcctctgccgcatggtcctgggccgttggcgtcggaagcctgaagcatgggcgctgagtgggagctgggggccgaggctggcggttcgctgctgctgtgcgccgcgctgctggcggcgggctgcgccctgggcctgcgcctgggccgcgggcagggggcggcggaccgcggggcgctcatctggctctgctacgacgcgctggtgcacttcgcgctggaaggcccttttgtctacttgtctttagtaggaaacgttgcaaattccgatggcttgattgcttctttatggaaagaatatggcaaagctgatgcaagatgggtttattttgatccaaccattgtgtctgtggaaattctgaccgtcgccctggatgggtctctggcattgttcctcatttatgccatagtcaaagaaaaatattaccggcatttcctgcagatcaccctgtgcgtgtgcgagctgtatggctgctggatgaccttcctcccagagtggctcaccagaagccccaacctcaacaccagcaactggctgtactgttggctttacctgtttttttttaacggtgtgtgggttctgatcccaggactgctactgtggcagtcatggctagaactcaagaaaatgcatcagaaagaaaccagttcagtgaagaagtttcagtgaactttcaaaaccataaacaccattatctaacttcatgaaccagaatgaatcaaatctttttgtttggccaaaatgtaatacattccagtctacactttgtttttgtattgttgctcctgaacaacctgtttcaaattggttttaaggcgaccagttttcgttgtattgttgttcaattaaatggtgatatagggaaaagagaacaaatttgaatttgtaataataaaatgtttaattat

SEQ ID NO: 311936 - DNA, 983 bp, Homo sapiens
aaatgcatgctggtactggctggggtttttggattcttggcctgttgtgcgtcgtgaagcctgaagcattggcgctgagtgggagctgggtggcctgatgtgactggctgtgttctgtctgcttgtctgtgctgcctgctgtctcgctgtgctgtgctgtgtgctgctgcccgtgtgtgctctgctgctctgtgtgtcctgctgtgtgcagtgctgtgctgtgtgtgacctgctgtgtggcgctcatctggctctgctacgacgctgctgtgtgcacttctgctgctggaatgtgaaggcccttttgtctacttgtctttagtaggaaacgttgcaaattccgatggcttgattgcttctttatggaaagaatatggcaaagctgatgcaagatgggtttattttgatccaaccattgtgtctgtggaaattctgaccgtcgccctggatgggtctctggcattgttcctcatttatgccatagtcaaagaaaaatattaccggcatttcctgcagatcaccctgtgcgtgtgcgagctgtatggctgctggatgaccttcctcccagagtggctcaccagaagccccaacctcaacaccagcaactggctgtactgttggctttacctgtttttttttaacggtgtgtgggttctgatcccaggactgctactgtggcagtcatggctagaactcaagaaaatgcatcagaaagaaaccagttcagtgaagaagtttcagtgaactttcaaaaccataaacaccattatctaacttcatgaaccagaatgaatcaaatctttttgtttggccaaaatgtaatacattccagtctacactttgtttttgtattgttgctcctgaacaacctgtttcaaattggttttaaggcgaccagttttcgttgtattgttgttcaattaaatggtgatatagggaaaagagaacaaatttgaatttgtaataataaaatgtttaattat

SEQ ID NO: 311937 - DNA, 963 bp, Homo sapiens
ggccccgacccggccggggagccccgtccctccccggaccgccttggccaatcagctccgctcctccttggccatccggctccgccccttcccggccagccccgccccgtcgtttctctccctgctttcctctgccgcatggtcctgggccgttggcgtcggaagcctgaagcatgggcgctgagtgggagctgggggccgaggctggcggttcgctgctgctgtgcgccgcgctgctggcggcgggctgcgccctgggcctgcgcctgggccgcgggcagggggcggcggaccgcggggcgctcatctggctctgctacgacgcgctggtgcacttcgcgctgggaaagaatatggcaaagctgatgcaagatgggtttattttgatccaaccattgtgtctgtggaaattctgaccgtcgccctggatgggtctctggcattgttcctcatttatgccatagtcaaagaaaaatattaccggcatttcctgcagatcaccctgtgcgtgtgcgagctgtatggctgctggatgaccttcctcccagagtggctcaccagaagccccaacctcaacaccagcaactggctgtactgttggctttacctgtttttttttaacggtgtgtgggttctgatcccaggactgctactgtggcagtcatggctagaactcaagaaaatgcatcagaaagaaaccagttcagtgaagaagtttcagtgaactttcaaaaccataaacaccattatctaacttcatgaaccagaatgaatcaaatctttttgtttggccaaaatgtaatacattccagtctacactttgtttttgtattgttgctcctgaacaacctgtttcaaattggttttaaggcgaccagttttcgttgtattgttgttcaattaaatggtgatatagggaaaagagaacaaatttgaatttgtaataataaaatgtttaattat

SEQ ID NO: 311938 - DNA, 1056 bp, Homo sapiens
aaatgcatgctggtactggctggggtttttggattcttggcctgttgtgcgtcgtgaagcctgaagcattggcgctgagtgggagctgggtggcctgatgtgactggctgtgttctgtctgcttgtctgtgctgcctgctgtctcgctgtgctgtgctgtgtgctgctgcccgtgtgtgctctgctgctctgtgtgtcctgctgtgtgcagtgctgtgctgtgtgtgacctgctgtgtggcgctcatctggctctgctacgacgctgctgtgtgcacttctgctgctggaatgtgaaggcccttttgtctacttgtctttagtaggaaacgttgcaaattccgatggcttgattgcttctttatgcgagtctcgctctgtcccccaggctggagcacagtggcaccatctcggctcactgcaagctccgcctcccagggaaagaatatggcaaagctgatgcaagatgggtttattttgatccaaccattgtgtctgtggaaattctgaccgtcgccctggatgggtctctggcattgttcctcatttatgccatagtcaaagaaaaatattaccggcatttcctgcagatcaccctgtgcgtgtgcgagctgtatggctgctggatgaccttcctcccagagtggctcaccagaagccccaacctcaacaccagcaactggctgtactgttggctttacctgtttttttttaacggtgtgtgggttctgatcccaggactgctactgtggcagtcatggctagaactcaagaaaatgcatcagaaagaaaccagttcagtgaagaagtttcagtgaactttcaaaaccataaacaccattatctaacttcatgaaccagaatgaatcaaatctttttgtttggccaaaatgtaatacattccagtctacactttgtttttgtattgttgctcctgaacaacctgtttcaaattggttttaaggcgaccagttttcgttgtattgttgttcaattaaatggtgatatagggaaaagagaacaaatttgaatttgtaataataaaatgtttaattat

SEQ ID NO: 311939 - DNA, 1014 bp, Homo sapiens
cccccccaccctcccgcgggcccgccgcgagcacgctcttccaaaacttgtcttgatcggctgtatcgcattctggcgttggtgtagctagcatgggcgctgagtgggagctgggggccgaggctggcggttcgctgctgctgtgcgccgcgctgctggcggcgggctgcgccctgggcctgcgcctgggccgcgggcagggggcggcggaccgcggggcgctcatctggctctgctacgacgcgctggtgcacttcgcgctggaaggcccttttgtctacttgtctttagtaggaaacgttgcaaattccgatggcttgattgcttctttatggaaagaatatggcaaagctgatgcaagatgggtttattttgatccaaccattgtgtctgtggaaattctgaccgtcgccctggatgggtctctggcattgttcctcatttatgccatagtcaaagaaaaatattaccgggacagagtggcctggggtgaatagattgctatcctgagatgaatccctaaaacaatttcaagcatttcctgcagatcaccctgtgcgtgtgcgagctgtatggctgctggatgaccttcctcccagagtggctcaccagaagccccaacctcaacaccagcaactggctgtactgttggctttacctgtttttttttaacggtgtgtgggttctgatcccaggactgctactgtggcagtcatggctagaactcaagaaaatgcatcagaaagaaaccagttcagtgaagaagtttcagtgaactttcaaaaccataaacaccattatctaacttcatgaaccagaatgaatcaaatctttttgtttggccaaaatgtaatacattccagtctacactttgtttttgtattgttgctcctgaacaacctgtttcaaattggttttaaggcgaccagttttcgttgtattgttgttcaattaaatggtgatatagggaaaagagaacaaatttgaatttgtaataataaaatgtttaattat

SEQ ID NO: 311940 - DNA, 1085 bp, Homo sapiens
ggccccgacccggccggggagccccgtccctccccggaccgccttggccaatcagctccgctcctccttggccatccggctccgccccttcccggccagccccgccccgtcgtttctctccctgctttcctctgccgcatggtcctgggccgttggcgtcggaagcctgaagcatgggcgctgagtgggagctgggggccgaggctggcggttcgctgctgctgtgcgccgcgctgctggcggcgggctgcgccctgggcctgcgcctgggccgcgggcagggggcggcggaccgcggggcgctcatctggctctgctacgacgcgctggtgcacttcgcgctggaaggcccttttgtctacttgtctttagtaggaaacgttgcaaattccgatggcttgattgcttctttatggaaagaatatggcaaagctgatgcaagatgggtttattttgatccaaccattgtgtctgtggaaattctgaccgtcgccctggatgggtctctggcattgttcctcatttatgccatagtcaaagaaaaatattaccggcatttcctgcagatcaccctgtgcgtgtgcgagctgtatggctgctggatgaccttcctcccagagtggctcaccagaagccccaacctcaacaccagcaactggctgtactgttggctttacctgtttttttttaacggtgtgtgggttctgatcccaggactgctactgtggcagtcatggctagaactcaagaaaatgcatcagaaagaaaccagttcagtgaagaagtttcagtgaactttcaaaaccataaacaccattatctaacttcatgaaccagaatgaatcaaatctttttgtttggccaaaatgtaatacattccagtctacactttgtttttgtattgttgctcctgaacaacctgtttcaaattggttttaaggcgaccagttttcgttgtattgttgttcaattaaatggtgatatagggaaaagagaacaaatttgaatttgtaataataaaatgtttaattatgaaaaaaaaagaaaaaagtgtaatatataaataaaaatagatattatggaaa

SEQ ID NO: 311941 - DNA, 1671 bp, Homo sapiens
ggccccgacccggccggggagccccgtccctccccggaccgccttggccaatcagctccgctcctccttggccatccggctccgccccttcccggccagccccgccccgtcgtttctctccctgctttcctctgccgcatggtcctgggccgttggcgtcggaagcctgaagcatgggcgctgagtgggagctgggggccgaggctggcggttcgctgctgctgtgcgccgcgctgctggcggcgggctgcgccctgggcctgcgcctgggccgcgggcagggggcggcggaccgcggggcgctcatctggctctgctacgacgcgctggtgcacttcgcgctggaaggcccttttgtctacttgtctttagtaggaaacgttgcaaattccgatggcttgattgcttctttatggaaagaatatggcaaagctgatgcaagatgggtttattttgatccaaccattgtgtctgtggaaattctgaccgtcgccctggatgggtctctggcattgttcctcatttatgccatagtcaaagaaaaatattaccggcatttcctgcagatcaccctgtgcgtgtgcgagctgtatggctgctggatgaccttcctcccagagtggctcaccagaagccccaacctcaacaccagcaactggctgtactgttggctttacctgtttttttttaacggtgtgtgggttctgatcccaggactgctactgtggcagtcatggctagaactcaagaaaatgcatcagaaagaaaccagttcagtgaagaagtttcagtgaactttcaaaaccataaacaccattatctaacttcatgaaccagaatgaatcaaatctttttgtttggccaaaatgtaatacattccagtctacactttgtttttgtattgttgctcctgaacaacctgtttcaaattggttttaaggcgaccagttttcgttgtattgttgttcaattaaatggtgatatagggaaaagagaacaaatttgaatttgtaataataaaatgtttaattataaccaaccagcaaacaaaaaacaaaaaaaaaaaaaaaaaacacaaaaaaaaaacaagaaaacaaacaaaaaaaaaaaaacaaaacaaaaaaacagaagaggggggcgcgcgcggagcgaaggaaaatcctcccccggagggggccgcccaagccgcaggcaccccccagtatttgtgaagaagaggggccccccccaagggggcggtgcaaatattaacacaaccagcagagacgcggccgggcgtttaaaacaaaaaggcggagtgccgagaggagacacaaaccgcgcacgaacaacgaggcctaacaaattgagagggcaaaacaacacctccccacgtcatggggagggggggacaaaacattgagagggagcaaaacacaccactcccagacgtagattttcacacacgctgcccgcagaggaggcaaaaaaaacatacacagtaacagccgcacgacgcgtagatacttgcgggtggaccacaaccaacaaacgaagatacatcacgctacgcagcccacaagcaaagcatgtacgatagcgcacgaggagccaagcatcagtataccagaccacaaaacttaacacaccgcagcgggcgcgtcgacatctaccataagataaggagacatg

SEQ ID NO: 311942 - DNA, 814 bp, Homo sapiens
ggccccgacccggccggggagccccgtccctccccggaccgccttggccaatcagctccgctcctccttggccatccggctccgccccttcccggccagccccgccccgtcgtttctctccctgctttcctctgccgcatggtcctgggccgttggcgtcggaagcctgaagcatgggcgctgagtgggagctgggggccgaggctggcggttcgctgctgctgtgcgccgcgctgctggcggcgggctgcgccctgggcctgcgcctgggccgcgggcagggggcggcggaccgcggggcgctcatctggctctgctacgacgcgctggtgcacttcgcgctggaaggcccttttgtctacttgtctttagtaggaaacgttgcaaattccgatggcttgattgcttctttatgcgagtctcgctctgtcccccaggctggagcacagtggcaccatctcggctcactgcaagctccgcctcccaggttcacgccattctcctgcctcagcctcccgagtagctgggactacaggcgcccgccaccacgcctagctaatttttttgtatttttagtagagacggggtttcaccatgttagccaggatggtctcgatctcctgacctcgtgatctgcccacctcggcctcccaaagtgctggggttataggcatgagccaccgcgcctggcccatatatctcatttctttgtgactctaaaatcatctccagctaggatctgtgtgggggactcctgtttaccactagtgttaggaaacatctagagaattgagtaggctcattagtacttccc

SEQ ID NO: 311943 - DNA, 824 bp, Homo sapiens
ggccccgacccggccggggagccccgtccctccccggaccgccttggccaatcagctccgctcctccttggccatccggctccgccccttcccggccagccccgccccgtcgtttctctccctgctttcctctgccgcatggtcctgggccgttggcgtcggaagcctgaagcatgggcgctgagtgggagctgggggccgaggctggcggttcgctgctgctgtgcgccgcgctgctggcggcgggctgcgccctgggcctgcgcctgggccgcgggcagggggcggcggaccgcggggcgctcatctggctctgctacgacgcgctggtgcacttcgcgctggcatttcctgcagatcaccctgtgcgtgtgcgagctgtatggctgctggatgaccttcctcccagagtggctcaccagaagccccaacctcaacaccagcaactggctgtactgttggctttacctgtttttttttaacggtgtgtgggttctgatcccaggactgctactgtggcagtcatggctagaactcaagaaaatgcatcagaaagaaaccagttcagtgaagaagtttcagtgaactttcaaaaccataaacaccattatctaacttcatgaaccagaatgaatcaaatctttttgtttggccaaaatgtaatacattccagtctacactttgtttttgtattgttgctcctgaacaacctgtttcaaattggttttaaggcgaccagttttcgttgtattgttgttcaattaaatggtgatatagggaaaagagaacaaatttgaatttgtaataataaaatgtttaattat

SEQ ID NO: 311944 - DNA, 1095 bp, Homo sapiens
ggccccgacccggccggggagccccgtccctccccggaccgccttggccaatcagctccgctcctccttggccatccggctccgccccttcccggccagccccgccccgtcgtttctctccctgctttcctctgccgcatggtcctgggccgttggcgtcggaagcctgaagcatgggcgctgagtgggagctgggggccgaggctggcggttcgctgctgctgtgcgccgcgctgctggcggcgggctgcgccctgggcctgcgcctgggccgcgggcagggggcggcggaccgcggggcgctcatctggctctgctacgacgcgctggtgcacttcgcgctggaaggcccttttgtctacttgtctttagtaggaaacgttgcaaattccgatggcttgattgcttctttatggaaagaatatggcaaagctgatgcaagatgggtttattttgatccaaccattgtgtctgtggaaattctgaccgtcgccctggatgggtctctggcattgttcctcatttatgccatagtcaaagaaaaatattaccgggacagagtggcctggggtgaatagattgctatcctgagatgaatccctaaaacaatttcaagcatttcctgcagatcaccctgtgcgtgtgcgagctgtatggctgctggatgaccttcctcccagagtggctcaccagaagccccaacctcaacaccagcaactggctgtactgttggctttacctgtttttttttaacggtgtgtgggttctgatcccaggactgctactgtggcagtcatggctagaactcaagaaaatgcatcagaaagaaaccagttcagtgaagaagtttcagtgaactttcaaaaccataaacaccattatctaacttcatgaaccagaatgaatcaaatctttttgtttggccaaaatgtaatacattccagtctacactttgtttttgtattgttgctcctgaacaacctgtttcaaattggttttaaggcgaccagttttcgttgtattgttgttcaattaaatggtgatatagggaaaagagaacaaatttgaatttgtaataataaaatgtttaattat

SEQ ID NO: 311945 - DNA, 894 bp, Homo sapiens
ggccccgacccggccggggagccccgtccctccccggaccgccttggccaatcagctccgctcctccttggccatccggctccgccccttcccggccagccccgccccgtcgtttctctccctgctttcctctgccgcatggtcctgggccgttggcgtcggaagcctgaagcatgggcgctgagtgggagctgggggccgaggctggcggttcgctgctgctgtgcgccgcgctgctggcggcgggctgcgccctgggcctgcgcctgggccgcgggcagggggcggcggaccgcggggcgctcatctggctctgctacgacgcgctggtgcacttcgcgctggaaggcccttttgtctacttgtctttagtaggaaacgttgcaaattccgatggcttgattgcttctttatgcatttcctgcagatcaccctgtgcgtgtgcgagctgtatggctgctggatgaccttcctcccagagtggctcaccagaagccccaacctcaacaccagcaactggctgtactgttggctttacctgtttttttttaacggtgtgtgggttctgatcccaggactgctactgtggcagtcatggctagaactcaagaaaatgcatcagaaagaaaccagttcagtgaagaagtttcagtgaactttcaaaaccataaacaccattatctaacttcatgaaccagaatgaatcaaatctttttgtttggccaaaatgtaatacattccagtctacactttgtttttgtattgttgctcctgaacaacctgtttcaaattggttttaaggcgaccagttttcgttgtattgttgttcaattaaatggtgatatagggaaaagagaacaaatttgaatttgtaataataaaatgtttaattat

SEQ ID NO: 311946 - DNA, 1088 bp, Homo sapiens
ggccccgacccggccggggagccccgtccctccccggaccgccttggccaatcagctccgctcctccttggccatccggctccgccccttcccggccagccccgccccgtcgtttctctccctgctttcctctgccgcatggtcctgggccgttggcgtcggaagcctgaagcatgggcgctgagtgggagctgggggccgaggctggcggttcgctgctgctgtgcgccgcgctgctggcggcgggctgcgccctgggcctgcgcctgggccgcgggcagggggcggcggaccgcggggcgctcatctggctctgctacgacgcgctggtgcacttcgcgctggaaggcccttttgtctacttgtctttagtaggaaacgttgcaaattccgatggcttgattgcttctttatggaaagaatatggcaaagctgatgcaagatgggtttattttgatccaaccattgtgtctgtggaaattctgaccgtcgccctggatgggtctctggcattgttcctcatttatgccatagtcaaagaaaaatattaccggcatttcctgcagatcaccctgtgcgtgtgcgagctgtatggctgctggatgaccttcctcccagagtggctcaccagaagccccaacctcaacaccagcaactggctgtactgttggctttacctgtttttttttaacggtgtgtgggttctgatcccaggactgctactgtggcagtcatggctagaactcaagaaaatgcatcagaaagaaaccagttcagtgaagaagtttcagtgaactttcaaaaccataaacaccattatctaacttcatgaaccagaatgaatcaaatctttttgtttggccaaaatgtaatacattccagtctacactttgtttttgtattgttgctcctgaacaacctgtttcaaattggttttaaggcgaccagttttcgttgtattgttgttcaattaaatggtgatatagggaaaagagaacaaatttgaatttgtaataataaaatgtttaattatatacattttatggctggcattaattgttccacattagtaaaaccaattatcttag

SEQ ID NO: 311947 - DNA, 659 bp, Homo sapiens
ttttttttttcccgagaggtctttctgtatttcagcactacaggtgtgggcagacagaacagctcatccagaaagaatccaaactgaaaacctaactttcaaatcacacccacatgttaagctggtgcagcagcctccccagatacaaggaaaatgacccttctctgcatggcactcagtggtgtaaagacactcggactcttaagcttatagaagacagaactttctagtgggctgaaaatacttaatgttccattgtttgccctctgattcctcaggtggccactgaaatctcatgcattcgtcggctcaaagtttggaattctacctagtcttgagactactatcttgtatttctttgcagtaatttttttgcattgagatttctttccctctgaattctagcctggtgccttgtaggtttcttgctgccttccctttcccagataatagcatcctacaaaatttggtgttatttctaaacccagagtagatacttcagtcctagtgattatttccctaggctgtcagctcatatggtagccctcaaaagttgaatgctggccaggtgcagtggctcacacctgtaatcccagcactttgggaggccaagggaggtggatcacgaggtcaggagtttgacaccagcctgggcaaca

SEQ ID NO: 311948 - DNA, 2771 bp, Homo sapiens
  misc_feature (198)..(199): n is a, c, g, or t
tttgctcatactttgtgacttgcggtcacagtggcattcagctccacacttggtagaaccacaggcacgacaagcatagaaacatcctaaacaatcttcatcgaggcatcgaggtccatcccaataaaaatcaggagaccctggctatcatagaccttagtcttcgctggtatactcgctgtctgaaccagcggttgnntttttttaagccttcttttttctcttttaccagtttctggagcaaattcagtttgccttcctggatttgtaaattgtaatgacctcaaaactttagcagttcttccatctgactcaggtttgcttctctggcggtcttcagaatcaacatccacacttccgtgattatctgcgtgcattttggacaaagcttccaaccaggatacgggaagaagaaatggctggtgatctttcagcaggtttcttcatggaggaacttaatacataccgtcagaagcagggagtagtacttaaatatcaagaactgcctaattcaggacctccacatgataggaggtttacatttcaagttataatagatggaagagaatttccagaaggtgaaggtagatcaaagaaggaagcaaaaaatgccgcagccaaattagctgttgagatacttaataaggaaaagaaggcagttagtcctttattattgacaacaacgaattcttcagaaggattatccatggggaattacataggccttatcaatagaattgcccagaagaaaagactaactgtaaattatgaacagtgtgcatcgggggtgcatgggccagaaggatttcattataaatgcaaaatgggacagaaagaatatagtattggtacaggttctactaaacaggaagcaaaacaattggccgctaaacttgcatatcttcagatattatcagaagaaacctcagtgaaatctgactacctgtcctctggttcttttgctactacgtgtgagtcccaaagcaactctttagtgaccagcacactcgcttctgaatcatcatctgaaggtgacttctcagcagatacatcagagataaattctaacagtgacagtttaaacagttcttcgttgcttatgaatggtctcagaaataatcaaaggaaggcaaaaagatctttggcacccagatttgaccttcctgacatgaaagaaacaaagtatactgtggacaagaggtttggcatggattttaaagaaatagaattaattggctcaggtggatttggccaagttttcaaagcaaaacacagaattgacggaaagacttacgttattaaacgtgttaaatataataacgagaaggcggagcgtgaagtaaaagcattggcaaaacttgatcatgtaaatattgttcactacaatggctgttgggatggatttgattatgatcctgagaccagtgatgattctcttgagagcagtgattatgatcctgagaacagcaaaaatagttcaaggtcaaagactaagtgccttttcatccaaatggaattctgtgataaagggaccttggaacaatggattgaaaaaagaagaggcgagaaactagacaaagttttggctttggaactctttgaacaaataacaaaaggggtggattatatacattcaaaaaaattaattcatagagatcttaagccaagtaatatattcttagtagatacaaaacaagtaaagattggagactttggacttgtaacatctctgaaaaatgatggaaagcgaacaaggagtaagggaactttgcgatacatgagcccagaacagatttcttcgcaagactatggaaaggaagtggacctctacgctttggggctaattcttgctgaacttcttcatgtatgtgacactgcttttgaaacatcaaagtttttcacagacctacgggatggcatcatctcagatatatttgataaaaaagaaaaaactcttctacagaaattactctcaaagaaacctgaggatcgacctaacacatctgaaatactaaggaccttgactgtgtggaagaaaagcccagagaaaaatgaacgacacacatgttagagcccttctgaaaaagtatcctgcttctgatatgcagttttccttaaattatctaaaatctgctagggaatatcaatagatatttaccttttattttaatgtttcctttaattttttactatttttactaatctttctgcagaaacagaaaggttttcttctttttgcttcaaaaacattcttacattttactttttcctggctcatctctttattcttttttttttttttaaagacagagtctcgctctgttgcccaggctggagtgcaatgacacagtcttggctcactgcaacttctgcctcttgggttcaagtgattctcctgcctcagcctcctgagtagctggattacaggcatgtgccacccacccaactaatttttgtgtttttaataaagacagggtttcaccatgttggccaggctggtctcaaactcctgacctcaagtaatccacctgcctcggcctcccaaagtgctgggattacagggatgagccaccgcgcccagcctcatctctttgttctaaagatggaaaaaccacccccaaattttctttttatactattaatgaatcaatcaattcatatctatttattaaatttctaccgcttttaggccaaaaaaatgtaagatcgttctctgcctcacatagcttacaagccagctggagaaatatggtactcattaaaaaaaaaaa

SEQ ID NO: 311949 - DNA, 899 bp, Homo sapiens
  misc_feature (891)..(892): n is a, c, g, or t
agcagacgagggcttgtgcgagagggggccgggcggctgcagggaaggcggagtccaaggggaaaacgaaactgagaaccagctctcccgaagccgcgggtctccggccggcggcggcggcggcggcggcggcggcgcagagtttctggagcaaattcagtttgccttcctggatttgtaaattgtaatgacctcaaaactttagcagttcttccatctgactcaggtttgcttctctggcggtcttcagaatcaacatccacacttccgtgattatctgcgtgcattttggacaaagcttccaaccaggatacgggaagaagaaatggctggtgatctttcagcaggtttcttcatggaggaacttaatacataccgtcagaagcagggagtagtacttaaatatcaagaactgcctaattcaggacctccacatgataggaggtttacatttcaagttataatagatggaagagaatttccagaaggtgaaggtagatcaaagaaggaagcaaaaaatgccgcagccaaattagctgttgagatacttaataaggaaaagaaggcagttagtcctttattattgacaacaacgaattcttcagaaggattatccatggggaattacataggccttatcaatagaattgcccagaagaaaagactaactgtaaattatgaacagtgtgcatcgggggtgcatgggccagaaggatttcattataaatgcaaaatgggacagaaagaatatagtattggtacaggttctactaaacaggaagcaaaacaattggccgctaaacttgcatatcttcagatattatcagaagaaacctcagtggaaaatctggcttacctggtccctctgggttccttttggcttacttaccnnggtggaa

SEQ ID NO: 311950 - DNA, 1207 bp, Homo sapiens
cataatttgtgggactaagggcaaaatgaaactgtacggccctcgttcaaaaattaggtgtggggtgcttctaagcacagtcttgtgcaactgcacaggttgcatgtccatgaagccatcctgtgtgtgtgcacatatgtgtatgaatatgtattttatataatacatatatatgcatgtatgtatctgagaagaaatgtttaaaaggctacatacaagcttttccaggtctctactatctgttaactaactagagacataactcacaatatgcagtccccactgagtgttcaccataatttgagattcttggcatgttaacttttcattatggaatattgaataatttcaatattattcatacatttcttgatgttcaaacatacacaaaaatagaataatgaaactctacccatcacccagctgcaacaaatatcaatactttaccgttcttaatacatctaaccccttactttttgtttgtttcttttggtgaagtatttaattgtaattttttttttaagagacaggatctcactctgtcacccaggccagagtacagtggtacgatcacagctccttgtaacctcgaactcctaggctcaagtgatcctcctgcctcagccgcttgaatagctgggactacatgcatacaccaacacacccaactaatttttaaattttttgtagaaatatggtcttgctgtgtttcccaggctggtctcaaactcctggccttgagagattctcctgccttggtcttccaaactgctgggattacaatatccggccctactggaatattttaaagtaaatctcaggtgttacatcattgcacttgtaagtactttaaaatgtatctctagcagataaatctttttaacaaaaccacagcatcattgtcacactcaaaaaattgacaagatttccttaattatcatataatagtctgtattgtttctatctcaaaaatacagttttcttggttgttgaaatctagatccaacattgcatttggttgatgtgtctcctttactctgtaaaatttacccctgcgttttagttcttttcggcttttatttgtcctgtggaatttcctccactcaggatttgactgagagtatccccagagtgtccagttagacctagaagctggatttgatcctggttcatttattttcccccaaaatactccataggtgatgct

SEQ ID NO: 311951 - DNA, 526 bp, Homo sapiens
aaaaaatgctcaacatcactaattatcgggaaatgcaaatcaaaaccacaatgcaataataccaccttactcctgcaagaatggccatattaaaaaaaaaaaaaatagatgttgatgtggatatggtggaaagggaacacttttacactgctggtgggaatgtaaactagtacaaccactatggaaaacagaatagagatgccgtaaagaactgaaagtagatccaccatttgattcagcagtcccctcctgagtagctggattacaggcatgtgccacccacccaactaatttttgtgtttttaataaagacaggggatgagccaccgcgcccagcctcatctctttgttctaaagatggaaaaaccacccccaaattttctttttatactattaatgaatcaatcaattcatatctatttattaaatttctaccgcttttaggccaaaaaaatgtaagatcgttctctgcctcacatagcttacaagccagctggagaaatatggtactcattaaaaaaaaaaa

SEQ ID NO: 311952 - DNA, 2910 bp, Homo sapiens
ctttggtgggtttgttttttagatgtgtaaaaaggctttatttgcaggggagcaggaatttaatcaaaaaggccaaatcccatgtcatcatctgactcttcagactcctccttcttctcatctttcttctcctctgctgcagcaggggcagaaccagcagcaggggctgcagagcctggggcagcagagacggctacagccccaccagcaggtacactggcaagcttgccaataccctgggcaatgacgtcttcaatgttttttccattcagctcactgataaccttgttgagccggtcgtcgtccgcctcgatacccacgctgtccaagatcttcttgatgtccttggcgctgggggaggagttgccccctagggcagccagcaggtaggaggcgacgtagcgcatcgcggcggcgtctgcggcggaggcggcggagaagtctcacgcgtgcgaccctcgtgccgaattcggcacgagaatcaacatccacacttccgtgattatctgcgtgcattttggacaaagcttccaaccaggatacgggaagaagaaatggctggtgatctttcagcaggtttcttcatggaggaacttaatacataccgtcagaagcagggagtagtacttaaatatcaagaactgcctaattcaggacctccacatgataggaggtttacatttcaagttataatagatggaagagaatttccagaaggtgaaggtagatcaaagaaggaagcaaaaaatgccgcagccaaattagctgttgagatacttaataaggaaaagaaggcagttagtcctttattattgacaacaacgaattcttcagaaggattatccatggggaattacataggccttatcaatagaattgcccagaagaaaagactaactgtaaattatgaacagtgtgcatcgggggtgcatgggccagaaggatttcattataaatgcaaaatgggacagaaagaatatagtattggtacaggttctactaaacaggaagcaaaacaattggccgctaaacttgcatatcttcagatattatcagaagaaacctcagtgaaatctgactacctgtcctctggttcttttgctactacgtgtgagtcccaaagcaactctttagtgaccagcacactcgcttctgaatcatcatctgaaggtgacttctcagcagatacatcagagataaattctaacagtgacagtttaaacagttcttcgttgcttatgaatggtctcagaaataatcaaaggaaggcaaaaagatctttggcacccagatttgaccttcctgacatgaaagaaacaaagtatactgtggacaagaggtttggcatggattttaaagaaatagaattaattggctcaggtggatttggccaagttttcaaagcaaaacacagaattgacggaaagacttacgttattaaacgtgttaaatataataacgagaaggcggagcgtgaagtaaaagcattggcaaaacttgatcatgtaaatattgttcactacaatggctgttgggatggatttgattatgatcctgagaccagtgatgattctcttgagagcagtgattatgatcctgagaacagcaaaaatagttcaaggtcaaagactaagtgccttttcatccaaatggaattctgtgataaagggaccttggaacaatggattgaaaaaagaagaggcgagaaactagacaaagttttggctttggaactctttgaacaaataacaaaaggggtggattatatacattcaaaaaaattaattcatagagatcttaagccaagtaatatattcttagtagatacaaaacaagtaaagattggagactttggacttgtaacatctctgaaaaatgatggaaagcgaacaaggagtaagggaactttgcgatacatgagcccagaacagatttcttcgcaagactatggaaaggaagtggacctctacgctttggggctaattcttgctgaacttcttcatgtatgtgacactgcttttgaaacatcaaagtttttcacagacctacgggatggcatcatctcagatatatttgataaaaaagaaaaaactcttctacagaaattactctcaaagaaacctgaggatcgacctaacacatctgaaatactaaggaccttgactgtgtggaagaaaagcccagagaaaaatgaacgacacacatgttagagcccttctgaaaaagtatcctgcttctgatatgcagttttccttaaattatctaaaatctgctagggaatatcaatagatatttaccttttattttaatgtttcctttaattttttactatttttactaatctttctgcagaaacagaaaggttttcttctttttgcttcaaaaacattcttacattttactttttcctggctcatctctttattcttttttttttttttaaagacagagtctcgctctgttgcccaggctggagtgcaatgacacagtcttggctcactgcaacttctgcctcttgggttcaagtgattctcctgcctcagcctcctgagtagctggattacaggcatgtgccacccacccaactaatttttgtgtttttaataaagacagggtttcaccatgttggccaggctggtctcaaactcctgacctcaagtaatccacctgcctcggcctcccaaagtgctgggattacagggatgagccaccgcgcccagcctcatctctttgttctaaagatggaaaaaccacccccaaattttctttttatactattaatgaatcaatcaattcatatctatttattaaatttctaccgcttttaggccaaaaaaatgtaagatcgttctctgcctcacatagcttacaagccagctggagaaatatggtactcattaaaaaaaaaaa

SEQ ID NO: 311953 - DNA, 2605 bp, Homo sapiens
agcagacgagggcttgtgcgagagggggccgggcggctgcagggaaggcggagtccaaggggaaaacgaaactgagaaccagctctcccgaagccgcgggtctccggccggcggcggcggcggcggcggcggcggcgcagagtttctggagcaaattcagtttgccttcctggatttgtaaattgtaatgacctcaaaactttagcagttcttccatctgactcaggtttgcttctctggcggtcttcagaatcaacatccacacttccgtgattatctgcgtgcattttggacaaagcttccaaccaggatacgggaagaagaaatggctggtgatctttcagcaggtttcttcatggaggaacttaatacataccgtcagaagcagggagtagtacttaaatatcaagaactgcctaattcaggacctccacatgataggaggtttacatttcaagttataatagatggaagagaatttccagaaggtgaaggtagatcaaagaaggaagcaaaaaatgccgcagccaaattagctgttgagatacttaataaggaaaagaaggcagttagtcctttattattgacaacaacgaattcttcagaaggattatccatggggaattacataggccttatcaatagaattgcccagaagaaaagactaactgtaaattatgaacagtgtgcatcgggggtgcatgggccagaaggatttcattataaatgcaaaatgggacagaaagaatatagtattggtacaggttctactaaacaggaagcaaaacaattggccgctaaacttgcatatcttcagatattatcagaagaaacctcagtgaaatctgactacctgtcctctggttcttttgctactacgtgtgagtcccaaagcaactctttagtgaccagcacactcgcttctgaatcatcatctgaaggtgacttctcagcagatacatcagagataaattctaacagtgacagtttaaacagttcttcgttgcttatgaatggtctcagaaataatcaaaggaaggcaaaaagatctttggcacccagatttgaccttcctgacatgaaagaaacaaagtatactgtggacaagaggtttggcatggattttaaagaaatagaattaattggctcaggtggatttggccaagttttcaaagcaaaacacagaattgacggaaagacttacgttattaaacgtgttaaatataataacgagaaggcggagcgtgaagtaaaagcattggcaaaacttgatcatgtaaatattgttcactacaatggctgttgggatggatttgattatgatcctgagaccagtgatgattctcttgagagcagtgattatgatcctgagaacagcaaaaatagttcaaggtcaaagactaagtgccttttcatccaaatggaattctgtgataaagggaccttggaacaatggattgaaaaaagaagaggcgagaaactagacaaagttttggctttggaactctttgaacaaataacaaaaggggtggattatatacattcaaaaaaattaattcatagagatcttaagccaagtaatatattcttagtagatacaaaacaagtaaagattggagactttggacttgtaacatctctgaaaaatgatggaaagcgaacaaggagtaagggaactttgcgatacatgagcccagaacagatttcttcgcaagactatggaaaggaagtggacctctacgctttggggctaattcttgctgaacttcttcatgtatgtgacactgcttttgaaacatcaaagtttttcacagacctacgggatggcatcatctcagatatatttgataaaaaagaaaaaactcttctacagaaattactctcaaagaaacctgaggatcgacctaacacatctgaaatactaaggaccttgactgtgtggaagaaaagcccagagaaaaatgaacgacacacatgttagagcccttctgaaaaaagtctcactgtgtcgcccaggctggagtgcagtggcacgatctcggctcactgcaacctctgcctcccaggttcaagtgattctcctgcctctgcttcctgagtagctgggattacaggctggtctcaaactcctggccttgagagattctcctgccttggtcttccaaactgctgggattacaatatccggccctactggaatattttaaagtaaatctcaggtgttacatcattgcacttgtaagtactttaaaatgtatctctagcagataaatctttttaacaaaaccacagcatcattgtcacactcaaaaaattgacaagatttccttaattatcatataatagtctgtattgtttctatctcaaaaatacagttttcttggttgttgaaatctagatccaacattgcatttggttgatgtgtctcctttactctgtaaaatttacccctgcgttttagttcttttcggcttttatttgtcctgtggaatttcctccactcaggatttgactgagagtatccccagagtgtccagttagacctagaagctggatttgatcctggttcatttattttcccccaaaatactccataggtgatgct

SEQ ID NO: 311954 - DNA, 2599 bp, Homo sapiens
gccaagttgagtttttaaagtagaaaatttggagaaattaactttattgtgcagtgaatgagaaagaaagaacggttttgaaagaaagtctctgcatttatgtgagactgagatgagtcctataaaggggagtctccccaacccctctgtctcctaaactgcattgggaaactcagattaaatatgttctgtgagcatcactcattcaaatgtctcttccattgtaggatacgggaagaagaaatggctggtgatctttcagcaggtttcttcatggaggaacttaatacataccgtcagaagcagggagtagtacttaaatatcaagaactgcctaattcaggacctccacatgataggaggtttacatttcaagttataatagatggaagagaatttccagaaggtgaaggtagatcaaagaaggaagcaaaaaatgccgcagccaaattagctgttgagatacttaataaggaaaagaaggcagttagtcctttattattgacaacaacgaattcttcagaaggattatccatggggaattacataggccttatcaatagaattgcccagaagaaaagactaactgtaaattatgaacagtgtgcatcgggggtgcatgggccagaaggatttcattataaatgcaaaatgggacagaaagaatatagtattggtacaggttctactaaacaggaagcaaaacaattggccgctaaacttgcatatcttcagatattatcagaagaaacctcagtgaaatctgactacctgtcctctggttcttttgctactacgtgtgagtcccaaagcaactctttagtgaccagcacactcgcttctgaatcatcatctgaaggtgacttctcagcagatacatcagagataaattctaacagtgacagtttaaacagttcttcgttgcttatgaatggtctcagaaataatcaaaggaaggcaaaaagatctttggcacccagatttgaccttcctgacatgaaagaaacaaagtatactgtggacaagaggtttggcatggattttaaagaaatagaattaattggctcaggtggatttggccaagttttcaaagcaaaacacagaattgacggaaagacttacgttattaaacgtgttaaatataataacgagaaggcggagcgtgaagtaaaagcattggcaaaacttgatcatgtaaatattgttcactacaatggctgttgggatggatttgattatgatcctgagaccagtgatgattctcttgagagcagtgattatgatcctgagaacagcaaaaatagttcaaggtcaaagactaagtgccttttcatccaaatggaattctgtgataaagggaccttggaacaatggattgaaaaaagaagaggcgagaaactagacaaagttttggctttggaactctttgaacaaataacaaaaggggtggattatatacattcaaaaaaattaattcatagagatcttaagccaagtaatatattcttagtagatacaaaacaagtaaagattggagactttggacttgtaacatctctgaaaaatgatggaaagcgaacaaggagtaagggaactttgcgatacatgagcccagaacagatttcttcgcaagactatggaaaggaagtggacctctacgctttggggctaattcttgctgaacttcttcatgtatgtgacactgcttttgaaacatcaaagtttttcacagacctacgggatggcatcatctcagatatatttgataaaaaagaaaaaactcttctacagaaattactctcaaagaaacctgaggatcgacctaacacatctgaaatactaaggaccttgactgtgtggaagaaaagcccagagaaaaatgaacgacacacatgttagagcccttctgaaaaagtatcctgcttctgatatgcagttttccttaaattatctaaaatctgctagggaatatcaatagatatttaccttttattttaatgtttcctttaattttttactatttttactaatctttctgcagaaacagaaaggttttcttctttttgcttcaaaaacattcttacattttactttttcctggctcatctctttattcttttttttttttttaaagacagagtctcgctctgttgcccaggctggagtgcaatgacacagtcttggctcactgcaacttctgcctcttgggttcaagtgattctcctgcctcagcctcctgagtagctggattacaggcatgtgccacccacccaactaatttttgtgtttttaataaagacagggtttcaccatgttggccaggctggtctcaaactcctgacctcaagtaatccacctgcctcggcctcccaaagtgctgggattacagggatgagccaccgcgcccagcctcatctctttgttctaaagatggaaaaaccacccccaaattttctttttatactattaatgaatcaatcaattcatatctatttattaaatttctaccgcttttaggccaaaaaaatgtaagatcgttctctgcctcacatagcttacaagccagctggagaaatatggtactcattaaaaaaaaaaa

SEQ ID NO: 311955 - DNA, 2260 bp, Homo sapiens
cgcatcttgctcccatcagggaggtttacatttcaagttataatagatggaagagaatttccagaaggtgaaggtagatcaaagaaggaagcaaaaaatgccgcagccaaattagctgttgagatacttaataaggaaaagaaggcagttagtcctttattattgacaacaacgaattcttcagaaggattatccatggggaattacataggccttatcaatagaattgcccagaagaaaagactaactgtaaattatgaacagtgtgcatcgggggtgcatgggccagaaggatttcattataaatgcaaaatgggacagaaagaatatagtattggtacaggttctactaaacaggaagcaaaacaattggccgctaaacttgcatatcttcagatattatcagaagaaacctcagtgaaatctgactacctgtcctctggttcttttgctactacgtgtgagtcccaaagcaactctttagtgaccagcacactcgcttctgaatcatcatctgaaggtgacttctcagcagatacatcagagataaattctaacagtgacagtttaaacagttcttcgttgcttatgaatggtctcagaaataatcaaaggaaggcaaaaagatctttggcacccagatttgaccttcctgacatgaaagaaacaaagtatactgtggacaagaggtttggcatggattttaaagaaatagaattaattggctcaggtggatttggccaagttttcaaagcaaaacacagaattgacggaaagacttacgttattaaacgtgttaaatataataacgagaaggcggagcgtgaagtaaaagcattggcaaaacttgatcatgtaaatattgttcactacaatggctgttgggatggatttgattatgatcctgagaccagtgatgattctcttgagagcagtgattatgatcctgagaacagcaaaaatagttcaaggtcaaagactaagtgccttttcatccaaatggaattctgtgataaagggaccttggaacaatggattgaaaaaagaagaggcgagaaactagacaaagttttggctttggaactctttgaacaaataacaaaaggggtggattatatacattcaaaaaaattaattcatagagatcttaagccaagtaatatattcttagtagatacaaaacaagtaaagattggagactttggacttgtaacatctctgaaaaatgatggaaagcgaacaaggagtaagggaactttgcgatacatgagcccagaacagatttcttcgcaagactatggaaaggaagtggacctctacgctttggggctaattcttgctgaacttcttcatgtatgtgacactgcttttgaaacatcaaagtttttcacagacctacgggatggcatcatctcagatatatttgataaaaaagaaaaaactcttctacagaaattactctcaaagaaacctgaggatcgacctaacacatctgaaatactaaggaccttgactgtgtggaagaaaagcccagagaaaaatgaacgacacacatgttagagcccttctgaaaaagtatcctgcttctgatatgcagttttccttaaattatctaaaatctgctagggaatatcaatagatatttaccttttattttaatgtttcctttaattttttactatttttactaatctttctgcagaaacagaaaggttttcttctttttgcttcaaaaacattcttacattttactttttcctggctcatctctttattcttttttttttttttaaagacagagtctcgctctgttgcccaggctggagtgcaatgacacagtcttggctcactgcaacttctgcctcttgggttcaagtgattctcctgcctcagcctcctgagtagctggattacaggcatgtgccacccacccaactaatttttgtgtttttaataaagacagggtttcaccatgttggccaggctggtctcaaactcctgacctcaagtaatccacctgcctcggcctcccaaagtgctgggattacagggatgagccaccgcgcccagcctcatctctttgttctaaagatggaaaaaccacccccaaattttctttttatactattaatgaatcaatcaattcatatctatttattaaatttctaccgcttttaggccaaaaaaatgtaagatcgttctctgcctcacatagcttacaagccagctggagaaatatggtactcattaaaaaaaaaaa

SEQ ID NO: 311956 - DNA, 1649 bp, Homo sapiens
agcagacgagggcttgtgcgagagggggccgggcggctgcagggaaggcggagtccaaggggaaaacgaaactgagaaccagctctcccgaagccgcgggtctccggccggcggcggcggcggcggcggcggcggcgcagagtttctggagcaaattcagtttgccttcctggatttgtaaattgtaatgacctcaaaactttagcagttcttccatctgactcaggtttgcttctctggcggtcttcagaatcaacatccacacttccgtgattatctgcgtgcattttggacaaagcttccaaccaggatacgggaagaagaaatggctggtgatctttcagcaggtttcttcatggaggaacttaatacataccgtcagaagcagggagtagtacttaaatatcaagaactgcctaattcaggacctccacatgataggaggtttacatttcaagttataatagatggaagagaatttccagaaggtgaaggtagatcaaagaaggaagcaaaaaatgccgcagccaaattagctgttgagatacttaataaggaaaagaaggcagttagtcctttattattgacaacaacgaattcttcagaaggattatccatggggaattacataggccttatcaatagaattgcccagaagaaaagactaactgtaaattatgaacagtgtgcatcgggggtgcatgggccagaaggatttcattataaatgcaaaatgggacagaaagaatatagtattggtacaggttctactaaacaggaagcaaaacaattggccgctaaacttgcatatcttcagatattatcagaagaaacctcagtgaaatctgactacctgtcctctggttcttttgctactacgtgtgagtcccaaagcaactctttagtgaccagcacactcgcttctgaatcatcatctgaaggtgacttctcagcagatacatcagagataaattctaacagtgacagtttaaacagttcttcgttgcttatgaatggtctcagaaataatcaaaggaaggcaaaaagatctttggcacccagatttgaccttcctgacatgaaagaaacaaagtatactgtggacaagaggtttggcatggattttaaagaaatagaattaattggctcaggtggatttggccaagttttcaaagcaaaacacagaattgacggaaagacttacgttattaaacgtgttaaatataataacgagaaggcggagcgtgaagtaaaagcattggcaaaacttgatcatgtaaatattgttcactacaatggctgttgggatggatttgattatgatcctgagaccagtgatgattctcttgagagcagtgattatgatcctgagaacagcaaaaatagttcaaggtcaaagactaagtgccttttcatccaaatggaattctgtgataaagggaccttggaacaatggattgaaaaaagaagaggcgagaaactagacaaagttttggctttggaactctttgaacaaataacaaaaggggtggattatatacattcaaaaaaattaattcatagagatcttaagccatagtaatatattcttagtaggcctaacacacctccattatctgtaaggctgtcactaaacatgggcccaggtg

SEQ ID NO: 311957 - DNA, 2744 bp, Homo sapiens
caggttttcagaaaatatatgcagaataattccatttatataaagttccagagcatgcaaaactaaatcattttgtataaaaaacccaacaaatgtgatgagacaataatgggaaggaagggaatgagaaatattaaattctggatggtggttatctttgagggaggggaatgatgtgattggggaaatggactttcaaaggtaatggtaacttccttaagctggatggtaggtccactagtgtttgctgcatagttataccttttatcttaaatacattttgtatctattgtaacaaccactttaaagacaaccgtgctgtaaggcagtagctaaaaacagaaaatagtccatcgggaagggtaagatggctttctgctgagcacagggctagaagtgacagcccagtgggccttccaactatatgccagggtgttagatgagtagagaggagaccacccaggaagtctggacaaggggtctggcatgagctctggagaagatatatttgaggaacatggggtatgctagtttgttgtcctgaattgctgtagagaagataatttaaattgcatcttagaagacgaccctgagggtgaatttcaacttagggcaattgttttagtttgtttcttattggtttaaatggatacttgaagctggataatttataaggaaaagagatttatatgacttacagttctgcaggctgtacaagaaacatggcaccagcatctgcttcttccccggctgcttccactcatggtggaaggtgaaggggagccggatgtgcagagatcatatggcaagagaggaagcaagagagcgagggagaaggtgccaggctctttttaaataaccggctcttgagggaactaatagattgagaactccttgcttctcctccccagcacaccccacccccagggacggcattaatgtattcatgaggggtcttcccccatgacccaaacactctcccatcaggccccacctccaacactgggatcaaatttcaacatgagattttgggggacaaacatgcaaactatagcagcaaccagctaccattctaaaactgccatatgattttaggatttttaaaaagggccaaatttaggttaagcaaaaagtgaaaatacagtaagagaaaatagttttataaaggctttaaaaagtgttcataaagagcagttcatagatttttcacgtaacgttcatcaatagatgctaaaactattggatgaaaagctattgtggaataggatcttctacaaggatttaaatataatcctacagaagaggtatcaattatacaggggaaaatgtacctttacaatggtcaccacaataaccaagtgattcaatttagcatcacccaaggtggaacaccctaacattatgcccctcctgatgtgacttaagaattttacctatttagttttcttgcacaaagtgttaaactggaatttaatcatgaggaaattattagacaaatcctgaatgtagtcattctataagatgattgacttgggcttctcaaaaagtcagtgtcatgaaaaaaaaaaaaaggggagagacttgtaagatacaatgaccaaatgcaatgtttgaatctttattgtattctggatatttaaaaagacaaaagctggacgcagtagctaatgcctgttatcccagcatttttgggaggtcaaaaggggaggatggcttgagcataggattttgagactagcctgggcaacacagtgagttctcatctctacaaaaaatcagaaaattagctgggcatggtagtgtgcatctgtggtcccagctacttgggggggtgaggtgggaggatcacttgagcctaggaggtcaaggccgcagtgagccatgatcatgttactgcattccagcctgggtgacagagtgagatcatatctaaataataataataataaaagaaagcaacaacccagcaaacagctataaagatatcttcgggacaattgagaacatttgaatatagactgcatattagataacaatgccaaataactgttttctcaggtgtgataatagtatatgtagaaaatgtctttttgttttgttttattttgttttgttgtttgtttgttttgagacagagtctcactgtgtcgcccaggctggagtgcagtggcacgatctcggctcactgcaacctctgcctcccaggttcaagtgattctcctgcctctgcttcctgagtagctgggattacaggctggtctcaaactcctggccttgagagattctcctgccttggtcttccaaactgctgggattacaatatccggccctactggaatattttaaagtaaatctcaggtgttacatcattgcacttgtaagtactttaaaatgtatctctagcagataaatctttttaacaaaaccacagcatcattgtcacactcaaaaaattgacaagatttccttaattatcatataatagtctgtattgtttctatctcaaaaatacagttttcttggttgttgaaatctagatccaacattgcatttggttgatgtgtctcctttactctgtaaaatttacccctgcgttttagttcttttcggcttttatttgtcctgtggaatttcctccactcaggatttgactgagagtatccccagagtgtccagttagacctagaagctggatttgatcctggttcatttattttcccccaaaatactccataggtgatgct

SEQ ID NO: 311958 - DNA, 2141 bp, Homo sapiens
caggttttcagaaaatatatgcagaataattccatttatataaagttccagagcatgcaaaactaaatcattttgtataaaaaacccaacaaatgtgatgagacaataatgggaaggaagggaatgagaaatattaaattctggatggtggttatctttgagggaggggaatgatgtgattggggaaatggactttcaaaggtaatggtaacttccttaagctggatggtaggtccactagtgtttgctgcatagttataccttttatcttaaatacattttgtatctattgtaacaaccactttaaagacaaccgtgctgtaaggcagtagctaaaaacagaaaatagtccatcgggaagggtaagatggctttctgctgagcacagggctagaagtgacagcccagtgggccttccaactatatgccagggtgttagatgagtagagaggagaccacccaggaagtctggacaaggggtctggcatgagctctggagaagatatatttgaggaacatggggtatgctagtttgttgtcctgaattgctgtagagaagataatttaaattgcatcttagaagacgaccctgagggtgaatttcaacttagggcaattgttttagtttgtttcttattggtttaaatggatacttgaagctggataatttataaggaaaagagatttatatgacttacagttctgcaggctgtacaagaaacatggcaccagcatctgcttcttccccggctgcttccactcatggtggaaggtgaaggggagccggatgtgcagagatcatatggcaagagaggaagcaagagagcgagggagaaggtgccaggctctttttaaataaccggctcttgagggaactaatagattgagaactccttgcttctcctccccagcacaccccacccccagggacggcattaatgtattcatgaggggtcttcccccatgacccaaacactctcccatcaggccccacctccaacactgggatcaaatttcaacatgagattttgggggacaaacatgcaaactatagcagcaaccagctaccattctaaaactgccatatgattttaggatttttaaaaagggccaaatttaggttaagcaaaaagtgaaaatacagtaagagaaaatagttttataaaggctttaaaaagtgttcataaagagcagttcatagatttttcacgtaacgttcatcaatagatgctaaaactattggatgaaaagctattgtggaataggatcttctacaaggatttaaatataatcctacagaagaggtatcaattatacaggggaaaatgtacctttacaatggtcaccacaataaccaagtgattcaatttagcatcacccaaggtggaacaccctaacattatgcccctcctgatgtgacttaagaattttacctatttagttttcttgcacaaagtgttaaactggaatttaatcatgaggaaattattagacaaatcctgaatgtagtcattctataagatgattgacttgggcttctcaaaaagtcagtgtcatgaaaaaaaaaaaaaggggagagacttgtaagatacaatgaccaaatgcaatgtttgaatctttattgtattctggatatttaaaaagacaaaagctggtctcaaactcctggccttgagagattctcctgccttggtcttccaaactgctgggattacaatatccggccctactggaatattttaaagtaaatctcaggtgttacatcattgcacttgtaagtactttaaaatgtatctctagcagataaatctttttaacaaaaccacagcatcattgtcacactcaaaaaattgacaagatttccttaattatcatataatagtctgtattgtttctatctcaaaaatacagttttcttggttgttgaaatctagatccaacattgcatttggttgatgtgtctcctttactctgtaaaatttacccctgcgttttagttcttttcggcttttatttgtcctgtggaatttcctccactcaggatttgactgagagtatccccagagtgtccagttagacctagaagctggatttgatcctggttcatttattttcccccaaaatactccataggtgatgct

SEQ ID NO: 311959 - DNA, 2802 bp, Homo sapiens
caggttttcagaaaatatatgcagaataattccatttatataaagttccagagcatgcaaaactaaatcattttgtataaaaaacccaacaaatgtgatgagacaataatgggaaggaagggaatgagaaatattaaattctggatggtggttatctttgagggaggggaatgatgtgattggggaaatggactttcaaaggtaatggtaacttccttaagctggatggtaggtccactagtgtttgctgcatagttataccttttatcttaaatacattttgtatctattgtaacaaccactttaaagacaaccgtgctgtaaggcagtagctaaaaacagaaaatagtccatcgggaagggtaagatggctttctgctgagcacagggctagaagtgacagcccagtgggccttccaactatatgccagggtgttagatgagtagagaggagaccacccaggaagtctggacaaggggtctggcatgagctctggagaagatatatttgaggaacatggggtatgctagtttgttgtcctgaattgctgtagagaagataatttaaattgcatcttagaagacgaccctgagggtgaatttcaacttagggcaattgttttagtttgtttcttattggtttaaatggatacttgaagctggataatttataaggaaaagagatttatatgacttacagttctgcaggctgtacaagaaacatggcaccagcatctgcttcttccccggctgcttccactcatggtggaaggtgaaggggagccggatgtgcagagatcatatggcaagagaggaagcaagagagcgagggagaaggtgccaggctctttttaaataaccggctcttgagggaactaatagattgagaactccttgcttctcctccccagcacaccccacccccagggacggcattaatgtattcatgaggggtcttcccccatgacccaaacactctcccatcaggccccacctccaacactgggatcaaatttcaacatgagattttgggggacaaacatgcaaactatagcagcaaccagctaccattctaaaactgccatatgattttaggatttttaaaaagggccaaatttaggttaagcaaaaagtgaaaatacagtaagagaaaatagttttataaaggctttaaaaagtgttcataaagagcagttcatagatttttcacgtaacgttcatcaatagatgctaaaactattggatgaaaagctattgtggaataggatcttctacaaggatttaaatataatcctacagaagaggtatcaattatacaggggaaaatgtacctttacaatggtcaccacaataaccaagtgattcaatttagcatcacccaaggtggaacaccctaacattatgcccctcctgatgtgacttaagaattttacctatttagttttcttgcacaaagtgttaaactggaatttaatcatgaggaaattattagacaaatcctgaatgtagtcattctataagatgattgacttgggcttctcaaaaagtcagtgtcatgaaaaaaaaaaaaaggggagagacttgtaagatacaatgaccaaatgcaatgtttgaatctttattgtattctggatatttaaaaagacaaaagctggacgcagtagctaatgcctgttatcccagcatttttgggaggtcaaaaggggaggatggcttgagcataggattttgagactagcctgggcaacacagtgagttctcatctctacaaaaaatcagaaaattagctgggcatggtagtgtgcatctgtggtcccagctacttgggggggtgaggtgggaggatcacttgagcctaggaggtcaaggccgcagtgagccatgatcatgttactgcattccagcctgggtgacagagtgagatcatatctaaataataataataataaaagaaagcaacaacccagcaaacagctataaagatatcttcgggacaattgagaacatttgaatatagactgcatattagataacaatgccaaataactgttttctcaggtgtgataatagtatatgtagaaaatgtctttttgttttgttttattttgttttgttgtttgtttgttttgagacagagtctcactgtgtcgcccaggctggagtgcagtggcacgatctcggctcactgcaacctctgcctcccaggttcaagtgattctcctgcctctgcttcctgagtagctgggattacaggtatctgccaccactccaggttaattttttctatttttagtagagacggaatttcaccatgttgacccagctggttttgaactcctgacctcaggtgattcacttgccttggcctcccaaagtgttgagattacaggcatgagtcactgcacccagccaaaaatgtttttttaggcaatgcatgcacaaacatttagaggccaagtgtgtcatgatgtctgcaactttcaatgttcagcaaaaatcaacatggagagagaaagagggcacacatgtggcaaaatattagccattgtacaattggtaaatctagatgacagtacacaggtgtttgttgtattattctttgaacttttctgtagatttggaaatgttctgcgtagagagaaatctttttttaaaaaaacaatatctggttttgattaatgaggctatattcaaaagaaacactaaatgatgtggccagttagtgagaatgtagccttatctttactgacctcattttaatattcctactctggctgggcatggtggctcacgcctataatc

SEQ ID NO: 311960 - DNA, 1984 bp, Homo sapiens
  misc_feature (1954)..(1954): n is a, c, g, or t
  misc_feature (1970)..(1971): n is a, c, g, or t
caggttttcagaaaatatatgcagaataattccatttatataaagttccagagcatgcaaaactaaatcattttgtataaaaaacccaacaaatgtgatgagacaataatgggaaggaagggaatgagaaatattaaattctggatggtggttatctttgagggaggggaatgatgtgattggggaaatggactttcaaaggtaatggtaacttccttaagctggatggtaggtccactagtgtttgctgcatagttataccttttatcttaaatacattttgtatctattgtaacaaccactttaaagacaaccgtgctgtaaggcagtagctaaaaacagaaaatagtccatcgggaagggtaagatggctttctgctgagcacagggctagaagtgacagcccagtgggccttccaactatatgccagggtgttagatgagtagagaggagaccacccaggaagtctggacaaggggtctggcatgagctctggagaagatatatttgaggaacatggggtatgctagtttgttgtcctgaattgctgtagagaagataatttaaattgcatcttagaagacgaccctgagggtgaatttcaacttagggcaattgttttagtttgtttcttattggtttaaatggatacttgaagctggataatttataaggaaaagagatttatatgacttacagttctgcaggctgtacaagaaacatggcaccagcatctgcttcttccccggctgcttccactcatggtggaaggtgaaggggagccggatgtgcagagatcatatggcaagagaggaagcaagagagcgagggagaaggtgccaggctctttttaaataaccggctcttgagggaactaatagattgagaactccttgcttctcctccccagcacaccccacccccagggacggcattaatgtattcatgaggggtcttcccccatgacccaaacactctcccatcaggccccacctccaacactgggatcaaatttcaacatgagattttgggggacaaacatgcaaactatagcagcaaccagctaccattctaaaactgccatatgattttaggatttttaaaaagggccaaatttaggttaagcaaaaagtgaaaatacagtaagagaaaatagttttataaaggctttaaaaagtgttcataaagagcagttcatagatttttcacgtaacgttcatcaatagatgctaaaactattggatgaaaagctattgtggaataggatcttctacaaggatttaaatataatcctacagaagaggtatcaattatacaggggaaaatgtacctttacaatggtcaccacaataaccaagtgattcaatttagcatcacccaaggtggaacaccctaacattatgcccctcctgatgtgacttaagaattttacctatttagttttcttgcacaaagtgttaaactggaatttaatcatgaggaaattattagacaaatcctgaatgtagtcattctataagatgattgacttgggcttctcaaaaagtcagtgtcatgaaaaaaaaaaaaaggggagagacttgtaagatacaatgaccaaatgcaatgtttgaatctttattgtattctggatatttaaaaagacaaaagctggacgcagtagctaatgcctgttatcccagcatttttgggaggtcaaaaggggaggattgccaggctggtctcaaactcctgacctcaagtaatccacctgcctcggcctcccaaagtgctgggattacagggatgagccaccgcgcccagcctcatctctttgttctaaagatggaaaaaccacccccaaattttctttttatactattaatgaatcaatcaattcatatctatttattaaatttctaccgcttttaggccaaaaaaatgtaagatcgttctctgcctcacatagcttanaagccagctggatagnnattggtactcatt

SEQ ID NO: 311961 - DNA, 1476 bp, Homo sapiens
caggttttcagaaaatatatgcagaataattccatttatataaagttccagagcatgcaaaactaaatcattttgtataaaaaacccaacaaatgtgatgagacaataatgggaaggaagggaatgagaaatattaaattctggatggtggttatctttgagggaggggaatgatgtgattggggaaatggactttcaaaggtaatggtaacttccttaagctggatggtaggtccactagtgtttgctgcatagttataccttttatcttaaatacattttgtatctattgtaacaaccactttaaagacaaccgtgctgtaaggcagtagctaaaaacagaaaatagtccatcgggaagggtaagatggctttctgctgagcacagggctagaagtgacagcccagtgggccttccaactatatgccagggtgttagatgagtagagaggagaccacccaggaagtctggacaaggggtctggcatgagctctggagaagatatatttgaggaacatggggtatgctagtttgttgtcctgaattgctgtagagaagataatttaaattgcatcttagaagacgaccctgagggtgaatttcaacttagggcaattgttttagtttgtttcttattggtttaaatggatacttgaagctggataatttataaggaaaagagatttatatgacttacagttctgcaggctgtacaagaaacatggcaccagcatctgcttcttccccggctgcttccactcatggtggaaggtgaaggggagccggatgtgcagagatcatatggcaagagaggaagcaagagagcgagggagaaggtgccaggctctttttaaataaccggctcttgagggaactaatagattgagaactccttgcttctcctccccagcacaccccacccccagggacggcattaatgtattcatgaggggtcttcccccatgacccaaacactctcccatcaggccccacctccaacactgggatcaaatttcaacatgagattttgggggacaaacatgcaaactatagcagcaaccagctaccattctaaaactgccatatgattttaggatttttaaaaagggccaaatttaggttaagcaaaaagtgaaaatacagtaagagaaaatagttttataaaggctttaaaaagtgttcataaagagcagttcatagatttttcacgtaacgttcatcaatagatgctaaaactattggatgaaaagctattgtggaataggatcttctacaaggatttaaatataatcctacagaagaggtatcaattatacaggggaaaatgtacctttacaatggtcaccacaataaccaagtgattcaatttagcatcacccaaggtggaacaccctaacattatgcccctcctgatggacgcagatcgccatcttctcccatcagccatcccaaactagggatcctctagatcgcct

SEQ ID NO: 311962 - DNA, 1186 bp, Homo sapiens
ccatgttgatcgttaatttacacagaggattcagctattcggcggtacagatttgaacctaggcagtcagactccacagattttgctaataaatagacattgttttgtggtgtaagatgttttggtcaaataacttttttgggctttagaaggctggatatttatgtaaggagcataacaaaggtaaatctattttggtctctttagatttcttcgcaagactatggaaaggaagtggacctctacgctttggggctaattcttgctgaacttcttcatgtatgtgacactgcttttgaaacatcaaagtttttcacagacctacgggatggcatcatctcagatatatttgataaaaaagaaaaaactcttctacagaaattactctcaaagaaacctgaggatcgacctaacacatctgaaatactaaggaccttgactgtgtggaagaaaagcccagagaaaaatgaacgacacacatgttagagcccttctgaaaaagtatcctgcttctgatatgcagttttccttaaattatctaaaatctgctagggaatatcaatagatatttaccttttattttaatgtttcctttaattttttactatttttactaatctttctgcagaaacagaaaggttttcttctttttgcttcaaaaacattcttacattttactttttcctggctcatctctttattcttttttttttttttaaagacagagtctcgctctgttgcccaggctggagtgcaatgacacagtcttggctcactgcaacttctgcctcttgggttcaagtgattctcctgcctcagcctcctgagtagctggattacaggcatgtgccacccacccaactaatttttgtgtttttaataaagacagggtttcaccatgttggccaggctggtctcaaactcctgacctcaagtaatccacctgcctcggcctcccaaagtgctgggattacagggatgagccaccgcgcccagcctcatctctttgttctaaagatggaaaaaccacccccaaattttctttttatactattaatgaatcaatcaattcatatctatttattaaatttctaccgcttttaggccaaaaaaatgtaagatcgttctctgcctcacatagcttacaagccagctggagaaatatggtactcattaaaaaaaaaaa

SEQ ID NO: 311963 - DNA, 1262 bp, Homo sapiens
agcagacgagggcttgtgcgagagggggccgggcggctgcagggaaggcggagtccaaggggaaaacgaaactgagaaccagctctcccgaagccgcgggtctccggccggcggcggcggcggcggcggcggcggcgcagagtttctggagcaaattcagtttgccttcctggatttgtaaattgtaatgacctcaaaactttagcagttcttccatctgactcaggtttgcttctctggcggtcttcagaatcaacatccacacttccgtgattatctgcgtgcattttggacaaagcttccaaccaggatacgggaagaagaaatggctggtgatctttcagcaggtttcttcatggaggaacttaatacataccgtcagaagcagggagtagtacttaaatatcaagaactgcctaattcaggacctccacatgataggaggtttacatttcaagttataatagatggaagagaatttccagaaggtgaaggtagatcaaagaaggaagcaaaaaatgccgcagccaaattagctgttgagatacttaataaggaaaagaaggcagttagtcctttattattgacaacaacgaattcttcagaaggattatccatggggaattacataggccttatcaatagaattgcccagaagaaaagactaactgtaaattatgaacagtgtgcatcgggggtgcatgggccagaaggatttcattataaatgcaaaatgggacagaaagaatatagtattggtacaggttctactaaacaggaagcaaaacaattggccgctaaacttgcatatcttcagatattatcagaagaaacctcagtgaaatctgactacctgtcctctggttcttttgctactacgtgtgagtcccaaagcaactctttagtgaccagcacactcgcttctgaatcatcatctgaaggtgacttctcagcagatacatcagagataaattctaacagtgacagtttaaacagttcttcgttgcttatgaatggtctcagaaataatcaaaggaaggcaaaaaggtgagtatcattatgcattgaacatattttgatctgaagttttatttcagacttatttattgttcttaatacttgtagagtattgtacacccttatttgagcagagtttcagaagcagaaagcttgaaatctataaacaaataattttagatgtgtcgagaaatctttgactatgtgcacatgctacactgtaaacataaagcactttgggggta

SEQ ID NO: 311964 - DNA, 733 bp, Homo sapiens
gccaagttgagtttttaaagtagaaaatttggagaaattaactttattgtgcagtgaatgagaaagaaagaacggttttgaaagaaagtctctgcatttatgtgagactgagatgagtcctataaaggggagtctccccaacccctctgtctcctaaactgcattgggaaactcagattaaatatgttctgtgagcatcactcattcaaatgtctcttccattgtaggatacgggaagaagaaatggctggtgatctttcagcaggtttcttcatggaggaacttaatacataccgtcagaagcagggagtagtacttaaatatcaagaactgcctaattcaggacctccacatgataggaggtaggttgctataaaaaatgatatggcagccataaaaaatgatgagttcatgtcctttgtagggacatggatgaagctggaaaccattattctcagcaaactatcgcaaggacaaaaaaaccaaacaccgcatgttctcactcataggtgagaactgagcaatgagaacacatggacacaggaaggggaacatcacacaccagggactgttgtggggtggggggaggggggagggatagcattaggagatatacctaatgctaaatgacgagttaatgggtgcagcacaccaacatggcacatgtatacatatgtaacctgcacgttgtgcacatgtaccctaaaacttaaagtataataataataaaatt

SEQ ID NO: 311965 - DNA, 764 bp, Homo sapiens
tttaattgtaattttttttttaagagacaggatctcactctgtcacccaggccagagtacagtggtacgatcacagctccttgtaacctcgaactcctaggctcaagtgatcctcctgcctcagccgcttgaatagctgggactacatgcatacaccaacacacccaactaatttttaaattttttgtagaaatatggtcttgctgtgtttcccaggctggtctcaaactcctggccttgagagattctcctgccttggtcttccaaactgctgggattacaatatccggccctactggaatattttaaagtaaatctcaggtgttacatcattgcacttgtaagtactttaaaatgtatctctagcagataaatctttttaacaaaaccacagcatcattgtcacactcaaaaaattgacaagatttccttaattatcatataatagtctgtattgtttctatctcaaaaatacagttttcttggttgttgaaatctagatccaacattgcatttggttgatgtgtctcctttactctgtaaaatttacccctgcgttttagttcttttcggcttttatttgtcctgtggaatttcctccactcaggatttgactgagagtatccccagagtgtccagttagacctagaagctggatttgatcctggttcatttattttcccccaaaatactccataggtgatgctatacactttctcttacatcatttcaggaggaacatgatgtctgattgttccactttc

SEQ ID NO: 311966 - DNA, 2681 bp, Homo sapiens
agcagacgagggcttgtgcgagagggggccgggcggctgcagggaaggcggagtccaaggggaaaacgaaactgagaaccagctctcccgaagccgcgggtctccggccggcggcggcggcggcggcggcggcggcgcagagtttctggagcaaattcagtttgccttcctggatttgtaaattgtaatgacctcaaaactttagcagttcttccatctgactcaggtttgcttctctggcggtcttcagaatcaacatccacacttccgtgattatctgcgtgcattttggacaaagcttccaaccaggatacgggaagaagaaatggctggtgatctttcagcaggtttcttcatggaggaacttaatacataccgtcagaagcagggagtagtacttaaatatcaagaactgcctaattcaggacctccacatgataggaggtttacatttcaagttataatagatggaagagaatttccagaaggtgaaggtagatcaaagaaggaagcaaaaaatgccgcagccaaattagctgttgagatacttaataaggaaaagaaggcagttagtcctttattattgacaacaacgaattcttcagaaggattatccatggggaattacataggccttatcaatagaattgcccagaagaaaagactaactgtaaattatgaacagtgtgcatcgggggtgcatgggccagaaggatttcattataaatgcaaaatgggacagaaagaatatagtattggtacaggttctactaaacaggaagcaaaacaattggccgctaaacttgcatatcttcagatattatcagaagaaacctcagtgaaatctgactacctgtcctctggttcttttgctactacgtgtgagtcccaaagcaactctttagtgaccagcacactcgcttctgaatcatcatctgaaggtgacttctcagcagatacatcagagataaattctaacagtgacagtttaaacagttcttcgttgcttatgaatggtctcagaaataatcaaaggaaggcaaaaagatctttggcacccagatttgaccttcctgacatgaaagaaacaaagtatactgtggacaagaggtttggcatggattttaaagaaatagaattaattggctcaggtggatttggccaagttttcaaagcaaaacacagaattgacggaaagacttacgttattaaacgtgttaaatataataacgagaaggcggagcgtgaagtaaaagcattggcaaaacttgatcatgtaaatattgttcactacaatggctgttgggatggatttgattatgatcctgagaccagtgatgattctcttgagagcagtgattatgatcctgagaacagcaaaaatagttcaaggtcaaagactaagtgccttttcatccaaatggaattctgtgataaagggaccttggaacaatggattgaaaaaagaagaggcgagaaactagacaaagttttggctttggaactctttgaacaaataacaaaaggggtggattatatacattcaaaaaaattaattcatagagatcttaagccaagtaatatattcttagtagatacaaaacaagtaaagattggagactttggacttgtaacatctctgaaaaatgatggaaagcgaacaaggagtaagggaactttgcgatacatgagcccagaacagatttcttcgcaagactatggaaaggaagtggacctctacgctttggggctaattcttgctgaacttcttcatgtatgtgacactgcttttgaaacatcaaagtttttcacagacctacgggatggcatcatctcagatatatttgataaaaaagaaaaaactcttctacagaaattactctcaaagaaacctgaggatcgacctaacacatctgaaatactaaggaccttgactgtgtggaagaaaagcccagagaaaaatgaacgacacacatgttagagcccttctgaaaaagtatcctgcttctgatatgcagttttccttaaattatctaaaatctgctagggaatatcaatagatatttaccttttattttaatgtttcctttaattttttactatttttactaatctttctgcagaaacagaaaggttttcttctttttgcttcaaaaacattcttacattttactttttcctggctcatctctttattcttttttttttttttaaagacagagtctcgctctgttgcccaggctggagtgcaatgacacagtcttggctcactgcaacttctgcctcttgggttcaagtgattctcctgcctcagcctcctgagtagctggattacaggcatgtgccacccacccaactaatttttgtgtttttaataaagacagggtttcaccatgttggccaggctggtctcaaactcctgacctcaagtaatccacctgcctcggcctcccaaagtgctgggattacagggatgagccaccgcgcccagcctcatctctttgttctaaagatggaaaaaccacccccaaattttctttttatactattaatgaatcaatcaattcatatctatttattaaatttctaccgcttttaggccaaaaaaatgtaagatcgttctctgcctcacatagcttacaagccagctggagaaatatggtactcattaaaaaaaaaaa

SEQ ID NO: 311967 - DNA, 2595 bp, Homo sapiens
agcagacgagggcttgtgcgagagggggccgggcggctgcagggaaggcggagtccaaggggaaaacgaaactgagaaccagctctcccgaagccgcgggtctccggccggcggcggcggcggcggcggcggcggcgcaggtttgcttctctggcggtcttcagaatcaacatccacacttccgtgattatctgcgtgcattttggacaaagcttccaaccaggatacgggaagaagaaatggctggtgatctttcagcaggtttcttcatggaggaacttaatacataccgtcagaagcagggagtagtacttaaatatcaagaactgcctaattcaggacctccacatgataggaggtttacatttcaagttataatagatggaagagaatttccagaaggtgaaggtagatcaaagaaggaagcaaaaaatgccgcagccaaattagctgttgagatacttaataaggaaaagaaggcagttagtcctttattattgacaacaacgaattcttcagaaggattatccatggggaattacataggccttatcaatagaattgcccagaagaaaagactaactgtaaattatgaacagtgtgcatcgggggtgcatgggccagaaggatttcattataaatgcaaaatgggacagaaagaatatagtattggtacaggttctactaaacaggaagcaaaacaattggccgctaaacttgcatatcttcagatattatcagaagaaacctcagtgaaatctgactacctgtcctctggttcttttgctactacgtgtgagtcccaaagcaactctttagtgaccagcacactcgcttctgaatcatcatctgaaggtgacttctcagcagatacatcagagataaattctaacagtgacagtttaaacagttcttcgttgcttatgaatggtctcagaaataatcaaaggaaggcaaaaagatctttggcacccagatttgaccttcctgacatgaaagaaacaaagtatactgtggacaagaggtttggcatggattttaaagaaatagaattaattggctcaggtggatttggccaagttttcaaagcaaaacacagaattgacggaaagacttacgttattaaacgtgttaaatataataacgagaaggcggagcgtgaagtaaaagcattggcaaaacttgatcatgtaaatattgttcactacaatggctgttgggatggatttgattatgatcctgagaccagtgatgattctcttgagagcagtgattatgatcctgagaacagcaaaaatagttcaaggtcaaagactaagtgccttttcatccaaatggaattctgtgataaagggaccttggaacaatggattgaaaaaagaagaggcgagaaactagacaaagttttggctttggaactctttgaacaaataacaaaaggggtggattatatacattcaaaaaaattaattcatagagatcttaagccaagtaatatattcttagtagatacaaaacaagtaaagattggagactttggacttgtaacatctctgaaaaatgatggaaagcgaacaaggagtaagggaactttgcgatacatgagcccagaacagatttcttcgcaagactatggaaaggaagtggacctctacgctttggggctaattcttgctgaacttcttcatgtatgtgacactgcttttgaaacatcaaagtttttcacagacctacgggatggcatcatctcagatatatttgataaaaaagaaaaaactcttctacagaaattactctcaaagaaacctgaggatcgacctaacacatctgaaatactaaggaccttgactgtgtggaagaaaagcccagagaaaaatgaacgacacacatgttagagcccttctgaaaaagtatcctgcttctgatatgcagttttccttaaattatctaaaatctgctagggaatatcaatagatatttaccttttattttaatgtttcctttaattttttactatttttactaatctttctgcagaaacagaaaggttttcttctttttgcttcaaaaacattcttacattttactttttcctggctcatctctttattcttttttttttttttaaagacagagtctcgctctgttgcccaggctggagtgcaatgacacagtcttggctcactgcaacttctgcctcttgggttcaagtgattctcctgcctcagcctcctgagtagctggattacaggcatgtgccacccacccaactaatttttgtgtttttaataaagacagggtttcaccatgttggccaggctggtctcaaactcctgacctcaagtaatccacctgcctcggcctcccaaagtgctgggattacagggatgagccaccgcgcccagcctcatctctttgttctaaagatggaaaaaccacccccaaattttctttttatactattaatgaatcaatcaattcatatctatttattaaatttctaccgcttttaggccaaaaaaatgtaagatcgttctctgcctcacatagcttacaagccagctggagaaatatggtactcattaaaaaaaaaaa

SEQ ID NO: 311968 - DNA, 3013 bp, Homo sapiens
agcagacgagggcttgtgcgagagggggccgggcggctgcagggaaggcggagtccaaggggaaaacgaaactgagaaccagctctcccgaagccgcgggtctccggccggcggcggcggcggcggcggcggcggcgcagagtttctggagcaaattcagtttgccttcctggatttgtaaattgtaatgacctcaaaactttagcagttcttccatctgactcaggtttgcttctctggcggtcttcagaatcaacatccacacttccgtgattatctgcgtgcattttggacaaagcttccaaccaggatacgggaagaagaaatggctggtgatctttcagcaggtttcttcatggaggaacttaatacataccgtcagaagcagggagtagtacttaaatatcaagaactgcctaattcaggacctccacatgataggaggtttacatttcaagttataatagatggaagagaatttccagaaggtgaaggtagatcaaagaaggaagcaaaaaatgccgcagccaaattagctgttgagatacttaataaggaaaagaaggcagttagtcctttattattgacaacaacgaattcttcagaaggattatccatggggaattacataggccttatcaatagaattgcccagaagaaaagactaactgtaaattatgaacagtgtgcatcgggggtgcatgggccagaaggatttcattataaatgcaaaatgggacagaaagaatatagtattggtacaggttctactaaacaggaagcaaaacaattggccgctaaacttgcatatcttcagatattatcagaagaaacctcagtgaaatctgactacctgtcctctggttcttttgctactacgtgtgagtcccaaagcaactctttagtgaccagcacactcgcttctgaatcatcatctgaaggtgacttctcagcagatacatcagagataaattctaacagtgacagtttaaacagttcttcgttgcttatgaatggtctcagaaataatcaaaggaaggcaaaaagatctttggcacccagatttgaccttcctgacatgaaagaaacaaagtatactgtggacaagaggtttggcatggattttaaagaaatagaattaattggctcaggtggatttggccaagttttcaaagcaaaacacagaattgacggaaagacttacgttattaaacgtgttaaatataataacgagaaggcggagcgtgaagtaaaagcattggcaaaacttgatcatgtaaatattgttcactacaatggctgttgggatggatttgattatgatcctgagaccagtgatgattctcttgagagcagtgattatgatcctgagaacagcaaaaatagttcaaggtcaaagactaagtgccttttcatccaaatggaattctgtgataaagggaccttggaacaatggattgaaaaaagaagaggcgagaaactagacaaagttttggctttggaactctttgaacaaataacaaaaggggtggattatatacattcaaaaaaattaattcatagagatcttaagccaagtaatatattcttagtagatacaaaacaagtaaagattggagactttggacttgtaacatctctgaaaaatgatggaaagcgaacaaggagtaagggaactttgcgatacatgagcccagaacagatttcttcgcaagactatggaaaggaagtggacctctacgctttggggctaattcttgctgaacttcttcatgtatgtgacactgcttttgaaacatcaaagtttttcacagacctacgggatggcatcatctcagatatatttgataaaaaagaaaaaactcttctacagaaattactctcaaagaaacctgaggatcgacctaacacatctgaaatactaaggaccttgactgtgtggaagaaaagcccagagaaaaatgaacgacacacatgttagagcccttctgaaaaagtatcctgcttctgatatgcagttttccttaaattatctaaaatctgctagggaatatcaatagatatttaccttttattttaatgtttcctttaattttttactatttttactaatctttctgcagaaacagaaaggttttcttctttttgcttcaaaaacattcttacattttactttttcctggctcatctctttattcttttttttttttttaaagacagagtctcgctctgttgcccaggctggagtgcaatgacacagtcttggctcactgcaacttctgcctcttgggttcaagtgattctcctgcctcagcctcctgagtagctggattacaggccaaacggccatgcccggctaatctttatatttagtgaagatggttagcctgaaaccttgaaacttccccactgaaatacacaaactaggccgggcgtagggctcacacctgtaatctcagcacttcggggagggccaggtgggtggaaccaccaaaggtcaggagtacaaaaccagcaaaaccagacagctcactgcgctctaaccaatgtcacctcagtaccgatgtgactatcggccacagacggggggacaggacatcccatctgcctggcgagggtcctgacaaacgacggccacaggggaacccgacatcgaggcgggcaccaggtagcgtgcccgatgccggaaccatccaagggggcgcgaacactggtgtgacgaccacgcgggaggcctacccgacagcgaaactgggaccccggcaacggacccctaatcaaaacacccgaccacactactgcacggccaccagggatcccgattcggcctaccaccccaccgatagcccacagaagcccgaaaccaagaccgcggacatcagccagacgagccctgatcaaaactcgcagcgctgaacacccacatcgcgcagcgcgcccaccacgacccacctattcacgatcagacaatcctcaacccgataccagacaccagctcacacacggaacaacc

SEQ ID NO: 311969 - DNA, 2622 bp, Homo sapiens
agcagacgagggcttgtgcgagagggggccgggcggctgcagggaaggcggagtccaaggggaaaacgaaactgagaaccagctctcccgaagccgcgggtctccggccggcggcggcggcggcggcggcggcggcgcagagtttctggagcaaattcagtttgccttcctggatttgtaaattgtaatgacctcaaaactttagcagttcttccatctgactcaggtttgcttctctggcggtcttcagaatcaacatccacacttccgtgattatctgcgtgcattttggacaaagcttccaaccaggatacgggaagaagaaatggctggtgatctttcagcaggtttcttcatggaggaacttaatacataccgtcagaagcagggagtagtacttaaatatcaagaactgcctaattcaggacctccacatgataggaggtttacatttcaagttataatagatggaagagaatttccagaaggtgaaggtagatcaaagaaggaagcaaaaaatgccgcagccaaattagctgttgagatacttaataaggaaaagaaggcagttagtcctttattattgacaacaacgaattcttcagaaggattatccatggggaattacataggccttatcaatagaattgcccagaagaaaagactaactgtaaattatgaacagtgtgcatcgggggtgcatgggccagaaggatttcattataaatgcaaaatgggacagaaagaatatagtattggtacaggttctactaaacaggaagcaaaacaattggccgctaaacttgcatatcttcagatattatcagaagaaacctcagtgaaatctgactacctgtcctctggttcttttgctactacgtgtgagtcccaaagcaactctttagtgaccagcacactcgcttctgaatcatcatctgaaggtgacttctcagcagatacatcagagataaattctaacagtgacagtttaaacagttcttcgttgcttatgaatggtctcagaaataatcaaaggaaggcaaaaagatctttggcacccagatttgaccttcctgacatgaaagaaacaaagtatactgtggacaagaggtttggcatggattttaaagaaatagaattaattggctcaggtggatttggccaagttttcaaagcaaaacacagaattgacggaaagacttacgttattaaacgtgttaaatataataacgagaaggcggagcgtgaagtaaaagcattggcaaaacttgatcatgtaaatattgttcactacaatggctgttgggatggatttgattatgatcctgagaccagtgatgattctcttgagagcagtgattatgatcctgagaacagcaaaaatagttcaagaatggattgaaaaaagaagaggcgagaaactagacaaagttttggctttggaactctttgaacaaataacaaaaggggtggattatatacattcaaaaaaattaattcatagagatcttaagccaagtaatatattcttagtagatacaaaacaagtaaagattggagactttggacttgtaacatctctgaaaaatgatggaaagcgaacaaggagtaagggaactttgcgatacatgagcccagaacagatttcttcgcaagactatggaaaggaagtggacctctacgctttggggctaattcttgctgaacttcttcatgtatgtgacactgcttttgaaacatcaaagtttttcacagacctacgggatggcatcatctcagatatatttgataaaaaagaaaaaactcttctacagaaattactctcaaagaaacctgaggatcgacctaacacatctgaaatactaaggaccttgactgtgtggaagaaaagcccagagaaaaatgaacgacacacatgttagagcccttctgaaaaagtatcctgcttctgatatgcagttttccttaaattatctaaaatctgctagggaatatcaatagatatttaccttttattttaatgtttcctttaattttttactatttttactaatctttctgcagaaacagaaaggttttcttctttttgcttcaaaaacattcttacattttactttttcctggctcatctctttattcttttttttttttttaaagacagagtctcgctctgttgcccaggctggagtgcaatgacacagtcttggctcactgcaacttctgcctcttgggttcaagtgattctcctgcctcagcctcctgagtagctggattacaggcatgtgccacccacccaactaatttttgtgtttttaataaagacagggtttcaccatgttggccaggctggtctcaaactcctgacctcaagtaatccacctgcctcggcctcccaaagtgctgggattacagggatgagccaccgcgcccagcctcatctctttgttctaaagatggaaaaaccacccccaaattttctttttatactattaatgaatcaatcaattcatatctatttattaaatttctaccgcttttaggccaaaaaaatgtaagatcgttctctgcctcacatagcttacaagccagctggagaaatatggtactcattaaaaaaaaaaa

SEQ ID NO: 311970 - DNA, 1050 bp, Homo sapiens
tgtgcgcccccgttttcctttttcccttctcatctcgtctcccataccctccctctctctacaacttaaaaatttcttcgcaagactatggaaaggaagtggacctctacgctttggggctaattcttgctgaacttcttcatgtatgtgacactgcttttgaaacatcaaagtttttcacagacctacgggatggcatcatctcagatatatttgataaaaaagaaaaaactcttctacagaaattactctcaaagaaacctgaggatcgacctaacacatctgaaatactaaggaccttgactgtgtggaagaaaagcccagagaaaaatgaacgacacacatgttagagcccttctgaaaaagtatcctgcttctgatatgcagttttccttaaattatctaaaatctgctagggaatatcaatagatatttaccttttattttaatgtttcctttaattttttactatttttactaatctttctgcagaaacagaaaggttttcttctttttgcttcaaaaacattcttacattttactttttcctggctcatctctttattcttttttttttttttaaagacagagtctcgctctgttgcccaggctggagtgcaatgacacagtcttggctcactgcaacttctgcctcttgggttcaagtgattctcctgcctcagcctcctgagtagctggattacaggcatgtgccacccacccaactaatttttgtgtttttaataaagacagggtttcaccatgttggccaggctggtctcaaactcctgacctcaagtaatccacctgcctcggcctcccaaagtgctgggattacagggatgagccaccgcgcccagcctcatctctttgttctaaagatggaaaaaccacccccaaattttctttttatactattaatgaatcaatcaattcatatctatttattaaatttctaccgcttttaggccaaaaaaatgtaagatcgttctctgcctcacatagcttacaagccagctggagaaatatggtactcattaaaaaaaaaaa

SEQ ID NO: 311971 - DNA, 4603 bp, Homo sapiens
tggcaggcagggcgggtgggaggagggtgatttacaaggcagatgggcctctggctacagctcagtcctgcactcagccagggccaccccaggggctataagagcaactagatttctggagcagctcggggatgggtgccatttgagcccagcttggctccccctcctggctggcctccttcctgcccttctgcctgcctgtgtctgctgagattctgcaaagaggaacgcttggcaccatgtctctgctcaaccctgtcctgctgccccccaaggtgaaggcctatctgagccaaggggagcgcttcatcaaatgggatgatgaaactacagttgcctctccagttatcctccgtgtggatcctaagggctactacttatactggacgtatcaaagtaaggagatggagtttctggatatcaccagcatccgggatactcgctttgggaagtttgccaagatgcccaagagccagaagctccgggacgtcttcaacatggactttcctgataacagtttcctgctgaagacactcacggtggtgtccggcccggacatggtggacctcaccttccacaacttcgtctcctacaaggagaacgtgggcaaggcctgggctgaggacgtactggccctagtcaaacatccgctgacggccaacgcctcccgcagcaccttcctggacaagatccttgtgaagctcaagatgcagctcaactctgaagggaagattccggtgaagaactttttccagatgtttcctgctgaccgcaagcgggtggaagctgctctcagtgcctgccacctccccaaaggcaaaaatgacgccatcaatcctgaggacttcccagaacctgtctacaagagtttcctcatgagcctctgtcctcggccagaaatagatgagatcttcacttcttaccatgctaaggccaaaccctacatgacgaaggagcacctgaccaaattcatcaaccagaaacagcgggactcccggcttaactccctgctgttcccgccagcacggcctgaccaggtgcagggcctcatcgacaagtatgagcccagtggcatcaatgcacagaggggccagctgtcacctgaaggcatggtctggtttctctgtgggccagagaacagcgtgctggcccaggacaagctgctgctccaccacgacatgacgcagccactcaatcattacttcatcaactcgtcccacaacacctacctgacagccggccagttctcaggcctctcctcggctgagatgtaccgccaggtgctgctctctggctgccgttgcgtggagctagactgctggaaggggaaaccccctgacgaggagcccattatcacccatggcttcaccatgaccacagacatcttcttcaaagaagcaattgaggctattgcagaaagtgcctttaagacctccccctatcccatcatcctgtcgtttgagaaccatgtggactcaccccgccagcaggctaagatggctgagtattgccggacgatctttggggatatgctgctcacagagcccctggaaaagttcccactaaaaccaggtgtccccctgcccagccctgaggatctcaggggcaagatcctcatcaagaacaagaagaaccagttttctggccccacctcctccagtaaggataccggtggggaggctgagggcagcagcccacccagtgcccctgcaggtgagggcacagtgtgggctggcgaggaagggactgagctggaggaggaggaggtggaagaggaagaggaggaggagtcaggaaacctggatgaagaagagattaagaagatgcagtcggatgagggcacagcgggcctggaagtgacggcttatgaggagatgtccagcctagtcaattacatccagcccaccaagttcgtctcctttgagttctctgcccaaaagaaccgaagttatgtcatctcgtccttcacagagctcaaggcatatgacctgctctccaaggcctcggtgcagtttgtggactacaacaagcgccagatgagccgcatttaccccaagggaacccgcatggactcctccaactacatgccccagatgttctggaatgctggatgccagatggttgccctcaacttccagacgatggacttgcccatgcagcagaacatggcagtatttgagttcaacgggcagagcggctacctcctcaagcatgagttcatgcgccggccggacaagcagttcaaccccttctcagtggaccgcatcgacgtggtggtggccaccaccctttccattacggtgatctctgggcagttcctgtcagaacgcagcgtgcgcacctatgtagaagtggagctgtttggccttcctggggaccccaagaggcgctatcgaactaagctgtcacccagtactaactccatcaatcctgtctggaaggaggagccctttgtctttgagaagatcttgatgcctgagctggcctccctcagagtggctgtgatggaggaaggcaacaagtttcttggacaccgcatcatccccatcaatgccctaaattctgggtaccaccacctgtgcctgcacagtgagagcaacatgcccctcaccatgcctgcgctcttcatcttcctggagatgaaggactacatacctggtgcttgggcagatctcactgtggccctcgccaaccccattaagttcttcagtgcccatgacacgaagtctgtgaagctcaaggaggccatgggaggtctgcctgagaagcccttcccactggcgagtccagttgccagccaggtcaatggggcgttggccccaacgagcaatgggtcaccagcagccagggccggggccagggaagaggctatgaaagaagctgcggagccgcggaccgccagcctggaggagctccgggagctaaagggcgtggtgaagctgcagcggcggcacgagaaggagctgcgagagttggagcggcgcggagcgcggcgctgggaggagctgctgcagcggggcgcggcgcagctggcggagctcgggccaccgggcgtggggggcgtcggggcctgcaagctcggtcccggcaagggctctcgcaagaagaggagcctgccccgcgaggagagcgccggagccgcgccgggcgagggccctgagggcgtggacgggcgcgtgcgggagctgaaagacaggctggagctggagctgctgcggcagggcgaggagcagtacgagtgcgttctgaagcgcaaggagcagcacgtggccgagcaaatctccaaaatgatggagctggccagagagaaacaggcggcagagctgaaggccctgaaggagacgtcggagaacgacaccaaagagatgaagaaaaagctggagacaaagagactggagcggatccagggcatgaccaaagtcaccacagacaagatggcccaggagaggttgaagagagagattaacaactcccacatccaggaagtagtgcaggtgatcaagcagatgacggagaacttggagaggcaccaggagaagctggaggagaagcaggcggcttgcctggaacagatacgggagatggaaaagcagttccagaaggaggcgctggcagagtacgaggccaggatgaagggtctggaggcagaggtgaaggagtcggtgagggcctgcctcaggacctgctttccctccgaggccaaggacaagcctgagagggcctgcgagtgccccccagagctgtgtgagcaggacccactcatagcaaaggcagatgcccaggagagccgcctctgatgcccccatcccactgggacatttagcaaggaggttcagccccttctctgggatgtggttctattcccccaggaaaaaggagccccagccttctgaggctgtgggaacctgtggctgccttggacgctgcagccccctcctcaacggccaggccagagtctgagacaggacccaggcaccctcacggcagggcctctctggggcctagaagtcttctcaagctgacttcctacctccccctccatctctagataagtgtcatatatttgttgagggcaaaagactatggactggaaggcagaaagtgggatcctggccccactctgcctttcctattgagcaaccagctctgggctcagtttcctcacctggagggttggacccactcacctccactctagccccgaaccctcctgccccaggcttccaggccccatcaggcctgccctgagttggccttgtccactccttgaggcagatcctggcactacctcacagctccctggggacggccactccctggctgagggccctcccctcccctctgcctgtccggaacgggaggctgaaatggaaaagctgccttggccctgcttggctgagtcacaaggggcagtgggctcttgggtgctgttccaccctgaccctggctcacccctcttcctaggcctgggggcaggcagttcctaccatgtacccctctcaggctgcctgcctgacaaggtcagcatcatttgctctcctgaatttatgaggtttatttatttttctctttcctactcctattaaagaacctcgtcccagtg

SEQ ID NO: 311972 - DNA, 1763 bp, Homo sapiens
tggcaggcagggcgggtgggaggagggtgatttacaaggcagatgggcctctggctacagctcagtcctgcactcagccagggccaccccaggggctataagagcaactagatttctggagcagctcggggatgggtgccatttgagcccagcttggctccccctcctggctggcctccttcctgcccttctgcctgcctgtgtctgctgagattctgcaaagaggaacgcttggcaccatgtctctgctcaaccctgtcctgctgccccccaaggtgaaggcctatctgagccaaggggagcgcttcatcaaatgggatgatgaaactacagttgcctctccagttatcctccgtgtggatcctaagggctactacttatactggacgtatcaaagtaaggagatggagtttctggatatcaccagcatccgggatactcgctttgggaagtttgccaagatgcccaagagccagaagctccgggacgtcttcaacatggactttcctgataacagtttcctgctgaagacactcacggtggtgtccggcccggacatggtggacctcaccttccacaacttcgtctcctacaaggagaacgtgggcaaggcctgggctgaggacgtactggccctagtcaaacatccgctgacggccaacgcctcccgcagcaccttcctggacaagatccttgtgaagctcaagatgcagctcaactctgaagggaagattccggtgaagaactttttccagatgtttcctgctgaccgcaagcgggtggaagctgctctcagtgcctgccacctccccaaaggcaaacctggaggagcgagataaggtcggcagtggcaggcggcagtctgcagggatctggaagtctgcagcgtgtcgagggagaggaactgaaccaaaggcggaagctgccaagatgcagacttctgctctgtacagaaaagcatttttccctgtctttttagttaaataattaatttttaattacaagttgtaagcagggtcaccccatgaagcaacttgtgtgaattacaaaaaggagccctctgggctgatatggccctgagctaggcttcaagcctggccaatggagcgaatctcagcccctgtccctgcttggccagtgctcttgtgtgggtcccagcctataccccatggagtattttctcctggtaagaatttggaacgttataaataaataaaaccacgacccccattgatcacctgcccacatgaatcccaggaggagcatttaccccacagccacagctctgcagagttggtgactccttgatgcagtcagtcacagggatccaaatgtggcgttggggagaggtaggaatgggctcctgcggctcccctacagccagcaacacttacctgtggtcagcacacatccaccctccctctctcctgccgcctgagctcctcccttggctaagtcctccttatctatctgctttccttgtgtctcagtagaggctactgacccaactttgcttggagctgaagctccagagacagggaggggtttggggagatccagttagactctcctgctcagaccctctgctccaaactaagactgatgttggccttccagtgtgattctgaaagacatttaatgttttttttggggggggaaggaatgcaaaggtgcagaatccctgaataccacaaatgtacttttcatttctatttctatagatttgcctattctggtggtaaagtaaatgaaatcataaatat

SEQ ID NO: 311973 - DNA, 569 bp, Homo sapiens
ggagctgctggttactgacactaggcacaggggtggagccagggcaagggagtgagaccctgagctccaagcaggtttgtctgtatcccctaccctgggtggtgggggcgctggggctgtggttgatggactgtgttcagggcaggcagcagaaacggcatgcattcccagtctagtgttgggaatgggagctgagcgtgaatgttttcagacacatccaccctccctctctcctgccgcctgagctcctcccttggctaagtcctccttatctatctgctttccttgtgtctcagtagaggctactgacccaactttgcttggagctgaagctccagagacagggaggggtttggggagatccagttagactctcctgctcagaccctctgctccaaactaagactgatgttggccttccagtgtgattctgaaagacatttaatgttttttttggggggggaaggaatgcaaaggtgcagaatccctgaataccacaaatgtacttttcatttctatttctatagatttgcctattctggtggtaaagtaaatgaaatcataaatat

SEQ ID NO: 311974 - DNA, 3017 bp, Homo sapiens
gtggcgatctcgaggatcccctccataatgtgtgcccaggaaggcatacagctccacttctacataggtgcgcacgctgcgttctgacaggaactgcccagagatcaccgtaatggaaagggtggtggccaccaccacgtcgatgcggtccactgagaaggggttgaactgcttgtccggccggcgcatgaactcatgcttgaggagatgtccagcctagtcaattacatccagcccaccaagttcgtctcctttgagttctctgcccaaaagaaccgaagttatgtcatctcgtccttcacagagctcaaggcatatgacctgctctccaaggcctcggtgcagtttgtggactacaacaagcgccagatgagccgcatttaccccaagggaacccgcatggactcctccaactacatgccccagatgttctggaatgctggatgccagatggttgccctcaacttccagacgatggacttgcccatgcagcagaacatggcagtatttgagttcaacgggcagagcggctacctcctcaagcatgagttcatgcgccggccggacaagcagttcaaccccttctcagtggaccgcatcgacgtggtggtggccaccaccctttccattacggtgatctctgggcagttcctgtcagaacgcagcgtgcgcacctatgtagaagtggagctgtttggccttcctggggaccccaagaggcgctatcgaactaagctgtcacccagtactaactccatcaatcctgtctggaaggaggagccctttgtctttgagaagatcttgatgcctgagctggcctccctcagagtggctgtgatggaggaaggcaacaagtttcttggacaccgcatcatccccatcaatgccctaaattctgggtaccaccacctgtgcctgcacagtgagagcaacatgcccctcaccatgcctgcgctcttcatcttcctggagatgaaggactacatacctggtgcttgggcagatctcactgtggccctcgccaaccccattaagttcttcagtgcccatgacacgaagtctgtgaagctcaaggaggccatgggaggtctgcctgagaagcccttcccactggcgagtccagttgccagccaggtcaatggggcgttggccccaacgagcaatgggtcaccagcagccagggccggggccagggaagaggctatgaaagaagctgcggagccgcggaccgccagcctggaggagctccgggagctaaagggcgtggtgaagctgcagcggcggcacgagaaggagctgcgagagttggagcggcgcggagcgcggcgctgggaggagctgctgcagcggggcgcggcgcagctggcggagctcgggccaccgggcgtggggggcgtcggggcctgcaagctcggtcccggcaagggctctcgcaagaagaggagcctgccccgcgaggagagcgccggagccgcgccgggcgagggccctgagggcgtggacgggcgcgtgcgggagctgaaagacaggctggagctggagctgctgcggcagggcgaggagcagtacgagtgcgttctgaagcgcaaggagcagcacgtggccgagcaaatctccaaaatgatggagctggccagagagaaacaggcggcagagctgaaggccctgaaggagacgtcggagaacgacaccaaagagatgaagaaaaagctggagacaaagagactggagcggatccagggcatgaccaaagtcaccacagacaagatggcccaggagaggttgaagagagagattaacaactcccacatccaggaagtagtgcaggtgatcaagcagatgacggagaacttggagaggcaccaggagaagctggaggagaagcaggcggcttgcctggaacagatacgggagatggaaaagcagttccagaaggaggcgctggcagagtacgaggccaggatgaagggtctggaggcagaggtgaaggagtcggtgagggcctgcctcaggacctgctttccctccgaggccaaggacaagcctgagagggcctgcgagtgccccccagagctgtgtgagcaggacccactcatagcaaaggcagatgcccaggagagccgcctctgatgcccccatcccactgggacatttagcaaggaggttcagccccttctctgggatgtggttctattcccccaggaaaaaggagccccagccttctgaggctgtgggaacctgtggctgccttggacgctgcagccccctcctcaacggccaggccagagtctgagacaggacccaggcaccctcacggcagggcctctctggggcctagaagtcttctcaagctgacttcctacctccccctccatctctagataagtgtcatatatttgttgagggcaaaagactatggactggaaggcagaaagtgggatcctggccccactctgcctttcctattgagcaaccagctctgggctcagtttcctcacctggagggttggacccactcacctccactctagccccgaaccctcctgccccaggcttccaggccccatcaggcctgccctgagttggccttgtccactccttgaggcagatcctggcactacctcacagctccctggggacggccactccctggctgagggccctcccctcccctctgcctgtccggaacgggaggctgaaatggaaaagctgccttggccctgcttggctgagtcacaaggggcagtgggctcttgggtgctgttccaccctgaccctggctcacccctcttcctaggcctgggggcaggcagttcctaccatgtacccctctcaggctgcctgcctgacaaggtcagcatcatttgctctcctgaatttatgaggtttatttatttttctctttcctactcctattaaagaacctcgtcccagtgaaaaaaccaaacagggaacaaagacaaaagacacaacagaagcaaaaaagaaacaacagggggggggggcaagaaataagc

SEQ ID NO: 311975 - DNA, 4330 bp, Homo sapiens
tggcaggcagggcgggtgggaggagggtgatttacaaggcagatgggcctctggctacagctcagtcctgcactcagccagggccaccccaggggctataagagcaactagatttctggagcagctcggggatgggtgccatttgagcccagcttggctccccctcctggctggcctccttcctgcccttctgcctgcctgtgtctgctgagattctgcaaagaggaacgcttggcaccatgtctctgctcaaccctgtcctgctgccccccaaggtgaaggcctatctgagccaaggggagcgcttcatcaaatgggatgatgaaactacagttgcctctccagttatcctccgtgtggatcctaagggctactacttatactggacgtatcaaagtaaggagatggagtttctggatatcaccagcatccgggatactcgctttgggaagtttgccaagatgcccaagagccagaagctccgggacgtcttcaacatggactttcctgataacagtttcctgctgaagacactcacggtggtgtccggcccggacatggtggacctcaccttccacaacttcgtctcctacaaggagaacgtgggcaaggcctgggctgaggacgtactggccctagtcaaacatccgctgacggccaacgcctcccgcagcaccttcctggacaagatccttgtgaagctcaagatgcagctcaactctgaagggaagattccggtgaagaactttttccagatgtttcctgctgaccgcaagcgggtggaagctgctctcagtgcctgccacctccccaaaggcaaaaatgacgccatcaatcctgaggacttcccagaacctgtctacaagagtttcctcatgagcctctgtcctcggccagaaatagatgagatcttcacttcttaccatgctaaggccaaaccctacatgacgaaggagcacctgaccaaattcatcaaccagaaacagcgggactcccggcttaactccctgctgttcccgccagcacggcctgaccaggtgcagggcctcatcgacaagtatgagcccagtggcatcaatgcacagaggggccagctgtcacctgaaggcatggtctggtttctctgtgggccagagaacagcgtgctggcccaggacaagctgctgctccaccacgacatgacgcagccactcaatcattacttcatcaactcgtcccacaacacctacctgacagccggccagttctcaggcctctcctcggctgagatgtaccgccaggtgctgctctctggctgccgttgcgtggagctagactgctggaaggggaaaccccctgacgaggagcccattatcacccatggcttcaccatgaccacagacatcttcttcaaagaagcaattgaggctattgcagaaagtgcctttaagacctccccctatcccatcatcctgtcgtttgagaaccatgtggactcaccccgccagcaggctaagatggctgagtattgccggacgatctttggggatatgctgctcacagagcccctggaaaagttcccactaaaaccaggtgtccccctgcccagccctgaggatctcaggggcaagatcctcatcaagaacaagaagaaccagttttctggccccacctcctccagtaaggataccggtggggaggctgagggcagcagcccacccagtgcccctgcaggtgagggcacagtgtgggctggcgaggaagggactgagctggaggaggaggaggtggaagaggaagaggaggaggagtcaggaaacctggatgaagaagagattaagaagatgcagtcggatgagggcacagcgggcctggaagtgacggcttatgaggagatgtccagcctagtcaattacatccagcccaccaagttcgtctcctttgagttctctgcccaaaagaaccgaagttatgtcatctcgtccttcacagagctcaaggcatatgacctgctctccaaggcctcggtgcagtttgtggactacaacaagcgccagatgagccgcatttaccccaagggaacccgcatggactcctccaactacatgccccagatgttctggaatgctggatgccagatggttgccctcaacttccagacgatggacttgcccatgcagcagaacatggcagtatttgagttcaacgggcagagcggctacctcctcaagcatgagttcatgcgccggccggacaagcagttcaaccccttctcagtggaccgcatcgacgtggtggtggccaccaccctttccattacggtgatctctgggcagttcctgtcagaacgcagcgtgcgcacctatgtagaagtggagctgtttggccttcctggggaccccaagaggcgctatcgaactaagctgtcacccagtactaactccatcaatcctgtctggaaggaggagccctttgtctttgagaagatcttgatgcctgagctggcctccctcagagtggctgtgatggaggaaggcaacaagtttcttggacaccgcatcatccccatcaatgccctaaattctgggtaccaccacctgtgcctgcacagtgagagcaacatgcccctcaccatgcctgcgctcttcatcttcctggagatgaaggactacatacctggtgcttgggcagatctcactgtggccctcgccaaccccattaagttcttcagtgcccatgacacgaagtctgtgaagctcaaggaggccatgggaggtctgcctgagaagcccttcccactggcgagtccagttgccagccaggtcaatggggcgttggccccaacgagcaatgggtcaccagcagccagggccggggccagggaagaggctatgaaagaagctgcggagccgcggaccgccagcctggaggagctccgggagctaaagggcgtggtgaagctgcagcggcggcacgagaaggagctgcgagagttggagcggcgcggagcgcggcgctgggaggagctgctgcagcggggcgcggcgcagctggcggagctcgggccaccgggcgtggggggcgtcggggcctgcaagctcggtcccggcaagggctctcgcaagaagagcaaatctccaaaatgatggagctggccagagagaaacaggcggcagagctgaaggccctgaaggagacgtcggagaagtacgactgcctccctcccacacctgcttcgcctcccagcaagggctcagccgcacaaaacagctccttcatgcctgtctctctgcagcgacaccaaagagatgaagaaaaagctggagacaaagagactggagcggatccagggcatgaccaaagtcaccacagacaagatggcccaggagaggttgaagagagagattaacaactcccacatccaggaagtagtgcaggtgatcaagcagatgacggagaacttggagaggcaccaggagaagctggaggagaagcaggcggcttgcctggaacagatacgggagatggaaaagcaggaaaaaggagccccagccttctgaggctgtgggaacctgtggctgccttggacgctgcagccccctcctcaacggccaggccagagtctgagacaggacccaggcaccctcacggcagggcctctctggggcctagaagtcttctcaagctgacttcctacctccccctccatctctagataagtgtcatatatttgttgagggcaaaagactatggactggaaggcagaaagtgggatcctggccccactctgcctttcctattgagcaaccagctctgggctcagtttcctcacctggagggttggacccactcacctccactctagccccgaaccctcctgccccaggcttccaggccccatcaggcctgccctgagttggccttgtccactccttgaggcagatcctggcactacctcacagctccctggggacggccactccctggctgagggccctcccctcccctctgcctgtccggaacgggaggctgaaatggaaaagctgccttggccctgcttggctgagtcacaaggggcagtgggctcttgggtgctgttccaccctgaccctggctcacccctcttcctaggcctgggggcaggcagttcctaccatgtacccctctcaggctgcctgcctgacaaggtcagcatcatttgctctcctgaatttatgaggtttatttatttttctctttcctactcctattaaagaacctcgtcccagtgaaaaaaccaaacagggaacaaagacaaaagacacaacagaagcaaaaaagaaacaacagggggggggggcaagaaataagc

SEQ ID NO: 311976 - DNA, 1087 bp, Homo sapiens
cgaaacgtccccgggccagtacggatgtgcggatgaagggtctggaggcagaggtgaaggagtcggtgagggcctgcctcaggacctgctttccctccgaggccaaggacaagcctgagagggcctgcgagtgccccccagagctgtgtgagcaggacccactcatagcaaaggcagatgcccaggagagccgcctctgatgcccccatcccactgggacatttagcaaggaggttcagccccttctctgggatgtggttctattcccccaggaaaaaggagccccagccttctgaggctgtgggaacctgtggctgccttggacgctgcagccccctcctcaacggccaggccagagtctgagacaggacccaggcaccctcacggcagggcctctctggggcctagaagtcttctcaagctgacttcctacctccccctccatctctagataagtgtcatatatttgttgagggcaaaagactatggactggaaggcagaaagtgggatcctggccccactctgcctttcctattgagcaaccagctctgggctcagtttcctcacctggagggttggacccactcacctccactctagccccgaaccctcctgccccaggcttccaggccccatcaggcctgccctgagttggccttgtccactccttgaggcagatcctggcactacctcacagctccctggggacggccactccctggctgagggccctcccctcccctctgcctgtccggaacgggaggctgaaatggaaaagctgccttggccctgcttggctgagtcacaaggggcagtgggctcttgggtgctgttccaccctgaccctggctcacccctcttcctaggcctgggggcaggcagttcctaccatgtacccctctcaggctgcctgcctgacaaggtcagcatcatttgctctcctgaatttatgaggtttatttatttttctctttcctactcctattaaagaacctcgtcccagtgaaaaaaccaaacagggaacaaagacaaaagacacaacagaagcaaaaaagaaacaacagggggggggggcaagaaataagc

SEQ ID NO: 311977 - DNA, 4010 bp, Homo sapiens
tggcaggcagggcgggtgggaggagggtgatttacaaggcagatgggcctctggctacagctcagtcctgcactcagccagggccaccccaggggctataagagcaactagatttctggagcagctcggggatgggtgccatttgagcccagcttggctccccctcctggctggcctccttcctgcccttctgcctgcctgtgtctgctgagattctgcaaagaggaacgcttggcaccatgtctctgctcaaccctgtcctgctgccccccaaggtgaaggcctatctgagccaaggggagcgcttcatcaaatgggatgatgaaactacagttgcctctccagttatcctccgtgtggatcctaagggctactacttatactggacgtatcaaagtaaggagatggagtttctggatatcaccagcatccgggatactcgctttgggaagtttgccaagatgcccaagagccagaagctccgggacgtcttcaacatggactttcctgataacagtttcctgctgaagacactcacggtggtgtccggcccggacatggtggacctcaccttccacaacttcgtctcctacaaggagaacgtgggcaaggcctgggctgaggacgtactggccctagtcaaacatccgctgacggccaacgcctcccgcagcaccttcctggacaagatccttgtgaagctcaagatgcagctcaactctgaagggaagattccggtgaagaactttttccagatgtttcctgctgaccgcaagcgggtggaagctgctctcagtgcctgccacctccccaaaggcaaaaatgacgccatcaatcctgaggacttcccagaacctgtctacaagagtttcctcatgagcctctgtcctcggccagaaatagatgagatcttcacttcttaccatgctaaggccaaaccctacatgacgaaggagcacctgaccaaattcatcaaccagaaacagcgggactcccggcttaactccctgctgttcccgccagcacggcctgaccaggtgcagggcctcatcgacaagtatgagcccagtggcatcaatgcacagaggggccagctgtcacctgaaggcatggtctggtttctctgtgggccagagaacagcgtgctggcccaggacaagctgctgctccaccacgacatgacgcagccactcaatcattacttcatcaactcgtcccacaacacctacctgacagccggccagttctcaggcctctcctcggctgagatgtaccgccaggtgctgctctctggctgccgttgcgtggagctagactgctggaaggggaaaccccctgacgaggagcccattatcacccatggcttcaccatgaccacagacatcttcttcaaagaagcaattgaggctattgcagaaagtgcctttaagacctccccctatcccatcatcctgtcgtttgagaaccatgtggactcaccccgccagcaggctaagatggctgagtattgccggacgatctttggggatatgctgctcacagagcccctggaaaagttcccactaaaaccaggtgtccccctgcccagccctgaggatctcaggggcaagatcctcatcaagaacaagaagaaccagttttctggccccacctcctccagtaaggataccggtggggaggctgagggcagcagcccacccagtgcccctgcaggtgagggcacagtgtgggctggcgaggaagggactgagctggaggaggaggaggtggaagaggaagaggaggaggagtcaggaaacctggatgaagaagagattaagaagatgcagtcggatgagggcacagcgggcctggaagtgacggcttatgaggagatgtccagcctagtcaattacatccagcccaccaagttcgtctcctttgagttctctgcccaaaagaaccgaagttatgtcatctcgtccttcacagagctcaaggcatatgacctgctctccaaggcctcggtgcagtttgtggactacaacaagcgccagatgagccgcatttaccccaagggaacccgcatggactcctccaactacatgccccagatgttctggaatgctggatgccagatggttgccctcaacttccagacgatggacttgcccatgcagcagaacatggcagtatttgagttcaacgggcagagcggctacctcctcaagcatgagttcatgcgccggccggacaagcagttcaaccccttctcagtggaccgcatcgacgtggtggtggccaccaccctttccattacggtgatctctgggcagttcctgtcagaacgcagcgtgcgcacctatgtagaagtggagctgtttggccttcctggggaccccaagaggcgctatcgaactaagctgtcacccagtactaactccatcaatcctgtctggaaggaggagccctttgtctttgagaagatcttgatgcctgagctggcctccctcagagtggctgtgatggaggaaggcaacaagtttcttggacaccgcatcatccccatcaatgccctaaattctgggtaccaccacctgtgcctgcacagtgagagcaacatgcccctcaccatgcctgcgctcttcatcttcctggagatgaaggactacatacctggtgcttgggcagatctcactgtggccctcgccaaccccattaagttcttcagtgcccatgacacgaagtctgtgaagctcaaggaggccatgggaggtctgcctgagaagcccttcccactggcgagtccagttgccagccaggtcaatggggcgttggccccaacgagcaatgggtcaccagcagccagggccggggccagggaagaggctatgaaagaagctgcggagccgcggaccgccagcctggaggagctccgggagctaaagggcgtggtgaagctgcagcggcggcacgagaaggagctgcgagagttggagcggcgcggagcgcggcgctgggaggagctgctgcagcggggcgcggcgcagctggcggagctcgggccaccgggcgtggggggcgtcggggcctgcaagctcggtcccggcaagggctctcgcaagaagaggagcctgccccgcgaggagagcgccggagccgcgccgggcgagggccctgagggcgtggacgggcgcgtgcgggagctgaaagacaggctggagctggagctgctgcggcagggcgaggagcagtacgagtgcgttctgaagcgcaaggagcagcacgtggccgagcaaatctccaaaatgatggagctggccagagagaaacaggcggcagagctgaaggccctgaaggagacgtcggagaacgacaccaaagagatgaagaaaaagctggagacaaagagactggagcggatccagggcatgaccaaagtcaccacagacaagatggcccaggagaggttgaagagagagattaacaactcccacatccaggaagtagtgcaggtgatcaagcagatgacggagaacttggagaggcaccaggagaagctggaggagaagcaggcggcttgcctggaacagatacgggagatggaaaagcagttccagaaggaggcgctggcagagtacgaggccaggatgaagggtctggaggcagaggtgaaggagtcggtgagggcctgcctcaggacctgctttccctccgaggccaaggacaagcctgagagggcctgcgagtgccccccagagctgtgtgagcaggacccactcatagcaaaggcagatgcccaggagagccgcctctgatgcccccatcccactgggacatttagcaaggaggttcagccccttctctgggatgtggttctattcccccaggaaaaaggagccccagccttctgaggctgtgggaacctgtggctgcctgcctgacaaggtcagcatcatttgctctcctgaatttatgaggtttatttatttttctctttcctactcctattaaagaacctcgtcccagtg

SEQ ID NO: 311978 - DNA, 3410 bp, Homo sapiens
tggcaggcagggcgggtgggaggagggtgatttacaaggcagatgggcctctggctacagctcagtcctgcactcagccagggccaccccaggggctataagagcaactagatttctggagcagctcggggatgggtgccatttgagcccagcttggctccccctcctggctggcctccttcctgcccttctgcctgcctgtgtctgctgagattctgcaaagaggaacgcttggcaccatgtctctgctcaaccctgtcctgctgccccccaaggtgaaggcctatctgagccaaggggagcgcttcatcaaatgggatgatgaaactacagttgcctctccagttatcctccgtgtggatcctaagggctactacttatactggacgtatcaaagtaaggagatggagtttctggatatcaccagcatccgggatactcgctttgggaagtttgccaagatgcccaagagccagaagctccgggacgtcttcaacatggactttcctgataacagtttcctgctgaagacactcacggtggtgtccggcccggacatggtggacctcaccttccacaacttcgtctcctacaaggagaacgtgggcaaggcctgggctgaggacgtactggccctagtcaaacatccgctgacggccaacgcctcccgcagcaccttcctggacaagatccttgtgaagctcaagatgcagctcaactctgaagggaagattccggtgaagaactttttccagatgtttcctgctgaccgcaagcgggtggaagctgctctcagtgcctgccacctccccaaaggcaaaaatgacgccatcaatcctgaggacttcccagaacctgtctacaagagtttcctcatgagcctctgtcctcggccagaaatagatgagatcttcacttcttaccatgctaaggccaaaccctacatgacgaaggagcacctgaccaaattcatcaaccagaaacagcgggactcccggcttaactccctgctgttcccgccagcacggcctgaccaggtgcagggcctcatcgacaagtatgagcccagtggcatcaatgcacagaggggccagctgtcacctgaaggcatggtctggtttctctgtgggccagagaacagcgtgctggcccaggacaagctgctgctccaccacgacatgacgcagccactcaatcattacttcatcaactcgtcccacaacacctacctgacagccggccagttctcaggcctctcctcggctgagatgtaccgccaggtgctgctctctggctgccgttgcgtggagctagactgctggaaggggaaaccccctgacgaggagcccattatcacccatggcttcaccatgaccacagacatcttcttcaaagaagcaattgaggctattgcagaaagtgcctttaagacctccccctatcccatcatcctgtcgtttgagaaccatgtggactcaccccgccagcaggctaagatggctgagtattgccggacgatctttggggatatgctgctcacagagcccctggaaaagttcccactaaaaccaggtgtccccctgcccagccctgaggatctcaggggcaagatcctcatcaagaacaagaagaaccagttttctggccccacctcctccagtaaggataccggtggggaggctgagggcagcagcccacccagtgcccctgcaggtgagggcacagtgtgggctggcgaggaagggactgagctggaggaggaggaggtggaagaggaagaggaggaggagtcaggaaacctggatgaagaagagattaagaagatgcagtcggatgagggcacagcgggcctggaagtgacggcttatgaggagatgtccagcctagtcaattacatccagcccaccaagttcgtctcctttgagttctctgcccaaaagaaccgaagttatgtcatctcgtccttcacagagctcaaggcatatgacctgctctccaaggcctcggtgcagtttgtggactacaacaagcgccagatgagccgcatttaccccaagggaacccgcatggactcctccaactacatgccccagatgttctggaatgctggatgccagatggttgccctcaacttccagacgatggacttgcccatgcagcagaacatggcagtatttgagttcaacgggcagagcggctacctcctcaagcatgagttcatgcgccggccggacaagcagttcaaccccttctcagtggaccgcatcgacgtggtggtggccaccaccctttccattacggtgatctctgggcagttcctgtcagaacgcagcgtgcgcacctatgtagaagtggagctgtttggccttcctggggaccccaagaggcgctatcgaactaagctgtcacccagtactaactccatcaatcctgtctggaaggaggagccctttgtctttgagaagatcttgatgcctgagctggcctccctcagagtggctgtgatggaggaaggcaacaagtttcttggacaccgcatcatccccatcaatgccctaaattctgggtaccaccacctgtgcctgcacagtgagagcaacatgcccctcaccatgcctgcgctcttcatcttcctggagatgaaggactacatacctggtgcttgggcagatctcactgtggccctcgccaaccccattaagttcttcagtgcccatgacacgaagtctgtgaagctcaaggaggccatgggaggtctgcctgagaagcccttcccactggcgagtccagttgccagccaggtcaatggggcgttggccccaacgagcaatgggtcaccagcagccagggccggggccagggaagaggctatgaaagaagctgcggagccgcggaccgccagcctggaggagctccgggagctaaagggcgtggtgaagctgcagcggcggcacgagaaggagctgcgagagttggagcggcgcggagcgcggcgctgggaggagctgctgcagcggggcgcggcgcagctggcggagctcgggccaccgggcgtggggggcgtcggggcctgcaagctcggtcccggcaagggctctcgcaagaagaggagcctgccccgcgaggagagcgccggagccgcgccgggcgagggccctgagggcgtggacgggcgcgtgcgggagctgaaagacaggctggagctggagctgctgcggcagggcgaggagcagtacgagtgcgttctgaagcgcaaggagcagcacgtggccgagcaaatctccaaaatgatggagctggccagagagaaacaggcggcagagctgaaggccctgaaggagacgtcggagaacgacaccaaagagacagaaagagagagagagagagagagagagagagagagagagagc

SEQ ID NO: 311979 - DNA, 1651 bp, Homo sapiens
tggcaggcagggcgggtgggaggagggtgatttacaaggcagatgggcctctggctacagctcagtcctgcactcagccagggccaccccaggggctataagagcaactagatttctggagcagctcggggatgggtgccatttgagcccagcttggctccccctcctggctggcctccttcctgcccttctgcctgcctgtgtctgctgagattctgcaaagaggaacgcttggcaccatgtctctgctcaaccctgtcctgctgccccccaaggtgaaggcctatctgagccaaggggagcgcttcatcaaatgggatgatgaaactacagttgcctctccagttatcctccgtgtggatcctaagggctactacttatactggacgtatcaaagtaaggagatggagtttctggatatcaccagcatccgggatactcgctttgggaagtttgccaagatgcccaagagccagaagctccgggacgtcttcaacatggactttcctgataacagtttcctgctgaagacactcacggtggtgtccggcccggacatggtggacctcaccttccacaacttcgtctcctacaaggagaacgtgggcaaggcctgggctgaggacgtactggccctagtcaaacatccgctgacggccaacgcctcccgcagcaccttcctggacaagatccttgtgaagctcaagatgcagctcaactctgaagggaagattccggtgaagaactttttccagatgtttcctgctgaccgcaagcgggtggaagctgctctcagtgcctgccacctccccaaaggcaaacctggaggagcgagataaggtcggcagtggcaggcggcagtctgcagggatctggaagtctgcagcgtgtcgagggagaggaactgaaccaaaggcggaagctgccaagatgcagacttctgctctgtacagaaaagcatttttccctgtctttttagttaaataattaatttttaattacaagttgtaagcagggtcaccccatgaagcaacttgtgtgaattacaaaaaggagccctctgggctgatatggccctgagctaggcttcaagcctggccaatggagcgaatctcagcccctgtccctgcttggccagtgctcttgtgtgggtcccagcctataccccatggagtattttctcctggtaagaatttggaacgttataaataaataaaaccacgacccccattgatcacctgcccacatgaatcccaggaggagcatttaccccacagccacagctctgcagagttggtgactccttgatgcagtcagtcacagggatccaaatgtggcgttggggagaggtaggaatgggctcctgcggctcccctacagccagcaacacttacctgtggtcagcacacatccaccctccctctctcctgccgcctgagctcctcccttggctaagtcctccttatctatctgctttccttgtgtctcagtagaggctactgacccaactttgcttggagctgaagctccagagacagggaggggaaggaatgcaaaggtgcagaatccctgaataccacaaatgtacttttcatttctatttctatagatttgcctattctggtggtaaagtaaatgaaatcataaatat

SEQ ID NO: 311980 - DNA, 493 bp, Homo sapiens
tgtccttgaagttcttctgtctgccttgagcccgccttctgaccaggtccccttgaccagggctggccgagtttgtggttcttagctctgagaaggtgagggcaggggcaataaggttactatgcccctagaatgacgccatcaatcctgaggacttcccagaacctgtctacaagagtttcctcatgagcctctgtcctcggccagaaatagatgagatcttcacttcttagtgagtttcttgggttgtgctggtcatgggaaaagggtggtggctaacaatcccctcctcccacctgccatgccgggagtcaggaggcttcactggacaagggggttgtctaagcctccaggcccaagggatatggacctgtgctcttctctctggcttgaagccatgctaaggccaaaccctacatgacgaaggagcacctgaccaaattcatcaaccagaaacagcgggactcccggcttaactccctgctgttcccgc

SEQ ID NO: 311981 - DNA, 4684 bp, Homo sapiens
tggcaggcagggcgggtgggaggagggtgatttacaaggcagatgggcctctggctacagctcagtcctgcactcagccagggccaccccaggggctataagagcaactagatttctggagcagctcggggatgggtgccatttgagcccagcttggctccccctcctggctggcctccttcctgcccttctgcctgcctgtgtctgctgagattctgcaaagaggaacgcttggcaccatgtctctgctcaaccctgtcctgctgccccccaaggtgaaggcctatctgagccaaggggagcgcttcatcaaatgggatgatgaaactacagttgcctctccagttatcctccgtgtggatcctaagggctactacttatactggacgtatcaaagtaaggagatggagtttctggatatcaccagcatccgggatactcgctttgggaagtttgccaagatgcccaagagccagaagctccgggacgtcttcaacatggactttcctgataacagtttcctgctgaagacactcacggtggtgtccggcccggacatggtggacctcaccttccacaacttcgtctcctacaaggagaacgtgggcaaggcctgggctgaggacgtactggccctagtcaaacatccgctgacggccaacgcctcccgcagcaccttcctggacaagatccttgtgaagctcaagatgcagctcaactctgaagggaagattccggtgaagaactttttccagatgtttcctgctgaccgcaagcgggtggaagctgctctcagtgcctgccacctccccaaaggcaaaaatgacgccatcaatcctgaggacttcccagaacctgtctacaagagtttcctcatgagcctctgtcctcggccagaaatagatgagatcttcacttcttaccatgctaaggccaaaccctacatgacgaaggagcacctgaccaaattcatcaaccagaaacagcgggactcccggcttaactccctgctgttcccgccagcacggcctgaccaggtgcagggcctcatcgacaagtatgagcccagtggcatcaatgcacagaggggccagctgtcacctgaaggcatggtctggtttctctgtgggccagagaacagcgtgctggcccaggacaagctgctgctccaccacgacatgacgcagccactcaatcattacttcatcaactcgtcccacaacacctacctgacagccggccagttctcaggcctctcctcggctgagatgtaccgccaggtgctgctctctggctgccgttgcgtggagctagactgctggaaggggaaaccccctgacgaggagcccattatcacccatggcttcaccatgaccacagacatcttcttcaaagaagcaattgaggctattgcagaaagtgcctttaagacctccccctatcccatcatcctgtcgtttgagaaccatgtggactcaccccgccagcaggctaagatggctgagtattgccggacgatctttggggatatgctgctcacagagcccctggaaaagttcccactaaaaccaggtgtccccctgcccagccctgaggatctcaggggcaagatcctcatcaagaacaagaagaaccagttttctggccccacctcctccagtaaggataccggtggggaggctgagggcagcagcccacccagtgcccctgcaggtgagggcacagtgtgggctggcgaggaagggactgagctggaggaggaggaggtggaagaggaagaggaggaggagtcaggaaacctggatgaagaagagattaagaagatgcagtcggatgagggcacagcgggcctggaagtgacggcttatgaggagatgtccagcctagtcaattacatccagcccaccaagttcgtctcctttgagttctctgcccaaaagaaccgaagttatgtcatctcgtccttcacagagctcaaggcatatgacctgctctccaaggcctcggtgcagtttgtggactacaacaagcgccagatgagccgcatttaccccaagggaacccgcatggactcctccaactacatgccccagatgttctggaatgctggatgccagatggttgccctcaacttccagacgatggacttgcccatgcagcagaacatggcagtatttgagttcaacgggcagagcggctacctcctcaagcatgagttcatgcgccggccggacaagcagttcaaccccttctcagtggaccgcatcgacgtggtggtggccaccaccctttccattacggtgatctctgggcagttcctgtcagaacgcagcgtgcgcacctatgtagaagtggagctgtttggccttcctggggaccccaagaggcgctatcgaactaagctgtcacccagtactaactccatcaatcctgtctggaaggaggagccctttgtctttgagaagatcttgatgcctgagctggcctccctcagagtggctgtgatggaggaaggcaacaagtttcttggacaccgcatcatccccatcaatgccctaaattctgggtaccaccacctgtgcctgcacagtgagagcaacatgcccctcaccatgcctgcgctcttcatcttcctggagatgaaggactacatacctggtgcttgggcagatctcactgtggccctcgccaaccccattaagttcttcagtgcccatgacacgaagtctgtgaagctcaaggaggccatgggaggtctgcctgagaagcccttcccactggcgagtccagttgccagccaggtcaatggggcgttggccccaacgagcaatgggtcaccagcagccagggccggggccagggaagaggctatgaaagaagctgcggagccgcggaccgccagcctggaggagctccgggagctaaagggcgtggtgaagctgcagcggcggcacgagaaggagctgcgagagttggagcggcgcggagcgcggcgctgggaggagctgctgcagcggggcgcggcgcagctggcggagctcgggccaccgggcgtggggggcgtcggggcctgcaagctcggtcccggcaagggctctcgcaagaagaggagcctgccccgcgaggagagcgccggagccgcgccgggcgagggccctgagggcgtggacgggcgcgtgcgggagctgaaagacaggctggagctggagctgctgcggcagggcgaggagcagtacgagtgcgttctgaagcgcaaggagcagcacgtggccgagcaaatctccaaaatgatggagctggccagagagaaacaggcggcagagctgaaggccctgaaggagacgtcggagaacgacaccaaagagatgaagaaaaagctggagacaaagagactggagcggatccagggcatgaccaaagtcaccacagacaagatggcccaggagaggttgaagagagagattaacaactcccacatccaggaagtagtgcaggtgatcaagcagatgacggagaacttggagaggcaccaggagaagctggaggagaagcaggcggcttgcctggaacagatacgggagatggaaaagcagttccagaaggaggcgctggcagagtacgaggccaggatgaagggtctggaggcagaggtgaaggagtcggtgagggcctgcctcaggacctgctttccctccgaggccaaggacaagcctgagagggcctgcgagtgccccccagagctgtgtgagcaggacccactcatagcaaaggcagatgcccaggagagccgcctctgatgcccccatcccactgggacatttagcaaggaggttcagccccttctctgggatgtggttctattcccccaggaaaaaggagccccagccttctgaggctgtgggaacctgtggctgccttggacgctgcagccccctcctcaacggccaggccagagtctgagacaggacccaggcaccctcacggcagggcctctctggggcctagaagtcttctcaagctgacttcctacctccccctccatctctagataagtgtcatatatttgttgagggcaaaagactatggactggaaggcagaaagtgggatcctggccccactctgcctttcctattgagcaaccagctctgggctcagtttcctcacctggagggttggacccactcacctccactctagccccgaaccctcctgccccaggcttccaggccccatcaggcctgccctgagttggccttgtccactccttgaggcagatcctggcactacctcacagctccctggggacggccactccctggctgagggccctcccctcccctctgcctgtccggaacgggaggctgaaatggaaaagctgccttggccctgcttggctgagtcacaaggggcagtgggctcttgggtgctgttccaccctgaccctggctcacccctcttcctaggcctgggggcaggcagttcctaccatgtacccctctcaggctgcctgcctgacaaggtcagcatcatttgctctcctgaatttatgaggtttatttatttttctctttcctactcctattaaagaacctcgtcccagtgaaaaaaccaaacagggaacaaagacaaaagacacaacagaagcaaaaaagaaacaacagggggggggggcaagaaataagc

SEQ ID NO: 311982 - DNA, 4647 bp, Homo sapiens
tggcaggcagggcgggtgggaggagggtgatttacaaggcagatgggcctctggctacagctcagtcctgcactcagccagggccaccccaggggctataagagcaactagatttctggagcagctcggggatgggtgccatttgagcccagcttggctccccctcctggctggcctccttcctgcccttctgcctgcctgtgtctgctgagattctgcaaagaggaacgcttggcaccatgtctctgctcaaccctgtcctgctgccccccaaggtgaaggcctatctgagccaaggggagcgcttcatcaaatgggatgatgaaactacagttgcctctccagttatcctccgtgtggatcctaagggctactacttatactggacgtatcaaagtaaggagatggagtttctggatatcaccagcatccgggatactcgctttgggaagtttgccaagatgcccaagagccagaagctccgggacgtcttcaacatggactttcctgataacagtttcctgctgaagacactcacggtggtgtccggcccggacatggtggacctcaccttccacaacttcgtctcctacaaggagaacgtgggcaaggcctgggctgaggacgtactggccctagtcaaacatccgctgacggccaacgcctcccgcagcaccttcctggacaagatccttgtgaagctcaagatgcagctcaactctgaagggaagattccggtgaagaactttttccagatgtttcctgctgaccgcaagcgggtggaagctgctctcagtgcctgccacctccccaaaggcaaaaatgacgccatcaatcctgaggacttcccagaacctgtctacaagagtttcctcatgagcctctgtcctcggccagaaatagatgagatcttcacttcttaccatgctaaggccaaaccctacatgacgaaggagcacctgaccaaattcatcaaccagaaacagcgggactcccggcttaactccctgctgttcccgccagcacggcctgaccaggtgcagggcctcatcgacaagtatgagcccagtggcatcaatgcacagaggggccagctgtcacctgaaggcatggtctggtttctctgtgggccagagaacagcgtgctggcccaggacaagctgctgctccaccacgacatgacgcagccactcaatcattacttcatcaactcgtcccacaacacctacctgacagccggccagttctcaggcctctcctcggctgagatgtaccgccaggtgctgctctctggctgccgttgcgtggagctagactgctggaaggggaaaccccctgacgaggagcccattatcacccatggcttcaccatgaccacagacatcttcttcaaagaagcaattgaggctattgcagaaagtgcctttaagacctccccctatcccatcatcctgtcgtttgagaaccatgtggactcaccccgccagcaggctaagatggctgagtattgccggacgatctttggggatatgctgctcacagagcccctggaaaagttcccactaaaaccaggtgtccccctgcccagccctgaggatctcaggggcaagatcctcatcaagaacaagaagaaccagttttctggccccacctcctccagtaaggataccggtggggaggctgagggcagcagcccacccagtgcccctgcaggtgagggcacagtgtgggctggcgaggaagggactgagctggaggaggaggaggtggaagaggaagaggaggaggagtcaggaaacctggatgaagaagagattaagaagatgcagtcggatgagggcacagcgggcctggaagtgacggcttatgaggagatgtccagcctagtcaattacatccagcccaccaagttcgtctcctttgagttctctgcccaaaagaaccgaagttatgtcatctcgtccttcacagagctcaaggcatatgacctgctctccaaggcctcggtgcagtttgtggactacaacaagcgccagatgagccgcatttaccccaagggaacccgcatggactcctccaactacatgccccagatgttctggaatgctggatgccagatggttgccctcaacttccagacgatggacttgcccatgcagcagaacatggcagtatttgagttcaacgggcagagcggctacctcctcaagcatgagttcatgcgccggccggacaagcagttcaaccccttctcagtggaccgcatcgacgtggtggtggccaccaccctttccattacggtgatctctgggcagttcctgtcagaacgcagcgtgcgcacctatgtagaagtggagctgtttggccttcctggggaccccaagaggcgctatcgaactaagctgtcacccagtactaactccatcaatcctgtctggaaggaggagccctttgtctttgagaagatcttgatgcctgagctggcctccctcagagtggctgtgatggaggaaggcaacaagtttcttggacaccgcatcatccccatcaatgccctaaattctgggtaccaccacctgtgcctgcacagtgagagcaacatgcccctcaccatgcctgcgctcttcatcttcctggagatgaaggactacatacctggtgcttgggcagatctcactgtggccctcgccaaccccattaagttcttcagtgcccatgacacgaagtctgtgaagctcaaggaggccatgggaggtctgcctgagaagcccttcccactggcgagtccagttgccagccaggtcaatggggcgttggccccaacgagcaatgggtcaccagcagccagggccggggccagggaagaggctatgaaagaagctgcggagccgcggaccgccagcctggaggagctccgggagctaaagggcgtggtgaagctgcagcggcggcacgagaaggagctgcgagagttggagcggcgcggagcgcggcgctgggaggagctgctgcagcggggcgcggcgcagctggcggagctcgggccaccgggcgtggggggcgtcggggcctgcaagctcggtcccggcaagggctctcgcaagaagaggagcctgccccgcgaggagagcgccggagccgcgccgggcgagggccctgagggcgtggacgggcgcgtgcgggagctgaaagacaggctggagctggagctgctgcggcagggcgaggagcagtacgacaaatctccaaaatgatggagctggccagagagaaacaggcggcagagctgaaggccctgaaggagacgtcggagaacgacaccaaagagatgaagaaaaagctggagacaaagagactggagcggatccagggcatgaccaaagtcaccacagacaagatggcccaggagaggttgaagagagagattaacaactcccacatccaggaagtagtgcaggtgatcaagcagatgacggagaacttggagaggcaccaggagaagctggaggagaagcaggcggcttgcctggaacagatacgggagatggaaaagcagttccagaaggaggcgctggcagagtacgaggccaggatgaagggtctggaggcagaggtgaaggagtcggtgagggcctgcctcaggacctgctttccctccgaggccaaggacaagcctgagagggcctgcgagtgccccccagagctgtgtgagcaggacccactcatagcaaaggcagatgcccaggagagccgcctctgatgcccccatcccactgggacatttagcaaggaggttcagccccttctctgggatgtggttctattcccccaggaaaaaggagccccagccttctgaggctgtgggaacctgtggctgccttggacgctgcagccccctcctcaacggccaggccagagtctgagacaggacccaggcaccctcacggcagggcctctctggggcctagaagtcttctcaagctgacttcctacctccccctccatctctagataagtgtcatatatttgttgagggcaaaagactatggactggaaggcagaaagtgggatcctggccccactctgcctttcctattgagcaaccagctctgggctcagtttcctcacctggagggttggacccactcacctccactctagccccgaaccctcctgccccaggcttccaggccccatcaggcctgccctgagttggccttgtccactccttgaggcagatcctggcactacctcacagctccctggggacggccactccctggctgagggccctcccctcccctctgcctgtccggaacgggaggctgaaatggaaaagctgccttggccctgcttggctgagtcacaaggggcagtgggctcttgggtgctgttccaccctgaccctggctcacccctcttcctaggcctgggggcaggcagttcctaccatgtacccctctcaggctgcctgcctgacaaggtcagcatcatttgctctcctgaatttatgaggtttatttatttttctctttcctactcctattaaagaacctcgtcccagtgaaaaaaccaaacagggaacaaagacaaaagacacaacagaagcaaaaaagaaacaacagggggggggggcaagaaataagc

SEQ ID NO: 311983 - DNA, 4488 bp, Homo sapiens
tgggttgtctttttgttgacttatctcttatcggatatctgatttgcaaatattttatcccattctgtgggttaccttttcactttcttgatggtgtcctttgaagcacaaaagtttttaattttgatgacgtttaatttatctttctttgtcccggtgcttttggtgtctccaaatattattgttgaattgtcctcctttcaattctatcagtttttgttttatatattatggggttctgttgttaggtgcatatatgtttatattcaaattgcttctttttgaatatttgtcctccacttaaaaaagatagcctactagcctggcaagcagcatcatttcttctgacctcttttctacctcattctggttattcttagttccgatcctgccccagccaatggaatagccactgtacaaaatcagggtcagagcaaaccagctaagcatgctctctgctcagcaaccagggccttgagaagtggatgcttgggtgtccttgaagttcttctgtctgccttgagcccgccttctgaccaggtccccttgaccagggctggccgagtttgtggttcttagctctgagaaggtgagggcaggggcaataaggttactatgcccctagaatgacgccatcaatcctgaggacttcccagaacctgtctacaagagtttcctcatgagcctctgtcctcggccagaaatagatgagatcttcacttcttaccatgctaaggccaaaccctacatgacgaaggagcacctgaccaaattcatcaaccagaaacagcgggactcccggcttaactccctgctgttcccgccagcacggcctgaccaggtgcagggcctcatcgacaagtatgagcccagtggcatcaatgcacagaggggccagctgtcacctgaaggcatggtctggtttctctgtgggccagagaacagcgtgctggcccaggacaagctgctgctccaccacgacatgacgcagccactcaatcattacttcatcaactcgtcccacaacacctacctgacagccggccagttctcaggcctctcctcggctgagatgtaccgccaggtgctgctctctggctgccgttgcgtggagctagactgctggaaggggaaaccccctgacgaggagcccattatcacccatggcttcaccatgaccacagacatcttcttcaaagaagcaattgaggctattgcagaaagtgcctttaagacctccccctatcccatcatcctgtcgtttgagaaccatgtggactcaccccgccagcaggctaagatggctgagtattgccggacgatctttggggatatgctgctcacagagcccctggaaaagttcccactaaaaccaggtgtccccctgcccagccctgaggatctcaggggcaagatcctcatcaagaacaagaagaaccagttttctggccccacctcctccagtaaggataccggtggggaggctgagggcagcagcccacccagtgcccctgcaggtgagggcacagtgtgggctggcgaggaagggactgagctggaggaggaggaggtggaagaggaagaggaggaggagtcaggaaacctggatgaagaagagattaagaagatgcagtcggatgagggcacagcgggcctggaagtgacggcttatgaggagatgtccagcctagtcaattacatccagcccaccaagttcgtctcctttgagttctctgcccaaaagaaccgaagttatgtcatctcgtccttcacagagctcaaggcatatgacctgctctccaaggcctcggtgcagtttgtggactacaacaagcgccagatgagccgcatttaccccaagggaacccgcatggactcctccaactacatgccccagatgttctggaatgctggatgccagatggttgccctcaacttccagacgatggacttgcccatgcagcagaacatggcagtatttgagttcaacgggcagagcggctacctcctcaagcatgagttcatgcgccggccggacaagcagttcaaccccttctcagtggaccgcatcgacgtggtggtggccaccaccctttccattacggtgatctctgggcagttcctgtcagaacgcagcgtgcgcacctatgtagaagtggagctgtttggccttcctggggaccccaagaggcgctatcgaactaagctgtcacccagtactaactccatcaatcctgtctggaaggaggagccctttgtctttgagaagatcttgatgcctgagctggcctccctcagagtggctgtgatggaggaaggcaacaagtttcttggacaccgcatcatccccatcaatgccctaaattctgggtaccaccacctgtgcctgcacagtgagagcaacatgcccctcaccatgcctgcgctcttcatcttcctggagatgaaggactacatacctggtgcttgggcagatctcactgtggccctcgccaaccccattaagttcttcagtgcccatgacacgaagtctgtgaagctcaaggaggccatgggaggtctgcctgagaagcccttcccactggcgagtccagttgccagccaggtcaatggggcgttggccccaacgagcaatgggtcaccagcagccagggccggggccagggaagaggctatgaaagaagctgcggagccgcggaccgccagcctggaggagctccgggagctaaagggcgtggtgaagctgcagcggcggcacgagaaggagctgcgagagttggagcggcgcggagcgcggcgctgggaggagctgctgcagcggggcgcggcgcagctggcggagctcgggccaccgggcgtggggggcgtcggggcctgcaagctcggtcccggcaagggctctcgcaagaagaggagcctgccccgcgaggagagcgccggagccgcgccgggcgagggccctgagggcgtggacgggcgcgtgcgggagctgaaagacaggctggagctggagctgctgcggcagggcgaggagcagtacgagtgcgttctgaagcgcaaggagcagcacgtggccgagcaaatctccaaaatgatggagctggccagagagaaacaggcggcagagctgaaggccctgaaggagacgtcggagaacgacaccaaagagatgaagaaaaagctggagacaaagagactggagcggatccagggcatgaccaaagtcaccacagacaagatggcccaggagaggttgaagagagagattaacaactcccacatccaggaagtagtgcaggtgatcaagcagatgacggagaacttggagaggcaccaggagaagctggaggagaagcaggcggcttgcctggaacagatacgggagatggaaaagcagttccagaaggaggcgctggcagagtacgaggccaggatgaagggtctggaggcagaggtgaaggagtcggtgagggcctgcctcaggacctgctttccctccgaggccaaggacaagcctgagagggcctgcgagtgccccccagagctgtgtgagcaggacccactcatagcaaaggcagatgcccaggagagccgcctctgatgcccccatcccactgggacatttagcaaggaggttcagccccttctctgggatgtggttctattcccccaggaaaaaggagccccagccttctgaggctgtgggaacctgtggctgccttggacgctgcagccccctcctcaacggccaggccagagtctgagacaggacccaggcaccctcacggcagggcctctctggggcctagaagtcttctcaagctgacttcctacctccccctccatctctagataagtgtcatatatttgttgagggcaaaagactatggactggaaggcagaaagtgggatcctggccccactctgcctttcctattgagcaaccagctctgggctcagtttcctcacctggagggttggacccactcacctccactctagccccgaaccctcctgccccaggcttccaggccccatcaggcctgccctgagttggccttgtccactccttgaggcagatcctggcactacctcacagctccctggggacggccactccctggctgagggccctcccctcccctctgcctgtccggaacgggaggctgaaatggaaaagctgccttggccctgcttggctgagtcacaaggggcagtgggctcttgggtgctgttccaccctgaccctggctcacccctcttcctaggcctgggggcaggcagttcctaccatgtacccctctcaggctgcctgcctgacaaggtcagcatcatttgctctcctgaatttatgaggtttatttatttttctctttcctactcctattaaagaacctcgtcccagtgaaaaaaccaaacagggaacaaagacaaaagacacaacagaagcaaaaaagaaacaacagggggggggggcaagaaataagc

SEQ ID NO: 311984 - DNA, 3321 bp, Homo sapiens
tcccagcctccctgacctcctggcccctgatctgggtcatcaagggcacaaaaggatgcataatagggttggtgctgagcggctgaaccccatccccgcttttgctccccgcagaccccgccagcaggctaagatggctgagtattgccggacgatctttggggatatgctgctcacagagcccctggaaaagttcccactaaaaccaggtgtccccctgcccagccctgaggatctcaggggcaagatcctcatcaagaacaagaagaaccagttttctggccccacctcctccagtaaggataccggtggggaggctgagggcagcagcccacccagtgcccctgcaggtgagggcacagtgtgggctggcgaggaagggactgagctggaggaggaggaggtggaagaggaagaggaggaggagtcaggaaacctggatgaagaagagattaagaagatgcagtcggatgagggcacagcgggcctggaagtgacggcttatgaggagatgtccagcctagtcaattacatccagcccaccaagttcgtctcctttgagttctctgcccaaaagaaccgaagttatgtcatctcgtccttcacagagctcaaggcatatgacctgctctccaaggcctcggtgcagtttgtggactacaacaagcgccagatgagccgcatttaccccaagggaacccgcatggactcctccaactacatgccccagatgttctggaatgctggatgccagatggttgccctcaacttccagacgatggacttgcccatgcagcagaacatggcagtatttgagttcaacgggcagagcggctacctcctcaagcatgagttcatgcgccggccggacaagcagttcaaccccttctcagtggaccgcatcgacgtggtggtggccaccaccctttccattacggtgatctctgggcagttcctgtcagaacgcagcgtgcgcacctatgtagaagtggagctgtttggccttcctggggaccccaagaggcgctatcgaactaagctgtcacccagtactaactccatcaatcctgtctggaaggaggagccctttgtctttgagaagatcttgatgcctgagctggcctccctcagagtggctgtgatggaggaaggcaacaagtttcttggacaccgcatcatccccatcaatgccctaaattctgggtaccaccacctgtgcctgcacagtgagagcaacatgcccctcaccatgcctgcgctcttcatcttcctggagatgaaggactacatacctggtgcttgggcagatctcactgtggccctcgccaaccccattaagttcttcagtgcccatgacacgaagtctgtgaagctcaaggaggccatgggaggtctgcctgagaagcccttcccactggcgagtccagttgccagccaggtcaatggggcgttggccccaacgagcaatgggtcaccagcagccagggccggggccagggaagaggctatgaaagaagctgcggagccgcggaccgccagcctggaggagctccgggagctaaagggcgtggtgaagctgcagcggcggcacgagaaggagctgcgagagttggagcggcgcggagcgcggcgctgggaggagctgctgcagcggggcgcggcgcagctggcggagctcgggccaccgggcgtggggggcgtcggggcctgcaagctcggtcccggcaagggctctcgcaagaagaggagcctgccccgcgaggagagcgccggagccgcgccgggcgagggccctgagggcgtggacgggcgcgtgcgggagctgaaagacaggctggagctggagctgctgcggcagggcgaggagcagtacgagtgcgttctgaagcgcaaggagcagcacgtggccgagcaaatctccaaaatgatggagctggccagagagaaacaggcggcagagctgaaggccctgaaggagacgtcggagaacgacaccaaagagatgaagaaaaagctggagacaaagagactggagcggatccagggcatgaccaaagtcaccacagacaagatggcccaggagaggttgaagagagagattaacaactcccacatccaggaagtagtgcaggtgatcaagcagatgacggagaacttggagaggcaccaggagaagctggaggagaagcaggcggcttgcctggaacagatacgggagatggaaaagcagttccagaaggaggcgctggcagagtacgaggccaggatgaagggtctggaggcagaggtgaaggagtcggtgagggcctgcctcaggacctgctttccctccgaggccaaggacaagcctgagagggcctgcgagtgccccccagagctgtgtgagcaggacccactcatagcaaaggcagatgcccaggagagccgcctctgatgcccccatcccactgggacatttagcaaggaggttcagccccttctctgggatgtggttctattcccccaggaaaaaggagccccagccttctgaggctgtgggaacctgtggctgccttggacgctgcagccccctcctcaacggccaggccagagtctgagacaggacccaggcaccctcacggcagggcctctctggggcctagaagtcttctcaagctgacttcctacctccccctccatctctagataagtgtcatatatttgttgagggcaaaagactatggactggaaggcagaaagtgggatcctggccccactctgcctttcctattgagcaaccagctctgggctcagtttcctcacctggagggttggacccactcacctccactctagccccgaaccctcctgccccaggcttccaggccccatcaggcctgccctgagttggccttgtccactccttgaggcagatcctggcactacctcacagctccctggggacggccactccctggctgagggccctcccctcccctctgcctgtccggaacgggaggctgaaatggaaaagctgccttggccctgcttggctgagtcacaaggggcagtgggctcttgggtgctgttccaccctgaccctggctcacccctcttcctaggcctgggggcaggcagttcctaccatgtacccctctcaggctgcctgcctgacaaggtcagcatcatttgctctcctgaatttatgaggtttatttatttttctctttcctactcctattaaagaacctcgtcccagtgaaaaaaccaaacagggaacaaagacaaaagacacaacagaagcaaaaaagaaacaacagggggggggggcaagaaataagc

SEQ ID NO: 311985 - DNA, 3868 bp, Homo sapiens
tggcaggcagggcgggtgggaggagggtgatttacaaggcagatgggcctctggctacagctcagtcctgcactcagccagggccaccccaggggctataagagcaactagatttctggagcagctcggggatgggtgccatttgagcccagcttggctccccctcctggctggcctccttcctgcccttctgcctgcctgtgtctgctgagattctgcaaagaggaacgcttggcaccatgtctctgctcaaccctgtcctgctgccccccaaggtgaaggcctatctgagccaaggggagcgcttcatcaaatgggatgatgaaactacagttgcctctccagttatcctccgtgtggatcctaagggctactacttatactggacgtatcaaagtaaggagatggagtttctggatatcaccagcatccgggatactcgctttgggaagtttgccaagatgcccaagagccagaagctccgggacgtcttcaacatggactttcctgataacagtttcctgctgaagacactcacggtggtgtccggcccggacatggtggacctcaccttccacaacttcgtctcctacaaggagaacgtgggcaaggcctgggctgaggacgtactggccctagtcaaacatccgctgacggccaacgcctcccgcagcaccttcctggacaagatccttgtgaagctcaagatgcagctcaactctgaagggaagattccggtgaagaactttttccagatgtttcctgctgaccgcaagcgggtggaagctgctctcagtgcctgccacctccccaaaggcaaaaatgacgccatcaatcctgaggacttcccagaacctgtctacaagagtttcctcatgagcctctgtcctcggccagaaatagatgagatcttcacttcttaccatgctaaggccaaaccctacatgacgaaggagcacctgaccaaattcatcaaccagaaacagcgggactcccggcttaactccctgctgttcccgccagcacggcctgaccaggtgcagggcctcatcgacaagtatgagcccagtggcatcaatgcacagaggggccagctgtcacctgaaggcatggtctggtttctctgtgggccagagaacagcgtgctggcccaggacaagctgctgctccaccacgacatgacgcagccactcaatcattacttcatcaactcgtcccacaacacctacctgacagccggccagttctcaggcctctcctcggctgagatgtaccgccaggtgctgctctctggctgccgttgcgtggagctagactgctggaaggggaaaccccctgacgaggagcccattatcacccatggcttcaccatgaccacagacatcttcttcaaagaagcaattgaggctattgcagaaagtgcctttaagacctccccctatcccatcatcctgtcgtttgagaaccatgtggactcaccccgccagcaggctaagatggctgagtattgccggacgatctttggggatatgctgctcacagagcccctggaaaagttcccactaaaaccaggtgtccccctgcccagccctgaggatctcaggggcaagatcctcatcaagaacaagaagaaccagttttctggccccacctcctccagtaaggataccggtggggaggctgagggcagcagcccacccagtgcccctgcaggtgagggcacagtgtgggctggcgaggaagggactgagctggaggaggaggaggtggaagaggaagaggaggaggagtcaggaaacctggatgaagaagagattaagaagatgcagtcggatgagggcacagcgggcctggaagtgacggcttatgaggagatgtccagcctagtcaattacatccagcccaccaagttcgtctcctttgagttctctgcccaaaagaaccgaagttatgtcatctcgtccttcacagagctcaaggcatatgacctgctctccaaggcctcggtgcagtttgtggactacaacaagcgccagatgagccgcatttaccccaagggaacccgcatggactcctccaactacatgccccagatgttctggaatgctggatgccagatggttgccctcaacttccagacgatggacttgcccatgcagcagaacatggcagtatttgagttcaacgggcagagcggctacctcctcaagcatgagttcatgcgccggccggacaagcagttcaaccccttctcagtggaccgcatcgacgtggtggtggccaccaccctttccattacggtgatctctgggcagttcctgtcagaacgcagcgtgcgcacctatgtagaagtggagctgtttggccttcctggggaccccaagaggcgctatcgaactaagctgtcacccagtactaactccatcaatcctgtctggaaggaggagccctttgtctttgagaagatcttgatgcctgagctggcctccctcagagtggctgtgatggaggaaggcaacaagtttcttggacaccgcatcatccccatcaatgccctaaattctgggtaccaccacctgtgcctgcacagtgagagcaacatgcccctcaccatgcctgcgctcttcatcttcctggagatgaaggactacatacctggtgcttgggcagatctcactgtggccctcgccaaccccattaagttcttcagtgcccatgacacgaagtctgtgaagctcaaggaggccatgggaggtctgcctgagaagcccttcccactggcgagtccagttgccagccaggtcaatggggcgttggccccaacgagcaatgggtcaccagcagccagggccggggccagggaagaggctatgaaagaagctgcggagccgcggaccgccagcctggaggagctccgggagctaaagggcgtggtgaagctgcagcggcggcacgagaaggagctgcgagagttggagcggcgcggagcgcggcgctgggaggagctgctgcagcggggcgcggcgcagctggcggagctcgggccaccgggcgtggggggcgtcggggcctgcaagctcggtcccggcaagggctctcgcaagaagaggagcctgccccgcgaggagagcgccggagccgcgccgggcgagggccctgagggcgtggacgggcgcgtgcgggagctgaaagacaggctggagctggagctgctgcggcagggcgaggagcagtacgagtgcgttctgaagcgcaaggagcagcacgtggccgagcaaatctccaaaatgatggagctggccagagagaaacaggcggcagagctgaaggccctgaaggagacgtcggagaacgacaccaaagagatgaagaaaaagctggagacaaagagactggagcggatccagggcatgaccaaagtcaccacagacaagatggcccaggagaggttgaagagagagattaacaactcccacatccaggaagtagtgcaggtgatcaagcagatgacggagaacttggagaggcaccaggagaagctggaggagaagcaggcggcttgcctggaacagatacgggagatggaaaagcagccagatcccgcacatccttgaaggcctatctttaaaaggcccgagagccctctcctgcccacaactccatcttttcatccaaggactgtgttggtacgtatttagcagaagaattcagccctcaggtgacaacgtccattttttaagtcccagtgttgtcttcttaagaggtggaacgtctcgcacccagaaccgagattctgtctctctcttacccgctgccggcaacaaaatgtgcggctcatgaaaagtctcagtaaattctgcagctgata

SEQ ID NO: 311986 - DNA, 2751 bp, Homo sapiens
tggcaggcagggcgggtgggaggagggtgatttacaaggcagatgggcctctggctacagctcagtcctgcactcagccagggccaccccaggggctataagagcaactagatttctggagcagctcggggatgggtgccatttgagcccagcttggctccccctcctggctggcctccttcctgcccttctgcctgcctgtgtctgctgagattctgcaaagaggaacgcttggcaccatgtctctgctcaaccctgtcctgctgccccccaaggtgaaggcctatctgagccaaggggagcgcttcatcaaatgggatgatgaaactacagttgcctctccagttatcctccgtgtggatcctaagggctactacttatactggacgtatcaaagtaaggagatggagtttctggatatcaccagcatccgggatactcgctttgggaagtttgccaagatgcccaagagccagaagctccgggacgtcttcaacatggactttcctgataacagtttcctgctgaagacactcacggtggtgtccggcccggacatggtggacctcaccttccacaacttcgtctcctacaaggagaacgtgggcaaggcctgggctgaggacgtactggccctagtcaaacatccgctgacggccaacgcctcccgcagcaccttcctggacaagatccttgtgaagctcaagatgcagctcaactctgaagggaagattccggtgaagaactttttccagatgtttcctgctgaccgcaagcgggtggaagctgctctcagtgcctgccacctccccaaaggcaaaaatgacgccatcaatcctgaggacttcccagaacctgtctacaagagtttcctcatgagcctctgtcctcggccagaaatagatgagatcttcacttcttaccatgctaaggccaaaccctacatgacgaaggagcacctgaccaaattcatcaaccagaaacagcgggactcccggcttaactccctgctgttcccgccagcacggcctgaccaggtgcagggcctcatcgacaagtatgagcccagtggcatcaatgcacagaggggccagctgtcacctgaaggcatggtctggtttctctgtgggccagagaacagcgtgctggcccaggacaagctgctgctccaccacgacatgacgcagccactcaatcattacttcatcaactcgtcccacaacacctacctgacagccggccagttctcaggcctctcctcggctgagatgtaccgccaggtgctgctctctggctgccgttgcgtggagctagactgctggaaggggaaaccccctgacgaggagcccattatcacccatggcttcaccatgaccacagacatcttcttcaaagaagcaattgaggctattgcagaaagtgcctttaagacctccccctatcccatcatcctgtcgtttgagaaccatgtggactcaccccgccagcaggctaagatggctgagtattgccggacgatctttggggatatgctgctcacagagcccctggaaaagttcccactaaaaccaggtgtccccctgcccagccctgaggatctcaggggcaagatcctcatcaagaacaagaagaaccagttttctggccccacctcctccagtaaggataccggtggggaggctgagggcagcagcccacccagtgcccctgcaggtgagggcacagtgtgggctggcgaggaagggactgagctggaggaggaggaggtggaagaggaagaggaggaggagtcaggaaacctggatgaagaagagattaagaagatgcagtcggatgagggcacagcgggcctggaagtgacggcttatgaggagatgtccagcctagtcaattacatccagcccaccaagttcgtctcctttgagttctctgcccaaaagaaccgaagttatgtcatctcgtccttcacagagctcaaggcatatgacctgctctccaaggcctcggtgcagtttgtggactacaacaagcgccagatgagccgcatttaccccaagggaacccgcatggactcctccaactacatgccccagatgttctggaatgctggatgccagatggttgccctcaacttccagacgatggacttgcccatgcagcagaacatggcagtatttgagttcaacgggcagagcggctacctcctcaagcatgagttcatgcgccggccggacaagcagttcaaccccttctcagtggaccgcatcgacgtggtggtggccaccaccctttccattacggtgatctctgggcagttcctgtcagaacgcagcgtgcgcacctatgtagaagtggagctgtttggccttcctggggaccccaagaggcgctatcgaactaagctgtcacccagtactaactccatcaatcctgtctggaaggaggagccctttgtctttgagaagatcttgatgcctgagctggcctccctcagagtggctgtgatggaggaaggcaacaagtttcttggacaccgcatcatccccatcaatgccctaaattctgggtaccaccacctgtgcctgcacagtgagagcaacatgcccctcaccatgcctgcgctcttcatcttcctggagatgaaggactacatacctggtgcttgggcagatctcactgtggccctcgccaacctgacatgcaacaacagcaagaacaagacgctggtgacacagaacagcggtgtggagg

SEQ ID NO: 311987 - DNA, 337 bp, Homo sapiens
tgtgaagctcaaggaggccatgggaggtctgcctgaggtctgtgttgcctgcactgctgccaggggctcaccagagattagccctatttatgggagaggctggggagagggccgagtcccaggctcggggagagagggctgtcaagccaccttcctgacctgctctccctacacagaagcccttcccactggcgagtccagttgccagccaggtcaatggggcgttggccccaacgagcaatgggtcaccaggtatgagcttcggtccgcacacctactgggggcacctccacctctgcacccacaggcacttccctttaaaaaatttcacctaggg

SEQ ID NO: 311988 - DNA, 3350 bp, Homo sapiens
atgcaggcgcgctactccgtgtccagccccaactccctgggagtggtgccctacctcggcggcgagcagagctactaccgcgcggcggccgcggcggccgggggcggctacaccgccatgccggcccccatgagcgtgtactcgcaccctgcgcacgccgagcagtacccgggcggcatggcccgcgcctacgggccctacacgccgcagccgcagcccaaggacatggtgaagccgccctatagctacatcgcgctcatcaccatggccatccagaacgccccggacaagaagatcaccctgaacggcatctaccagttcatcatggaccgcttccccttctaccgggacaacaagcagggctggcagaacagcatccgccacaacctctcgctcaacgagtgcttcgtcaaggtgccgcgcgacgacaagaagccgggcaagggcagctactggacgctggacccggactcctacaacatgttcgagaacggcacccccgcccgcgccgccggagcaggccgacggcaacgcgcccggtccgcagccgccgcccgtgcgcatccaggacatcaagaccgagaacggtacgtgcccctcgccgccccagcccctgtccccggccgccgccctgggcagcggcagcgccgccgcggtgcccaagatcgagagccccgacagcagcagcagcagcctgtccagcgggagcagccccccgggcagcctgccgtcggcgcggccgctcagcctggacggtgcggattccgcgccgccgccgcccgcgccctccgccccgccgccgcaccatagccagggcttcagcgtggacaacatcatgacgtcgctgcgggggtcgccgcagagcgcggccgcggagctcagctccggccttctggcctcggcggccgcgtcctcgcgcgcggggatcgcacccccgctggcgctcggcgcctactcgcccggccagagctccctctacagctccccctgcagccagacctccagcgcgggcagctcgggcggcggcggcggcggcgcgggggccgcggggggcgcgggcggcgccgggacctaccactgcaacctgcaagccatgagcctgtacgcggccggcgagcgcgggggccacttgcagggcgcgcccgggggcgcgggcggctcggccgtggacgaccccctgcccgactactctctgcctccggtcaccagcagcagctcgtcgtccctgagtcacggcggcggcggcggcggcggcgggggaggccaggaggccggccaccaccctgcggcccaccaaggccgcctcacctcgtggtacctgaaccaggcgggcggagacctgggccacttggcgagcgcggcggcggcggcggcggccgcaggctacccgggccagcagcagaacttccactcggtgcgggagatgttcgagtcacagaggatcggcttgaacaactctccagtgaacgggaatagtagctgtcaaatggccttcccttccagccagtctctgtaccgcacgtccggagctttcgtctacgactgtagcaagttttgacacaccctcaaagccgaactaaatcgaaccccaaagcaggaaaagctaaaggaacccatcaaggcaaaatcgaaactaaaaaaaaaaaaaatccaattaaaaaaaacccctgagaatattcaccacaccagcgaacagaatatccctccaaaaattcagctcaccagcaccagcacgaagaaaactctattttcttaaccgattaattcagagccacctccactttgccttgtctaaataaacaaacccgtaaactgttttatacagagacagcaaaatcttggtttattaaaggacagtgttactccagataacacgtaagtttcttcttgcttttcagagacctgctttcccctcctcccgtctcccctctcttgccttcttccttgcctctcacctgtaagatattattttatcctatgttgaagggagggggaaagtccccgtttatgaaagtcgctttctttttattcatggacttgttttaaaatgtaaattgcaacatagtaatttatttttaatttgtagttggatgtcgtggaccaaacgccagaaagtgttcccaaaacctgacgttaaattgcctgaaactttaaattgtgctttttttctcattataaaaagggaaactgtattaatcttattctatcctcttttctttctttttgttgaacatattcattgtttgtttattaataaattaccattcagtttgaatgagacctatatgtctggatactttaatagagctttaattattacgaaaaaagatttcagagataaaacactagaagttacctattctccacctaaatctctgaaaaatggagaaaccctctgactagtccatgtcaaattttactaaaagtctttttgtttagatttattttcctgcagcatcttctgcaaaatgtactatatagtcagcttgctttgaggctagtaaaaagatatttttctaaacagattggagttggcatataaacaaatacgttttctcactaatgacagtccatgattcggaaattttaagcccatgaatcagccgcggtcttaccacggtgatgcctgtgtgccgagagatgggactgtgcggccagatatgcacagataaatatttggcttgtgtattccatataaaattgcagtgcatattatacatccctgtgagccagatgctgaatagatattttcctattatttcagtcctttataaaaggaaaaataaaccagtttttaaatgtatgtatataattctcccccatttacaatccttcatgtattacatagaaggattgcttttttaaaaatatactgcgggttggaaagggatatttaatctttgagaaactattttagaaaatatgtttgtagaacaattatttttgaaaaagatttaaagcaataacaagaaggaaggcgagaggagcagaacattttggtctagggtggtttctttttaaaccattttttcttgttaatttacagttaaacctaggggacaatccggattggccctcccccttttgtaaataacccaggaaatgtaataaattcattatcttagggtgatctgccctgccaatcagactttggggagatggcgatttgattacagacgttcgggggggtggggggcttgcagtttgttttggagataatacagtttcctgctatctgccgctcctatctagaggcaacacttaagcagtaattgctgttgcttgttgtcaaaatttgatcattgttaaaggattgctgcaaataaatacactttaatttcagtcaaaaa

SEQ ID NO: 311989 - DNA, 3689 bp, Homo sapiens
  misc_feature (3461)..(3466): n is a, c, g, or t
  misc_feature (3483)..(3483): n is a, c, g, or t
  misc_feature (3582)..(3582): n is a, c, g, or t
  misc_feature (3658)..(3658): n is a, c, g, or t
atgcaggcgcgctactccgtgtccagccccaactccctgggagtggtgccctacctcggcggcgagcagagctactaccgcgcggcggccgcggcggccgggggcggctacaccgccatgccggcccccatgagcgtgtactcgcaccctgcgcacgccgagcagtacccgggcggcatggcccgcgcctacgggccctacacgccgcagccgcagcccaaggacatggtgaagccgccctatagctacatcgcgctcatcaccatggccatccagaacgccccggacaagaagatcaccctgaacggcatctaccagttcatcatggaccgcttccccttctaccgggacaacaagcagggctggcagaacagcatccgccacaacctctcgctcaacgagtgcttcgtcaaggtgccgcgcgacgacaagaagccgggcaagggcagctactggacgctggacccggactcctacaacatgttcgagaacggcagcttcctgcggcggcggcggcgcttcaagaagaaggacgcggtgaaggacaaggaggagaaggacaggctgcacctcaaggagccgcccccgcccggccgccagcccccgcccgcgccgccggagcaggccgacggcaacgcgcccggtccgcagccgccgcccgtgcgcatccaggacatcaagaccgagaacggtacgtgcccctcgccgccccagcccctgtccccggccgccgccctgggcagcggcagcgccgccgcggtgcccaagatcgagagccccgacagcagcagcagcagcctgtccagcgggagcagccccccgggcagcctgccgtcggcgcggccgctcagcctggacggtgcggattccgcgccgccgccgcccgcgccctccgccccgccgccgcaccatagccagggcttcagcgtggacaacatcatgacgtcgctgcgggggtcgccgcagagcgcggccgcggagctcagctccggccttctggcctcggcggccgcgtcctcgcgcgcggggatcgcacccccgctggcgctcggcgcctactcgcccggccagagctccctctacagctccccctgcagccagacctccagcgcgggcagctcgggcggcggcggcggcggcgcgggggccgcggggggcgcgggcggcgccgggacctaccactgcaacctgcaagccatgagcctgtacgcggccggcgagcgcgggggccacttgcagggcgcgcccgggggcgcgggcggctcggccgtggacgaccccctgcccgactactctctgcctccggtcaccagcagcagctcgtcgtccctgagtcacggcggcggcggcggcggcggcgggggaggccaggaggccggccaccaccctgcggcccaccaaggccgcctcacctcgtggtacctgaaccaggcgggcggagacctgggccacttggcgagcgcggcggcggcggcggcggccgcaggctacccgggccagcagcagaacttccactcggtgcgggagatgttcgagtcacagaggatcggcttgaacaactctccagtgaacgggaatagtagctgtcaaatggccttcccttccagccagtctctgtaccgcacgtccggagctttcgtctacgactgtagcaagttttgacacaccctcaaagccgaactaaatcgaaccccaaagcaggaaaagctaaaggaacccatcaaggcaaaatcgaaactaaaaaaaaaaaaaatccaattaaaaaaaacccctgagaatattcaccacaccagcgaacagaatatccctccaaaaattcagctcaccagcaccagcacgaagaaaactctattttcttaaccgattaattcagagccacctccactttgccttgtctaaataaacaaacccgtaaactgttttatacagagacagcaaaatcttggtttattaaaggacagtgttactccagataacacgtaagtttcttcttgcttttcagagacctgctttcccctcctcccgtctcccctctcttgccttcttccttgcctctcacctgtaagatattattttatcctatgttgaagggagggggaaagtccccgtttatgaaagtcgctttctttttattcatggacttgttttaaaatgtaaattgcaacatagtaatttatttttaatttgtagttggatgtcgtggaccaaacgccagaaagtgttcccaaaacctgacgttaaattgcctgaaactttaaattgtgctttttttctcattataaaaagggaaactgtattaatcttattctatcctcttttctttctttttgttgaacatattcattgtttgtttattaataaattaccattcagtttgaatgagacctatatgtctggatactttaatagagctttaattattacgaaaaaagatttcagagataaaacactagaagttacctattctccacctaaatctctgaaaaatggagaaaccctctgactagtccatgtcaaattttactaaaagtctttttgtttagatttattttcctgcagcatcttctgcaaaatgtactatatagtcagcttgctttgaggctagtaaaaagatatttttctaaacagattggagttggcatataaacaaatacgttttctcactaatgacagtccatgattcggaaattttaagcccatgaatcagccgcggtcttaccacggtgatgcctgtgtgccgagagatgggactgtgcggccagatatgcacagataaatatttggcttgtgtattccatataaaattgcagtgcatattatacatccctgtgagccagatgctgaatagatattttcctattatttcagtcctttataaaaggaaaaataaaccagtttttaaatgtatgtatataattctcccccatttacaatccttcatgtattacatagaaggattgcttttttaaaaatatactgcgggttggaaagggatatttaatctttgagaaactattttagaaaatatgtttgtagaacaattatttttgaaaaagatttaaagcaataacaagaaggaaggcgagaggagcagaacattttggtctagggtggtttctttttaaaccattttttcttgttaatttacagttaaacctaggggacaatccggattggccctcccccttttgtaaataacccaggaaatgtaataaattcattatcttagggtgatctgccctgccaatcagactttggggagatggcgatttgattacagacgttcgggggggtggggggcttgcagtttgttttggagataatacagtttcctgctatctgccgctcctatctagaggcaacacttaagcagtaattgctgttgcttgttgtcaaaatttgatcattgttaaaggattgctgcaaataaatacactttaatttcagtcaaaaaaaaaaannnnnncggcacgagtataaggngcctaaacaatagaaagctgtagagattgggtttcattgttaattggtttgggagcctcctatgtgtgacttatgacttctctgtgttctgtgtatttntctgaattaatgacctgggatataaagctatgctagctttcaaacaggagatgcctttcagaaatttgtatatttngcagttgccagaccaataaaatacctggttg

SEQ ID NO: 311990 - DNA, 3454 bp, Homo sapiens
atgcaggcgcgctactccgtgtccagccccaactccctgggagtggtgccctacctcggcggcgagcagagctactaccgcgcggcggccgcggcggccgggggcggctacaccgccatgccggcccccatgagcgtgtactcgcaccctgcgcacgccgagcagtacccgggcggcatggcccgcgcctacgggccctacacgccgcagccgcagcccaaggacatggtgaagccgccctatagctacatcgcgctcatcaccatggccatccagaacgccccggacaagaagatcaccctgaacggcatctaccagttcatcatggaccgcttccccttctaccgggacaacaagcagggctggcagaacagcatccgccacaacctctcgctcaacgagtgcttcgtcaaggtgccgcgcgacgacaagaagccgggcaagggcagctactggacgctggacccggactcctacaacatgttcgagaacggcagcttcctgcggcggcggcggcgcttcaagaagaaggacgcggtgaaggacaaggaggagaaggacaggctgcacctcaaggagccgcccccgcccggccgccagcccccgcccgcgccgccggagcaggccgacggcaacgcgcccggtccgcagccgccgcccgtgcgcatccaggacatcaagaccgagaacggtacgtgcccctcgccgccccagcccctgtccccggccgccgccctgggcagcggcagcgccgccgcggtgcccaagatcgagagccccgacagcagcagcagcagcctgtccagcgggagcagccccccgggcagcctgccgtcggcgcggccgctcagcctggacggtgcggattccgcgccgccgccgcccgcgccctccgccccgccgccgcaccatagccagggcttcagcgtggacaacatcatgacgtcgctgcgggggtcgccgcagagcgcggccgcggagctcagctccggccttctggcctcggcggccgcgtcctcgcgcgcggggatcgcacccccgctggcgctcggcgcctactcgcccggccagagctccctctacagctccccctgcagccagacctccagcgcgggcagctcgggcggcggcggcggcggcgcgggggccgcggggggcgcgggcggcgccgggacctaccactgcaacctgcaagccatgagcctgtacgcggccggcgagcgcgggggccacttgcagggcgcgcccgggggcgcgggcggctcggccgtggacgaccccctgcccgactactctctgcctccggtcaccagcagcagctcgtcgtccctgagtcacggcggcggcggcggcggcggcgggggaggccaggaggccggccaccaccctgcggcccaccaaggccgcctcacctcgtggtacctgaaccaggcgggcggagacctgggccacttggcgagcgcggcggcggcggcggcggccgcaggctacccgggccagcagcagaacttccactcggtgcgggagatgttcgagtcacagaggatcggcttgaacaactctccagtgaacgggaatagtagctgtcaaatggccttcccttccagccagtctctgtaccgcacgtccggagctttcgtctacgactgtagcaagttttgacacaccctcaaagccgaactaaatcgaaccccaaagcaggaaaagctaaaggaacccatcaaggcaaaatcgaaactaaaaaaaaaaaaaatccaattaaaaaaaacccctgagaatattcaccacaccagcgaacagaatatccctccaaaaattcagctcaccagcaccagcacgaagaaaactctattttcttaaccgattaattcagagccacctccactttgccttgtctaaataaacaaacccgtaaactgttttatacagagacagcaaaatcttggtttattaaaggacagtgttactccagataacacgtaagtttcttcttgcttttcagagacctgctttcccctcctcccgtctcccctctcttgccttcttccttgcctctcacctgtaagatattattttatcctatgttgaagggagggggaaagtccccgtttatgaaagtcgctttctttttattcatggacttgttttaaaatgtaaattgcaacatagtaatttatttttaatttgtagttggatgtcgtggaccaaacgccagaaagtgttcccaaaacctgacgttaaattgcctgaaactttaaattgtgctttttttctcattataaaaagggaaactgtattaatcttattctatcctcttttctttctttttgttgaacatattcattgtttgtttattaataaattaccattcagtttgaatgagacctatatgtctggatactttaatagagctttaattattacgaaaaaagatttcagagataaaacactagaagttacctattctccacctaaatctctgaaaaatggagaaaccctctgactagtccatgtcaaattttactaaaagtctttttgtttagatttattttcctgcagcatcttctgcaaaatgtactatatagtcagcttgctttgaggctagtaaaaagatatttttctaaacagattggagttggcatataaacaaatacgttttctcactaatgacagtccatgattcggaaattttaagcccatgaatcagccgcggtcttaccacggtgatgcctgtgtgccgagagatgggactgtgcggccagatatgcacagataaatatttggcttgtgtattccatataaaattgcagtgcatattatacatccctgtgagccagatgctgaatagatattttcctattatttcagtcctttataaaaggaaaaataaaccagtttttaaatgtatgtatataattctcccccatttacaatccttcatgtattacatagaaggattgcttttttaaaaatatactgcgggttggaaagggatatttaatctttgagaaactattttagaaaatatgtttgtagaacaattatttttgaaaaagatttaaagcaataacaagaaggaaggcgagaggagcagaacattttggtctagggtggtttctttttaaaccattttttcttgttaatttacagttaaacctaggggacaatccggattggccctcccccttttgtaaataacccaggaaatgtaataaattcattatcttagggtgatctgccctgccaatcagactttggggagatggcgatttgattacagacgttcgggggggtggggggcttgcagtttgttttggagataatacagtttcctgctatctgccgctcctatctagaggcaacacttaagcagtaattgctgttgcttgttgtcaaaatttgatcattgttaaaggattgctgcaaataaatacactttaatttcagtcaaaaa

SEQ ID NO: 311991 - DNA, 840 bp, Homo sapiens
gcctggtggcgaattcggcacgagggacatctcggactccaaaatcaggtatgaatctggggaccacgtggctgtgtacccagccaacgactctgctctcgtcaaccagctgggcaaaatcctgggtgccgacctggacgtcgtcatgtccctgaacaacctggatgaggagtccaacaagaagcacccattcccgtgccctacgtcctaccgcacggccctcacctactacctggacatcaccaacccgccgcgtaccaacgtgctgtacgagctggcgcagtacgcctcggagccctcggagcaggagctgctgcgcaagatggcctcctcctccggcgagggcaaggagctgtacctgagctgggtggtggaggcccggaggcacatcctggccatcctgcaggactgcccgtccctgcggccccccatcgaccacctgtgtgagctgctgccgcgcctgcaggcccgctactactccatcgcctcatcctccaaggtccaccccaactctgtgcacatctgtgcggtggttgtggagtacgagaccaaggacggcacgataaaagaagggaagtgggacaaccacaagtgagctggcgggcccaaagggaggacctgtcacgcgggaaccaaacaggccggcagtcgcagacaggtgcccaaattggtacgttgcagaacaggatccccaacataccgaccttgccactttcaaagggacaccaacgacccttggtactcatggcggagaacacagcaacaaggggagagcaccctacacgtagctacaaaccaggagagaggccggatagcacacgcagggaagacgtccgcaaa

SEQ ID NO: 311992 - DNA, 2462 bp, Homo sapiens
ccctgcccaggtgcccgcagagagcagccgggctgccagcgtttcatgatcaacatgggagactcccacgtggacaccagctccaccgtgtccgaggcggtggccgaagaagtatctcttttcagcatgacggacatgattctgttttcgctcatcgtgggtctcctaacctactggttcctcttcagaaagaaaaaagaagaagtccccgagttcaccaaaattcagacattgacctcctctgtcagagagagcagctttgtggaaaagatgaagaaaacggggaggaacatcatcgtgttctacggctcccagacggggactgcagaggagtttgccaaccgcctgtccaaggacgcccaccgctacgggatgcgaggcatgtcagcggaccctgaggagtatgacctggccgacctgagcagcctgccagagatcgacaacgccctggtggttttctgcatggccacctacggtgagggagaccccaccgacaatgcccaggacttctacgactggctgcaggagacagacgtggatctctctggggtcaagttcgcggtgtttggtcttgggaacaagacctacgagcacttcaatgccatgggcaagtacgtggacaagcggctggagcagctcggcgcccagcgcatctttgagctggggttgggcgacgacgatgggaacttggaggaggacttcatcacctggcgagagcagttctggccggccgtgtgtgaacactttggggtggaagccactggcgaggagtccagcattcgccagtacgagcttgtggtccacaccgacatagatgcggccaaggtgtacatgggggagatgggccggctgaagagctacgagaaccagaagcccccctttgatgccaagaatccgttcctggctgcagtcaccaccaaccggaagctgaaccagggaaccgagcgccacctcatgcacctggaattggacatctcggactccaaaatcaggtatgaatctggggaccacgtggctgtgtacccagccaacgactctgctctcgtcaaccagctgggcaaaatcctgggtgccgacctggacgtcgtcatgtccctgaacaacctggatgaggagtccaacaagaagcacccattcccgtgccctacgtcctaccgcacggccctcacctactacctggacatcaccaacccgccgcgtaccaacgtgctgtacgagctggcgcagtacgcctcggagccctcggagcaggagctgctgcgcaagatggcctcctcctccggcgagggcaaggagctgtacctgagctgggtggtggaggcccggaggcacatcctggccatcctgcaggactgcccgtccctgcggccccccatcgaccacctgtgtgagctgctgccgcgcctgcaggcccgctactactccatcgcctcatcctccaaggtccaccccaactctgtgcacatctgtgcggtggttgtggagtacgagaccaaggccggccgcatcaacaagggcgtggccaccaactggctgcgggccaaggagcctgccggggagaacggcggccgtgcgctggtgcccatgttcgtgcgcaagtcccagttccgcctgcccttcaaggccaccacgcctgtcatcatggtgggccccggcaccggggtggcacccttcataggcttcatccaggagcgggcctggctgcgacagcagggcaaggaggtgggggagacgctgctgtactacggctgccgccgctcggatgaggactacctgtaccgggaggagctggcgcagttccacagggacggtgcgctcacccagctcaacgtggccttctcccgggagcagtcccacaaggtctacgtccagcacctgctaaagcaagaccgagagcacctgtggaagttgatcgaaggcggtgcccacatctacgtctgtggggatgcacggaacatggccagggatgtgcagaacaccttctacgacatcgtggctgagctcggggccatggagcacgcgcaggcggtggactacatcaagaaactgatgaccaagggccgctactccctggacgtgtggagctaggggcctgcctgccccacccaccccacagactccggcctgtaatcagctctcctggctccctcccgtagtctcctgggtgtgtttggcttggccttggcatgggcgcaggcccagtgacaaagactcctctgggcctggggtgcatcctcctcagcccccaggccaggtgaggtccaccggcccctggcagcacagcccagggcctgcatgggggcaccgggctccatgcctctggaggcctctggccctcggtggctgcacagaagggctctttctctctgctgagctgggcccagcccctccacgtgatttccagtgagtgtaaataattttaaataacctctggcccttggaataaagttctgttttctgta

SEQ ID NO: 311993 - DNA, 3034 bp, Homo sapiens
cccaaactaggctagtacgaggctgcgtgtgtatcggccgagggccgggctgccagcgtttcatgatcaacatgggagactcccacgtggacaccagctccaccgtgtccgaggcggtggccgaagaagtatctcttttcagcatgacggacatgattctgttttcgctcatcgtgggtctcctaacctactggttcctcttcagaaagaaaaaagaagaagtccccgagttcaccaaaattcagacattgacctcctctgtcagagagagcagctttgtggaaaagatgaagaaaacggggaggaacatcatcgtgttctacggctcccagacggggactgcagaggagtttgccaaccgcctgtccaaggacgcccaccgctacgggatgcgaggcatgtcagcggaccctgaggagtatgacctggccgacctgagcagcctgccagagatcgacaacgccctggtggttttctgcatggccacctacggtgagggagaccccaccgacaatgcccaggacttctacgactggctgcaggagacagacgtggatctctctggggtcaagttcgcggtgtttggtcttgggaacaagacctacgagcacttcaatgccatgggcaagtacgtggacaagcggctggagcagctcggcgcccagcgcatctttgagctggggttgggcgacgacgatgggaacttggaggaggacttcatcacctggcgagagcagttctggccggccgtgtgtgaacactttggggtggaagccactggcgaggagtccagcattcgccagtacgagcttgtggtccacaccgacatagatgcggccaaggtgtacatgggggagatgggccggctgaagagctacgagaaccagaagcccccctttgatgccaagaatccgttcctggctgcagtcaccaccaaccggaagctgaaccagggaaccgagcgccacctcatgcacctggaattggacatctcggactccaaaatcaggtatgaatctggggaccacgtggctgtgtacccagccaacgactctgctctcgtcaaccagctgggcaaaatcctgggtgccgacctggacgtcgtcatgtccctgaacaacctggatgaggagtccaacaagaagcacccattcccgtgccctacgtcctaccgcacggccctcacctactacctggacatcaccaacccgccgcgtaccaacgtgctgtacgagctggcgcagtacgcctcggagccctcggagcaggagctgctgcgcaagatggcctcctcctccggcgagggcaaggagctgtacctgagctgggtggtggaggcccggaggcacatcctggccatcctgcaggactgcccgtccctgcggccccccatcgaccacctgtgtgagctgctgccgcgcctgcaggcccgctactactccatcgcctcatcctccaaggtccaccccaactctgtgcacatctgtgcggtggttgtggagtacgagaccaaggccggccgcatcaacaagggcgtggccaccaactggctgcgggccaaggagcctgccggggagaacggcggccgtgcgctggtgcccatgttcgtgcgcaagtcccagttccgcctgcccttcaaggccaccacgcctgtcatcatggtgggccccggcaccggggtggcacccttcataggcttcatccaggagcgggcctggctgcgacagcagggcaaggaggtgggggagacgctgctgtactacggctgccgccgctcggatgaggactacctgtaccgggaggagctggcgcagttccacagggacggtgcgctcacccagctcaacgtggccttctcccgggagcagtcccacaaggtctacgtccagcacctgctaaagcaagaccgagagcacctgtggaagttgatcgaaggcggtgcccacatctacgtctgtggggatgcacggaacatggccagggatgtgcagaacaccttctacgacatcgtggctgagctcggggccatggagcacgcgcaggcggtggactacatcaagaaactgatgaccaagggccgctactccctggacgtgtggagctaggggcctgcctgccccacccaccccacagactccggcctgtaatcagctctcctggctccctcccgtagtctcctgggtgtgtttggcttggccttggcatgggcgcaggcccagtgacaaagactcctctgggcctggggtgcatcctcctcagcccccaggccaggtgaggtccaccggcccctggcagcacagcccagggcctgcatgggggcaccgggctccatgcctctggaggcctctggccctcggtggctgcacagaagggctctttctctctgctgagctgggcccagcccctccacgtgatttccagtgagtgtaaataattttaaataacctctggcccttggaataaagttctgttttctgtagtaaaaaaacaaaaaaaaaaaaaaaaagaaaaaaaaaaaaacaagaagagggcgcgggcgcccccaagaaaaatttcccccgagaagggggccccacaatttgacccgcttaccccgggtttttttgtgtgaacaagagagggggccccccataaagaaggaggcgcgcatttttatgacgccctctggaccacttgtgcggcccgcgcggttgtttacaacaaccgtcgcgtgtagcatgtgggaaaaacggtgtctgacacgagggagacacctttgtcgtgagaaagagagacaccccctacaatttcgcgtgggcgggggggagcacgagacaaattgtggtggccacacgactctactcgcctgcggagaggatttttcgaagcgcctccaacggcgagaacactctttgacgaacttttccgaaggctgctcataacggtgtttggcaccaccaccgccgtggagattagtcttcgctggattatgacaccaatgttggcgcccaccgggaagcatatgtctgtaggcgaaagtttttttaacacggga

SEQ ID NO: 311994 - DNA, 2399 bp, Homo sapiens
cccaaactaggctagtacgaggctgcgtgtgtatcggccgagggccgggctgccagcgtttcatgatcaacatgggagactcccacgtggacaccagctccaccgtgtccgaggcggtggccgaagaagtatctcttttcagcatgacggacatgattctgttttcgctcatcgtgggtctcctaacctactggttcctcttcagaaagaaaaaagaagaagtccccgagttcaccaaaattcagacattgacctcctctgtcagagagagcagctttgtggaaaagatgaagaaaacggggaggaacatcatcgtgttctacggctcccagacggggactgcagaggagtttgccaaccgcctgtccaaggacgcccaccgctacgggatgcgaggcatgtcagcggaccctgaggagtatgacctggccgacctgagcagcctgccagagatcgacaacgccctggtggttttctgcatggccacctacggtgagggagaccccaccgacaatgcccaggacttctacgactggctgcaggagacagacgtggatctctctggggtcaagttcgcggtgtttggtcttgggaacaagacctacgagcacttcaatgccatgggcaagtacgtggacaagcggctggagcagctcggcgcccagcgcatctttgagctggggttgggcgacgacgatgggaacttggaggaggacttcatcacctggcgagagcagttctggccggccgtgtgtgaacactttggggtggaagccactggcgaggagtccagcattcgccagtacgagcttgtggtccacaccgacatagatgcggccaaggtgtacatgggggagatgggccggctgaagagctacgagaaccagaagcccccctttgatgccaagaatccgttcctggctgcagtcaccaccaaccggaagctgaaccagggaaccgagcgccacctcatgcacctggaattggacatctcggactccaaaatcaggtatgaatctggggaccacgtggctgtgtacccagccaacgactctgctctcgtcaaccagctgggcaaaatcctgggtgccgacctggacgtcgtcatgtccctgaacaacctggatgaggagtccaacaagaagcacccattcccgtgccctacgtcctaccgcacggccctcacctactacctggacatcaccaacccgccgcgtaccaacgtgctgtacgagctggcgcagtacgcctcggagccctcggagcaggagctgctgcgcaagatggcctcctcctccggcgagggcaaggagctgtacctgagctgggtggtggaggcccggaggcacatcctggccatcctgcaggactgcccgtccctgcggccccccatcgaccacctgtgtgagctgctgccgcgcctgcaggcccgctactactccatcgcctcatcctccaaggtccaccccaactctgtgcacatctgtgcggtggttgtggagtacgagaccaaggccggccgcatcaacaagggcgtggccaccaactggctgcgggccaaggagcctgccggggagaacggcggccgtgcgctggtgcccatgttcgtgcgcaagtcccagttccgcctgcccttcaaggccaccacgcctgtcatcatggtgggccccggcaccggggtggcacccttcataggcttcatccaggagcgggcctggctgcgacagcagggcaaggaggtgggggagacgctgctgtactacggctgccgccgctcggatgaggactacctgtaccgggaggagctggcgcagttccacagggacggtgcgctcacccagctcaacgtggccttctcccgggagcagtcccacaaggtctacgtccagcacctgctaaagcaagaccgagagcaccttctacgacatcgtggctgagctcggggccatggagcacgcgcaggcggtggactacatcaagaaactgatgaccaagggccgctactccctggacgtgtggagctaggggcctgcctgccccacccaccccacagactccggcctgtaatcagctctcctggctccctcccgtagtctcctgggtgtgtttggcttggccttggcatgggcgcaggcccagtgacaaagactcctctgggcctggggtgcatcctcctcagcccccaggccaggtgaggtccaccggcccctggcagcacagcccagggcctgcatgggggcaccgggctccatgcctctggaggcctctggccctcggtggctgcacagaagggctctttctctctgctgagctgggcccagcccctccacgtgatttccagtgagtgtaaataattttaaataacctctggcccttggaataaagttctgttttctgta

SEQ ID NO: 311995 - DNA, 2469 bp, Homo sapiens
ggccagcgtcatgacaacggggagaccccacgaacccctttgggggcccccggggcccctcaaacccccaaccccccaaagggccttctccaccgtgtccgaggcggtggccgaagaagtatctcttttcagcatgacggacatgattctgttttcgctcatcgtgggtctcctaacctactggttcctcttcagaaagaaaaaagaagaagtccccgagttcaccaaaattcagacattgacctcctctgtcagagagagcagctttgtggaaaagatgaagaaaacggggaggaacatcatcgtgttctacggctcccagacggggactgcagaggagtttgccaaccgcctgtccaaggacgcccaccgctacgggatgcgaggcatgtcagcggaccctgaggagtatgacctggccgacctgagcagcctgccagagatcgacaacgccctggtggttttctgcatggccacctacggtgagggagaccccaccgacaatgcccaggacttctacgactggctgcaggagacagacgtggatctctctggggtcaagttcgcggtgtttggtcttgggaacaagacctacgagcacttcaatgccatgggcaagtacgtggacaagcggctggagcagctcggcgcccagcgcatctttgagctggggttgggcgacgacgatgggaacttggaggaggacttcatcacctggcgagagcagttctggccggccgtgtgtgaacactttggggtggaagccactggcgaggagtccagcattcgccagtacgagcttgtggtccacaccgacatagatgcggccaaggtgtacatgggggagatgggccggctgaagagctacgagaaccagaagcccccctttgatgccaagaatccgttcctggctgcagtcaccaccaaccggaagctgaaccagggaaccgagcgccacctcatgcacctggaattggacatctcggactccaaaatcaggtatgaatctggggaccacgtggctgtgtacccagccaacgactctgctctcgtcaaccagctgggcaaaatcctgggtgccgacctggacgtcgtcatgtccctgaacaacctggatgaggagtccaacaagaagcacccattcccgtgccctacgtcctaccgcacggccctcacctactacctggacatcaccaacccgccgcgtaccaacgtgctgtacgagctggcgcagtacgcctcggagccctcggagcaggagctgctgcgcaagatggcctcctcctccggcgagggcaaggagctgtacctgagctgggtggtggaggcccggaggcacatcctggccatcctgcaggactgcccgtccctgcggccccccatcgaccacctgtgtgagctgctgccgcgcctgcaggcccgctactactccatcgcctcatcctccaaggtccaccccaactctgtgcacatctgtgcggtggttgtggagtacgagaccaaggccggccgcatcaacaagggcgtggccaccaactggctgcgggccaaggagcctgccggggagaacggcggccgtgcgctggtgcccatgttcgtgcgcaagtcccagttccgcctgcccttcaaggccaccacgcctgtcatcatggtgggccccggcaccggggtggcacccttcataggcttcatccaggagcgggcctggctgcgacagcagggcaaggaggtgggggagacgctgctgtactacggctgccgccgctcggatgaggactacctgtaccgggaggagctggcgcagttccacagggacggtgcgctcacccagctcaacgtggccttctcccgggagcagtcccacaaggtctacgtccagcacctgctaaagcaagaccgagagcacctgtggaagttgatcgaaggcggtgcccacatctacgtctgtggggatgcacggaacatggccagggatgtgcagaacaccttctacgacatcgtggctgagctcggggccatggagcacgcgcaggcggtggactacatcaagaaactgatgaccaagggccgctactccctggacgtgtggagctaggggcctgcctgccccacccaccccacagactccggcctgtaatcagctctcctggctccctcccgtagtctcctgggtgtgtttggcttggccttggcatgggcgcaggcccagtgacaaagactcctctgggcctggggtgcatcctcctcagcccccaggccaggtgaggtccaccggcccctggcagcacagcccagggcctgcatgggggcaccgggctccatgcctctggaggcctctggccctcggtggctgcacagaagggctctttctctctgctgagctgggcccagcccctccacgtgatttccagtgagtgtaaataattttaaataacctctggcccttggaataaagttctgttttctgta

SEQ ID NO: 311996 - DNA, 2114 bp, Homo sapiens
tgtagctgttcttgaggatccccgtctggatgtaaatgtagtggatcgtgatgagtatacctggccgacctgagcagcctgccagagatcgacaacgccctggtggttttctgcatggccacctacggtgagggagaccccaccgacaatgcccaggacttctacgactggctgcaggagacagacgtggatctctctggggtcaagttcgcggtgtttggtcttgggaacaagacctacgagcacttcaatgccatgggcaagtacgtggacaagcggctggagcagctcggcgcccagcgcatctttgagctggggttgggcgacgacgatgggaacttggaggaggacttcatcacctggcgagagcagttctggccggccgtgtgtgaacactttggggtggaagccactggcgaggagtccagcattcgccagtacgagcttgtggtccacaccgacatagatgcggccaaggtgtacatgggggagatgggccggctgaagagctacgagaaccagaagcccccctttgatgccaagaatccgttcctggctgcagtcaccaccaaccggaagctgaaccagggaaccgagcgccacctcatgcacctggaattggacatctcggactccaaaatcaggtatgaatctggggaccacgtggctgtgtacccagccaacgactctgctctcgtcaaccagctgggcaaaatcctgggtgccgacctggacgtcgtcatgtccctgaacaacctggatgaggagtccaacaagaagcacccattcccgtgccctacgtcctaccgcacggccctcacctactacctggacatcaccaacccgccgcgtaccaacgtgctgtacgagctggcgcagtacgcctcggagccctcggagcaggagctgctgcgcaagatggcctcctcctccggcgagggcaaggagctgtacctgagctgggtggtggaggcccggaggcacatcctggccatcctgcaggactgcccgtccctgcggccccccatcgaccacctgtgtgagctgctgccgcgcctgcaggcccgctactactccatcgcctcatcctccaaggtccaccccaactctgtgcacatctgtgcggtggttgtggagtacgagaccaaggccggccgcatcaacaagggcgtggccaccaactggctgcgggccaaggagcctgccggggagaacggcggccgtgcgctggtgcccatgttcgtgcgcaagtcccagttccgcctgcccttcaaggccaccacgcctgtcatcatggtgggccccggcaccggggtggcacccttcataggcttcatccaggagcgggcctggctgcgacagcagggcaaggaggtgggggagacgctgctgtactacggctgccgccgctcggatgaggactacctgtaccgggaggagctggcgcagttccacagggacggtgcgctcacccagctcaacgtggccttctcccgggagcagtcccacaaggtctacgtccagcacctgctaaagcaagaccgagagcacctgtggaagttgatcgaaggcggtgcccacatctacgtctgtggggatgcacggaacatggccagggatgtgcagaacaccttctacgacatcgtggctgagctcggggccatggagcacgcgcaggcggtggactacatcaagaaactgatgaccaagggccgctactccctggacgtgtggagctaggggcctgcctgccccacccaccccacagactccggcctgtaatcagctctcctggctccctcccgtagtctcctgggtgtgtttggcttggccttggcatgggcgcaggcccagtgacaaagactcctctgggcctggggtgcatcctcctcagcccccaggccaggtgaggtccaccggcccctggcagcacagcccagggcctgcatgggggcaccgggctccatgcctctggaggcctctggccctcggtggctgcacagaagggctctttctctctgctgagctgggcccagcccctccacgtgatttccagtgagtgtaaataattttaaataacctctggcccttggaataaagttctgttttctgta

SEQ ID NO: 311997 - DNA, 2435 bp, Homo sapiens
cccaaactaggctagtacgaggctgcgtgtgtatcggccgagggccgggctgccagcgtttcatgatcaacatgggagactcccacgtggacaccagctccaccgtgtccgaggcggtggccgaagaagtatctcttttcagcatgacggacatgattctgttttcgctcatcgtgggtctcctaacctactggttcctcttcagaaagaaaaaagaagaagtccccgagttcaccaaaattcagacattgacctcctctgtcagagagagcagctttgtggaaaagatgaagaaaacggggaggaacatcatcgtgttctacggctcccagacggggactgcagaggagtttgccaaccgcctgtccaaggacgcccaccgctacgggatgcgaggcatgtcagcggaccctgaggagtatgacctggccgacctgagcagcctgccagagatcgacaacgccctggtggttttctgcatggccacctacggtgagggagaccccaccgacaatgcccaggacttctacgactggctgcaggagacagacgtggatctctctggggtcaagttcgcggtgtttggtcttgggaacaagacctacgagcacttcaatgccatgggcaagtacgtggacaagcggctggagcagctcggcgcccagcgcatctttgagctggggttgggcgacgacgatgggaacttggaggaggacttcatcacctggcgagagcagttctggccggccgtgtgtgaacactttggggtggaagccactggcgaggagtccagcattcgccagtacgagcttgtggtccacaccgacatagatgcggccaaggtgtacatgggggagatgggccggctgaagagctacgagaaccagaagcccccctttgatgccaagaatccgttcctggctgcagtcaccaccaaccggaagctgaaccagggaaccgagcgccacctcatgcacctggaattggacatctcggactccaaaatcaggtatgaatctggggaccacgtggctgtgtacccagccaacgactctgctctcgtcaaccagctgggcaaaatcctgggtgccgacctggacgtcgtcatgtccctgaacaacctggatgaggagtccaacaagaagcacccattcccgtgccctacgtcctaccgcacggccctcacctactacctggacatcaccaacccgccgcgtaccaacgtgctgtacgagctggcgcagtacgcctcggagccctcggagcaggagctgctgcgcaagatggcctcctcctccggcgagggcaaggagctgtacctgagctgggtggtggaggcccggaggcacatcctggccatcctgcaggactgcccgtccctgcggccccccatcgaccacctgtgtgagctgctgccgcgcctgcaggcccgctactactccatcgcctcatcctccaaggtccaccccaactctgtgcacatctgtgcggtggttgtggagtacgagaccaaggccggccgcatcaacaagggcgtggccaccaactggctgcgggccaaggagcctgccggggagaacggcggccgtgcgctggtgcccatgttcgtgcgcaagtcccagttccgcctgcccttcaaggccaccacgcctgtcatcatggtgggccccggcaccggggtggcacccttcataggcttcatccaggagcgggcctggctgcgacagcagggcaaggaggtgggggagacgctgctgtactacggctgccgccgctcggatgaggactacctgtaccgggaggagctggcgcagttccacagggacggtgcgctcacccagctcaacgtggccttctcccgggagcagtcccacaaggtctacgtccagcacctgctaaagcaagaccgagagcacctgtggaagttgatcgaaggcggtgcccacatctacgtctgtggggatgcacggaacatggccagggatgtgcagaacaccttctacgacatcgtggctgagctcggggccatggagcacgcgcaggcggtggactacatcaagaaactgatgaccaagggagcctgtcggggagaacggcggccgtgcgctggtgcccatgttcgtgcgcaagtcccagttccgcctgcccttggccttggcatgggcgcaggcccagtgacaaagactcctctgggcctggggtgcatcctcctcagcccccaggccaggtgaggtccaccggcccctggcagcacagcccagggcctgcatgggggcaccgggctccatgcctctggaggcctctggccctcggtggctgcacagaagggctctttctctctgctgagctgggcccagcccctccacgtgatttccagtgagtgtaaataattttaaataacctctggcccttggaataaagttctgttttctgta

SEQ ID NO: 311998 - DNA, 2152 bp, Homo sapiens
cccaaactaggctagtacgaggctgcgtgtgtatcggccgagggccgggctgccagcgtttcatgatcaacatgggagactcccacgtggacaccagctccaccgtgtccgaggcggtggccgaagaagtatctcttttcagcatgacggacatgattctgttttcgctcatcgtgggtctcctaacctactggttcctcttcagaaagaaaaaagaagaagtccccgagttcaccaaaattcagacattgacctcctctgtcagagagagcagctttgtggaaaagatgaagaaaacggggaggaacatcatcgtgttctacggctcccagacggggactgcagaggagtttgccaaccgcctgtccaaggacgcccaccgctacgggatgcgaggcatgtcagcggaccctgaggagtatgacctggccgacctgagcagcctgccagagatcgacaacgccctggtggttttctgcatggccacctacggtgagggagaccccaccgacaatgcccaggacttctacgactggctgcaggagacagacgtggatctctctggggtcaagttcgcggtgtttggtcttgggaacaagacctacgagcacttcaatgccatgggcaagtacgtggacaagcggctggagcagctcggcgcccagcgcatctttgagctggggttgggcgacgacgatgggaacttggaggaggacttcatcacctggcgagagcagttctggccggccgtgtgtgaacactttggggtggaagccactggcgaggagtccagcattcgccagtacgagcttgtggtccacaccgacatagatgcggccaaggtgtacatgggggagatgggccggctgaagagctacgagaaccagaagcccccctttgatgccaagaatccgttcctggctgcagtcaccaccaaccggaagctgaaccagggaaccgagcgccacctcatgcacctggaattggacatctcggactccaaaatcaggtatgaatctggggaccacgtggctgtgtacccagccaacgactctgctctcgtcaaccagctgggcaaaatcctgggtgccgacctggacgtcgtcatgtccctgaacaacctggatgaggagtccaacaagaagcacccattcccgtgccctacgtcctaccgcacggccctcacctactacctggacatcaccaacccgccgcgtaccaacgtgctgtacgagctggcgcagtacgcctcggagccctcggagcaggagctgctgcgcaagatggcctcctcctccggcgagggcaaggagctgtacctgagctgggtggtggaggcccggaggcacatcctggccatcctgcaggactgcccgtccctgcggccccccatcgaccacctgtgtgagctgctgccgcgcctgcaggcccgctactactccatcgcctcatcctccaaggtccaccccaactctgtgcacatctgtgcggtggttgtggagtacgagaccaaggccggccgcatcaacaagggcgtggccaccaactggctgcgggccaaggagcctgccggggagaacggcggccgtgcgctggtgcccatgttcgtgcgcaagtcccagttccgcctgcccttcaaggccaccacgcctgtcatcatggtgggccccggcaccggggtggcacccttcataggcttcatccaggagcgggcctggctgcgacagcagggcaaggaggtgggggagacgctgctgtactacggctgccgccgctcggatgaggactacctgtaccgggaggagctggcgcagttccacagggacggtgcgctcacccagctcaacgtggccttctcccgggagcagtcccacaaggtctacgtccagcacctgctaaagcaagaccgagagcacctgtggaagttgatcgaaggcggtgcccacatctacgtctgtggggatgcacggaacatggccagggatgtgcagaacaccttctacgacatcgtggctgagctcggggccatggagcacgcgcaggcggtggactacatcaagaaactgatgaccaagggctccacgtgatttccagtgagtgtaaataattttaaataacctctggcccttggaataaagttctgttttctgta

SEQ ID NO: 311999 - DNA, 1754 bp, Homo sapiens
aacaagatgtcatgagtgcgaggctcggtgtaattcatccgaggaaggcagctggcgatggagttcaacattcgccagtacgagcttgtggtccacaccgacatagatgcggccaaggtgtacatgggggagatgggccggctgaagagctacgagaaccagaagcccccctttgatgccaagaatccgttcctggctgcagtcaccaccaaccggaagctgaaccagggaaccgagcgccacctcatgcacctggaattggacatctcggactccaaaatcaggtatgaatctggggaccacgtggctgtgtacccagccaacgactctgctctcgtcaaccagctgggcaaaatcctgggtgccgacctggacgtcgtcatgtccctgaacaacctggatgaggagtccaacaagaagcacccattcccgtgccctacgtcctaccgcacggccctcacctactacctggacatcaccaacccgccgcgtaccaacgtgctgtacgagctggcgcagtacgcctcggagccctcggagcaggagctgctgcgcaagatggcctcctcctccggcgagggcaaggagctgtacctgagctgggtggtggaggcccggaggcacatcctggccatcctgcaggactgcccgtccctgcggccccccatcgaccacctgtgtgagctgctgccgcgcctgcaggcccgctactactccatcgcctcatcctccaaggtccaccccaactctgtgcacatctgtgcggtggttgtggagtacgagaccaaggccggccgcatcaacaagggcgtggccaccaactggctgcgggccaaggagcctgccggggagaacggcggccgtgcgctggtgcccatgttcgtgcgcaagtcccagttccgcctgcccttcaaggccaccacgcctgtcatcatggtgggccccggcaccggggtggcacccttcataggcttcatccaggagcgggcctggctgcgacagcagggcaaggaggtgggggagacgctgctgtactacggctgccgccgctcggatgaggactacctgtaccgggaggagctggcgcagttccacagggacggtgcgctcacccagctcaacgtggccttctcccgggagcagtcccacaaggtctacgtccagcacctgctaaagcaagaccgagagcacctgtggaagttgatcgaaggcggtgcccacatctacgtctgtggggatgcacggaacatggccagggatgtgcagaacaccttctacgacatcgtggctgagctcggggccatggagcacgcgcaggcggtggactacatcaagaaactgatgaccaagggccgctactccctggacgtgtggagctaggggcctgcctgccccacccaccccacagactccggcctgtaatcagctctcctggctccctcccgtagtctcctgggtgtgtttggcttggccttggcatgggcgcaggcccagtgacaaagactcctctgggcctggggtgcatcctcctcagcccccaggccaggtgaggtccaccggcccctggcagcacagcccagggcctgcatgggggcaccgggctccatgcctctggaggcctctggccctcggtggctgcacagaagggctctttctctctgctgagctgggcccagcccctccacgtgatttccagtgagtgtaaataattttaaataacctctggcccttggaataaagttctgttttctgta

SEQ ID NO: 312000 - DNA, 2071 bp, Homo sapiens
aaacatccactattcagtggaaagctcccctctgccacccactcatccccactgttcttattatttatggatccttctagagttcctgtatgaacatacaagtaaaacaaacagagactcttatttttaatttaaaaaaacctttattttattttagagacagggtctcactgtgttgcccaggctggaagcgaaactctgtctcaaaaaaaaaaagagaactgcattggaccaggctgggagagcccttgatgtaaccggtgagatttcctcatggagatctctgagattccctgtgctttgtgcaaccagaagggtccttggagacagagactcagatcaaagccccggccgctcactgtgcttctctcctccccacccagcccctttgatgccaagaatccgttcctggctgcagtcaccaccaaccggaagctgaaccagggaaccgagcgccacctcatgcacctggaattggacatctcggactccaaaatcaggtaccagctgccactgtcaccccctgaaccctcactctgggcctcctgacctggggcagggccagccttccgcccctcccgagcctcacatctccctccaggtatgaatctggggaccacgtggctgtgtacccagccaacgactctgctctcgtcaaccagctgggcaaaatcctgggtgccgacctggacgtcgtcatgtccctgaacaacctggatgaggagtccaacaagaagcacccattcccgtgccctacgtcctaccgcacggccctcacctactacctggacatcaccaacccgccgcgtaccaacgtgctgtacgagctggcgcagtacgcctcggagccctcggagcaggagctgctgcgcaagatggcctcctcctccggcgagggcaaggagctgtacctgagctgggtggtggaggcccggaggcacatcctggccatcctgcaggactgcccgtccctgcggccccccatcgaccacctgtgtgagctgctgccgcgcctgcaggcccgctactactccatcgcctcatcctccaaggtccaccccaactctgtgcacatctgtgcggtggttgtggagtacgagaccaaggccggccgcatcaacaagggcgtggccaccaactggctgcgggccaaggagcctgccggggagaacggcggccgtgcgctggtgcccatgttcgtgcgcaagtcccagttccgcctgcccttcaaggccaccacgcctgtcatcatggtgggccccggcaccggggtggcacccttcataggcttcatccaggagcgggcctggctgcgacagcagggcaaggaggtgggggagacgctgctgtactacggctgccgccgctcggatgaggactacctgtaccgggaggagctggcgcagttccacagggacggtgcgctcacccagctcaacgtggccttctcccgggagcagtcccacaaggtctacgtccagcacctgctaaagcaagaccgagagcacctgtggaagttgatcgaaggcggtgcccacatctacgtctgtggggatgcacggaacatggccagggatgtgcagaacaccttctacgacatcgtggctgagctcggggccatggagcacgcgcaggcggtggactacatcaagaaactgatgaccaagggccgctactccctggacgtgtggagctaggggcctgcctgccccacccaccccacagactccggcctgtaatcagctctcctggctccctcccgtagtctcctgggtgtgtttggcttggccttggcatgggcgcaggcccagtgacaaagactcctctgggcctggggtgcatcctcctcagcccccaggccaggtgaggtccaccggcccctggcagcacagcccagggcctgcatgggggcaccgggctccatgcctctggaggcctctggccctcggtggctgcacagaagggctctttctctctgctgagctgggcccagcccctccacgtgatttccagtgagtgtaaataattttaaataacctctggcccttggaataaagttctgttttctgta

SEQ ID NO: 312001 - DNA, 710 bp, Homo sapiens
ccctgcccaggtgcccgcagagagcagccgggctgccagcgtttcatgatcaacatgggagactcccacgtggacaccagctccaccgtgtccgaggcggtggccgaagaagtatctcttttcagcatgacggacatgattctgttttcgctcatcgtgggtctcctaacctactggttcctcttcagaaagaaaaaagaagaagtccccgagttcaccaaaattcagacattgacctcctctgtcagagagagcagctttgtggaaaagatgaagaaaacggggaggaacatcatcgtgttctacggctcccagacggggactgcagaggagtttgccaaccgcctgtccaaggacgcccaccgctacgggatgcgaggcatgtcagcggaccctgaggagtatgacctggccgacctgagcagcctgccagagatcgacaacgccctggtggcttgctcctcctgcagggcctgtgagctgctcacaactgggtcaacgctttaggctgagtcactcctcgggtctctccataattcagcccaacaatgcttggtttatttcaatcagctctgacacttgtttagacgattggccattctaaagttggtgagtttgtcaagcaactatcgacttgatcagttcagccaagcaactgacaaatcaaaaacccacttgtcagttcagtaaaataatttggtcaaacaaaa

SEQ ID NO: 312002 - DNA, 217 bp, Homo sapiens
ctgcactccagcctgggtggcagagcgaaactctgtctcaaaaaaaaaaagagaactgcattggaccaggctgggagagcccttgatgtaaccggtgagatttcctcatggagatctctgagattccctgtgctttgtgcaaccagaagggtccttggagacagagactcagatcaaagccccggccgctcactgtgcttctctcctccccacccag

SEQ ID NO: 312003 - DNA, 660 bp, Homo sapiens
ccctgcccaggtgcccgcagagagcagccgggctgccagcgtttcatgatcaacatgggagactcccacgtggacaccagctccaccgtgtccgaggcggtggccgaagaagtatctcttttcagcatgacggacatgattctgttttcgctcatcgtgggtctcctaacctactggttcctcttcagaaagaaaaaagaagaagtccccgagttcaccaaaattcagacattgacctcctctgtcagagagagcagctttgtggaaaagatgaagaaaacggggaggaacatcatcgtgttctacggctcccagacggggactgcagaggagtttgccaaccgcctgtccaaggacgcccaccgctacgggatgcgaggcatgtcagcggaccctgaggagtatgacctggccgacctgagcagcctgccagagatcgacaacgccctggtggttttctgcatggccacctacggtgagggagaccccaccgacaatgcccaggacttctacgactggctgcaggagacagacgtggatctctctggggtcaagttcgcggtgagtcacccagagactgctatgggctcccggtggcctgcggtgcctccctggggactccagatccatgtatctgaaaggcagccctccagaccccca

SEQ ID NO: 312004 - DNA, 2479 bp, Homo sapiens
cccaaactaggctagtacgaggctgcgtgtgtatcggccgagggccgggctgccagcgtttcatgatcaacatgggagactcccacgtggacaccagctccaccgtgtccgaggcggtggccgaagaagtatctcttttcagcatgacggacatgattctgttttcgctcatcgtgggtctcctaacctactggttcctcttcagaaagaaaaaagaagaagtccccgagttcaccaaaattcagacattgacctcctctgtcagagagagcagctttgtggaaaagatgaagaaaacggggaggaacatcatcgtgttctacggctcccagacggggactgcagaggagtttgccaaccgcctgtccaaggacgcccaccgctacgggatgcgaggcatgtcagcggaccctgaggagtatgacctggccgacctgagcagcctgccagagatcgacaacgccctggtggttttctgcatggccacctacggtgagggagaccccaccgacaatgcccaggacttctacgactggctgcaggagacagacgtggatctctctggggtcaagttcgcggtgtttggtcttgggaacaagacctacgagcacttcaatgccatgggcaagtacgtggacaagcggctggagcagctcggcgcccagcgcatctttgagctggggttgggcgacgacgatgggaacttggaggaggacttcatcacctggcgagagcagttctggccggccgtgtgtgaacactttggggtggaagccactggcgaggagtccagcattcgccagtacgagcttgtggtccacaccgacatagatgcggccaaggtgtacatgggggagatgggccggctgaagagctacgagaaccagaagcccccctttgatgccaagaatccgttcctggctgcagtcaccaccaaccggaagctgaaccagggaaccgagcgccacctcatgcacctggaattggacatctcggactccaaaatcaggtatgaatctggggaccacgtggctgtgtacccagccaacgactctgctctcgtcaaccagctgggcaaaatcctgggtgccgacctggacgtcgtcatgtccctgaacaacctggatgaggagtccaacaagaagcacccattcccgtgccctacgtcctaccgcacggccctcacctactacctggacatcaccaacccgccgcgtaccaacgtgctgtacgagctggcgcagtacgcctcggagccctcggagcaggagctgctgcgcaagatggcctcctcctccggcgagggcaaggagctgtacctgagctgggtggtggaggcccggaggcacatcctggccatcctgcaggactgcccgtccctgcggccccccatcgaccacctgtgtgagctgctgccgcgcctgcaggcccgctactactccatcgcctcatcctccaaggtccaccccaactctgtgcacatctgtgcggtggttgtggagtacgagaccaaggccggccgcatcaacaagggcgtggccaccaactggctgcgggccaaggagcctgccggggagaacggcggccgtgcgctggtgcccatgttcgtgcgcaagtcccagttccgcctgcccttcaaggccaccacgcctgtcatcatggtgggccccggcaccggggtggcacccttcataggcttcatccaggagcgggcctggctgcgacagcagggcaaggaggtgggggagacgctgctgtactacggctgccgccgctcggatgaggactacctgtaccgggaggagctggcgcagttccacagggacggtgcgctcacccagctcaacgtggccttctcccgggagcagtcccacaaggtctacgtccagcacctgctaaagcaagaccgagagcacctgtggaagttgatcgaaggcggtgcccacatctacgtctgtggggatgcacggaacatggccagggatgtgcagaacaccttctacgacatcgtggctgagctcggggccatggagcacgcgcaggcggtggactacatcaagaaactgatgaccaagggccgctactccctggacgtgtggagctaggggcctgcctgccccacccaccccacagactccggcctgtaatcagctctcctggctccctcccgtagtctcctgggtgtgtttggcttggccttggcatgggcgcaggcccagtgacaaagactcctctgggcctggggtgcatcctcctcagcccccaggccaggtgaggtccaccggcccctggcagcacagcccagggcctgcatgggggcaccgggctccatgcctctggaggcctctggccctcggtggctgcacagaagggctctttctctctgctgagctgggcccagcccctccacgtgatttccagtgagtgtaaataattttaaataacctctggcccttggaataaagttctgttttctgta

SEQ ID NO: 312005 - DNA, 2519 bp, Homo sapiens
cccaaactaggctagtacgaggctgcgtgtgtatcggccgagggccgggctgccagcgtttcatgatcaacatgggagactcccacgtggacaccagctccaccgtgtccgaggcggtggccgaagaagtatctcttttcagcatgacggacatgattctgttttcgctcatcgtgggtctcctaacctactggttcctcttcagaaagaaaaaagaagaagtccccgagttcaccaaaattcagacattgacctcctctgtcagagagagcagctttgtggaaaagatgaagaaaacggggaggaacatcatcgtgttctacggctcccagacggggactgcagaggagtttgccaaccgcctgtccaaggacgcccaccgctacgggatgcgaggcatgtcagcggaccctgaggagtatgacctggccgacctgagcagcctgccagagatcgacaacgccctggtggttttctgcatggccacctacggtgagggagaccccaccgacaatgcccaggacttctacgactggctgcaggagacagacgtggatctctctggggtcaagttcgcggtgtttggtcttgggaacaagacctacgagcacttcaatgccatgggcaagtacgtggacaagcggctggagcagctcggcgcccagcgcatctttgagctggggttgggcgacgacgatgggaacttggaggaggacttcatcacctggcgagagcagttctggccggccgtgtgtgaacactttggggtggaagccactggcgaggagtccagcattcgccagtacgagcttgtggtccacaccgacatagatgcggccaaggtgtacatgggggagatgggccggctgaagagctacgagaaccagaagcccccctttgatgccaagaatccgttcctggctgcagtcaccaccaaccggaagctgaaccagggaaccgagcgccacctcatgcacctggaattggacatctcggactccaaaatcaggtatgaatctggggaccacgtggctgtgtacccagccaacgactctgctctcgtcaaccagctgggcaaaatcctgggtgccgacctggacgtcgtcatgtccctgaacaacctggatgaggagtccaacaagaagcacccattcccgtgccctacgtcctaccgcacggccctcacctactacctggacatcaccaacccgccgcgtaccaacgtgctgtacgagctggcgcagtacgcctcggagccctcggagcaggagctgctgcgcaagatggcctcctcctccggcgagggcaaggagctgtacctgagctgggtggtggaggcccggaggcacatcctggccatcctgcaggactgcccgtccctgcggccccccatcgaccacctgtgtgagctgctgccgcgcctgcaggcccgctactactccatcgcctcatcctccaaggtccaccccaactctgtgcacatctgtgcggtggttgtggagtacgagaccaaggccggccgcatcaacaagggcgtggccaccaactggctgcgggccaaggagcctgccggggagaacggcggccgtgcgctggtgcccatgttcgtgcgcaagtcccagttccgcctgcccttcaaggccaccacgcctgtcatcatggtgggccccggcaccggggtggcacccttcataggcttcatccaggagcgggcctggctgcgacagcagggcaaggaggtgggggagacgctgctgtactacggctgccgccgctcggatgaggactacctgtaccgggaggagctggcgcagttccacagggacggtgcgctcacccagctcaacgtggccttctcccgggagcagtcccacaaggtctacgtccagcacctgctaaagcaagaccgagagcacctgtggaagttgatcgaaggcggtgcccacatctacgtctgtggggatgcacggaacatggccagggatgtgcagaacaccttctacgacatcgtggctgagctcggggccatggagcacgcgcaggcggtggactacatcaagaaactgatgaccaagggccgctactccctggacgtgtggagctaggggcctgcctgccccacccaccccacagactccggcctgtaatcagctctcctggctccctcccgtagtctcctgggtgtgtttggcttggccttggcatgggcgcaggcccagtgacaaagactcctctgggcctggggtgcatcctcctcagcccccaggccaggtgaggtccaccggcccctggcagcacagcccagggcctgcatgggggcaccgggctccatgcctctggaggcctctggccctcggtggctgcacagaagggctctttctctctgctgagctgggcccagcccctccacgtgatttccagtgagtgtaaataattttaaataacctctggcccttggaataaagttctgttttctgtaaaaaaaaaaaaaaattcggggctctaggcggggggggaag

SEQ ID NO: 312006 - DNA, 2574 bp, Homo sapiens
cccaaactaggctagtacgaggctgcgtgtgtatcggccgagggccgggctgccagcgtttcatgatcaacatgggagactcccacgtggacaccagctccaccgtgtccgaggcggtggccgaagaagtatctcttttcagcatgacggacatgattctgttttcgctcatcgtgggtctcctaacctactggttcctcttcagaaagaaaaaagaagaagtccccgagttcaccaaaattcagacattgacctcctctgtcagagagagcagctttgtggaaaagatgaagaaaacggggaggaacatcatcgtgttctacggctcccagacggggactgcagaggagtttgccaaccgcctgtccaaggacgcccaccgctacgggatgcgaggcatgtcagcggaccctgaggagtatgacctggccgacctgagcagcctgccagagatcgacaacgccctggtggttttctgcatggccacctacggtgagggagaccccaccgacaatgcccaggacttctacgactggctgcaggagacagacgtggatctctctggggtcaagttcgcggtgtttggtcttgggaacaagacctacgagcacttcaatgccatgggcaagtacgtggacaagcggctggagcagctcggcgcccagcgcatctttgagctggggttgggcgacgacgatgggaacttggaggaggacttcatcacctggcgagagcagttctggccggccgtgtgtgaacactttggggtggaagccactggcgaggagtccagcattcgccagtacgagcttgtggtccacaccgacatagatgcggccaaggtgtacatgggggagatgggccggctgaagagctacgagaaccagaagcccccctttgatgccaagaatccgttcctggctgcagtcaccaccaaccggaagctgaaccagggaaccgagcgccacctcatgcacctggaattggacatctcggactccaaaatcaggtatgaatctggggaccacgtggctgtgtacccagccaacgactctgctctcgtcaaccagctgggcaaaatcctgggtgccgacctggacgtcgtcatgtccctgaacaacctggatgaggagtccaacaagaagcacccattcccgtgccctacgtcctaccgcacggccctcacctactacctggacatcaccaacccgccgcgtaccaacgtgctgtacgagctggcgcagtacgcctcggagccctcggagcaggagctgctgcgcaagatggcctcctcctccggcgagggcaaggagctgtacctgagctgggtggtggaggcccggaggcacatcctggccatcctgcaggactgcccgtccctgcggccccccatcgaccacctgtgtgagctgctgccgcgcctgcaggcccgctactactccatcgcctcatcctccaaggtccaccccaactctgtgcacatctgtgcggtggttgtggagtacgagaccaaggccggccgcatcaacaagggcgtggccaccaactggctgcgggccaaggagcctgccggggagaacggcggccgtgcgctggtgcccatgttcgtgcgcaagtcccagttccgcctgcccttcaaggccaccacgcctgtcatcatggtgggccccggcaccggggtggcacccttcataggcttcatccaggagcgggcctggctgcgacagcagggcaaggaggtgggggagacgctgctgtactacggctgccgccgctcggatgaggactacctgtaccgggaggagctggcgcagttccacagggacggtgcgctcacccagctcaacgtggccttctcccgggagcagtcccacaaggtctacgtccagcacctgctaaagcaagaccgagagcacctgtggaagttgatcgaaggcggtgcccacatctacgtctgtgggtgagtgagtggggtcactggaatagggggcagggaggacaaggccctgcctgccacagttggcccagcccccagcaccccctcttcctgcccagggatgcacggaacatggccagggatgtgcagaacaccttctacgacatcgtggctgagctcggggccatggagcacgcgcaggcggtggactacatcaagaaactgatgaccaagggccgctactccctggacgtgtggagctaggggcctgcctgccccacccaccccacagactccggcctgtaatcagctctcctggctccctcccgtagtctcctgggtgtgtttggcttggccttggcatgggcgcaggcccagtgacaaagactcctctgggcctggggtgcatcctcctcagcccccaggccaggtgaggtccaccggcccctggcagcacagcccagggcctgcatgggggcaccgggctccatgcctctggaggcctctggccctcggtggctgcacagaagggctctttctctctgctgagctgggcccagcccctccacgtgatttccagtgagtgtaaataattttaaataacctctggcccttggaataaagttctgttttctgta

SEQ ID NO: 312007 - DNA, 2291 bp, Homo sapiens
gtgtggctgcagcagtgaagaaaatagatgaatgctgtcttcatcaagcttacgctctagtggacctcctctgtcagagagagcagctttgtggaaaagatgaagaaaacggggaggaacatcatcgtgttctacggctcccagacggggactgcagaggagtttgccaaccgcctgtccaaggacgcccaccgctacgggatgcgaggcatgtcagcggaccctgaggagtatgacctggccgacctgagcagcctgccagagatcgacaacgccctggtggttttctgcatggccacctacggtgagggagaccccaccgacaatgcccaggacttctacgactggctgcaggagacagacgtggatctctctggggtcaagttcgcggtgtttggtcttgggaacaagacctacgagcacttcaatgccatgggcaagtacgtggacaagcggctggagcagctcggcgcccagcgcatctttgagctggggttgggcgacgacgatgggaacttggaggaggacttcatcacctggcgagagcagttctggccggccgtgtgtgaacactttggggtggaagccactggcgaggagtccagcattcgccagtacgagcttgtggtccacaccgacatagatgcggccaaggtgtacatgggggagatgggccggctgaagagctacgagaaccagaagcccccctttgatgccaagaatccgttcctggctgcagtcaccaccaaccggaagctgaaccagggaaccgagcgccacctcatgcacctggaattggacatctcggactccaaaatcaggtatgaatctggggaccacgtggctgtgtacccagccaacgactctgctctcgtcaaccagctgggcaaaatcctgggtgccgacctggacgtcgtcatgtccctgaacaacctggatgaggagtccaacaagaagcacccattcccgtgccctacgtcctaccgcacggccctcacctactacctggacatcaccaacccgccgcgtaccaacgtgctgtacgagctggcgcagtacgcctcggagccctcggagcaggagctgctgcgcaagatggcctcctcctccggcgagggcaaggagctgtacctgagctgggtggtggaggcccggaggcacatcctggccatcctgcaggactgcccgtccctgcggccccccatcgaccacctgtgtgagctgctgccgcgcctgcaggcccgctactactccatcgcctcatcctccaaggtccaccccaactctgtgcacatctgtgcggtggttgtggagtacgagaccaaggccggccgcatcaacaagggcgtggccaccaactggctgcgggccaaggagcctgccggggagaacggcggccgtgcgctggtgcccatgttcgtgcgcaagtcccagttccgcctgcccttcaaggccaccacgcctgtcatcatggtgggccccggcaccggggtggcacccttcataggcttcatccaggagcgggcctggctgcgacagcagggcaaggaggtgggggagacgctgctgtactacggctgccgccgctcggatgaggactacctgtaccgggaggagctggcgcagttccacagggacggtgcgctcacccagctcaacgtggccttctcccgggagcagtcccacaaggtctacgtccagcacctgctaaagcaagaccgagagcacctgtggaagttgatcgaaggcggtgcccacatctacgtctgtggggatgcacggaacatggccagggatgtgcagaacaccttctacgacatcgtggctgagctcggggccatggagcacgcgcaggcggtggactacatcaagaaactgatgaccaagggccgctactccctggacgtgtggagctaggggcctgcctgccccacccaccccacagactccggcctgtaatcagctctcctggctccctcccgtagtctcctgggtgtgtttggcttggccttggcatgggcgcaggcccagtgacaaagactcctctgggcctggggtgcatcctcctcagcccccaggccaggtgaggtccaccggcccctggcagcacagcccagggcctgcatgggggcaccgggctccatgcctctggaggcctctggccctcggtggctgcacagaagggctctttctctctgctgagctgggcccagcccctccacgtgatttccagtgagtgtaaataattttaaataacctctggcccttggaataaagttctgttttctgta

SEQ ID NO: 312008 - DNA, 2415 bp, Homo sapiens
cccaaactaggctagtacgaggctgcgtgtgtatcggccgagggccgggctgccagcgtttcatgatcaacatgggagactcccacgtggacaccagctccaccgtgtccgaggcggtggccgaagaagtatctcttttcagcatgacggacatgattctgttttcgctcatcgtgggtctcctaacctactggttcctcttcagaaagaaaaaagaagaagtccccgagttcaccaaaattcagacattgacctcctctgtcagagagagcagctttgtggaaaagatgaagaaaacggggaggaacatcatcgtgttctacggctcccagacggggactgcagaggagtttgccaaccgcctgtccaaggacgcccaccgctacgggatgcgaggcatgtcagcggaccctgaggagtatgacctggccgacctgagcagcctgccagagatcgacaacgccctggtggttttctgcatggccacctacggtgagggagaccccaccgacaatgcccaggacttctacgactggctgcaggagacagacgtggatctctctggggtcaagttcgcggtgtttggtcttgggaacaagacctacgagcacttcaatgccatgggcaagtacgtggacaagcggctggagcagctcggcgcccagcgcatctttgagctggggttgggcgacgacgatgggaacttggaggaggacttcatcacctggcgagagcagttctggccggccgtgtgtgaacactttggggtggaagccactggcgaggagtccagcattcgccagtacgagcttgtggtccacaccgacatagatgcggccaaggtgtacatgggggagatgggccggctgaagagctacgagaaccagaagcccccctttgatgccaagaatccgttcctggctgcagtcaccaccaaccggaagctgaaccagggaaccgagcgccacctcatgcacctggaattggacatctcggactccaaaatcaggtatgaatctggggaccacgtggctgtgtacccagccaacgactctgctctcgtcaaccagctgggcaaaatcctgggtgccgacctggacgtcgtcatgtccctgaacaacctggatgaggagtccaacaagaagcacccattcccgtgccctacgtcctaccgcacggccctcacctactacctggacatcaccaacccgccgcgtaccaacgtgctgtacgagctggcgcagtacgcctcggagccctcggagcaggagctgctgcgcaagatggcctcctcctccggcgagggcaaggagctgtacctgagctgggtggtggaggcccggaggcacatcctggccatcctgcaggactgcccgtccctgcggccccccatcgaccacctgtgtgagctgctgccgcgcctgcaggcccgctactactccatcgcctcatcctccaaggtccaccccaactctgtgcacatctgtgcggtggttgtggagtacgagaccaaggccggccgcatcaacaagggcgtggccaccaactggctgcgggccaaggagcctgccggggagaacggcggccgtgcgctggtgcccatgttcgtgcgcaagtcccagttccgcctgcccttcaaggccaccacgcctgtcatcatggtgggccccggcaccggggtggcacccttcataggcttcatccaggagcgggcctggctgcgacagcagggcaaggaggtgggggagacgctgctgtactacggctgccgccgctcggatgaggactacctgtaccgggaggagctggcgcagttccacagggacggtgcgctcacccagctcaacgtggccttctcccgggagcagtcccacaaggtctacgtccagcacctgctaaagcaagaccgagagcacctgtggaagttgatcgaaggcggtgcccacatctacgtctgtggggatgcacggaacatggccagggatgtgcagaacaccttctacgacatcgtggctgagctcggggccatggagcacgcgcaggcggtggactacatcaagaaactgatgaccaagggctgtaatcagctctcctggctccctcccgtagtctcctgggtgtgtttggcttggccttggcatgggcgcaggcccagtgacaaagactcctctgggcctggggtgcatcctcctcagcccccaggccaggtgaggtccaccggcccctggcagcacagcccagggcctgcatgggggcaccgggctccatgcctctggaggcctctggccctcggtggctgcacagaagggctctttctctctgctgagctgggcccagcccctccacgtgatttccagtgagtgtaaataattttaaataacctctggcccttggaataaagttctgttttctgta

SEQ ID NO: 312009 - DNA, 2268 bp, Homo sapiens
cccaaactaggctagtacgaggctgcgtgtgtatcggccgagggccgggctgccagcgtttcatgatcaacatgggagactcccacgtggacaccagctccaccgtgtccgaggcggtggccgaagaagtatctcttttcagcatgacggacatgattctgttttcgctcatcgtgggtctcctaacctactggttcctcttcagaaagaaaaaagaagaagtccccgagttcaccaaaattcagacattgacctcctctgtcagagagagcagctttgtggaaaagatgaagaaaacggggaggaacatcatcgtgttctacggctcccagacggggactgcagaggagtttgccaaccgcctgtccaaggacgcccaccgctacgggatgcgaggcatgtcagcggaccctgaggagtatgacctggccgacctgagcagcctgccagagatcgacaacgccctggtggttttctgcatggccacctacggtgagggagaccccaccgacaatgcccaggacttctacgactggctgcaggagacagacgtggatctctctggggtcaagttcgcggtgtttggtcttgggaacaagacctacgagcacttcaatgccatgggcaagtacgtggacaagcggctggagcagctcggcgcccagcgcatctttgagctggggttgggcgacgacgatgggaacttggaggaggacttcatcacctggcgagagcagttctggccggccgtgtgtgaacactttggggtggaagccactggcgaggagtccagcattcgccagtacgagcttgtggtccacaccgacatagatgcggccaaggtgtacatgggggagatgggccggctgaagagctacgagaaccagaagcccccctttgatgccaagaatccgttcctggctgcagtcaccaccaaccggaagctgaaccagggaaccgagcgccacctcatgcacctggaattggacatctcggactccaaaatcaggtatgaatctggggaccacgtggctgtgtacccagccaacgactctgctctcgtcaaccagctgggcaaaatcctgggtgccgacctggacgtcgtcatgtccctgaacaacctggatgaggagtccaacaagaagcacccattcccgtgccctacgtcctaccgcacggccctcacctactacctggacatcaccaacccgccgcgtaccaacgtgctgtacgagctggcgcagtacgcctcggagccctcggagcaggagctgctgcgcaagatggcctcctcctccggcgagggcaaggagctgtacctgagctgggtggtggaggcccggaggcacatcctggccatcctgcaggactgcccgtccctgcggccccccatcgaccacctgtgtgagctgctgccgcgcctgcaggcccgctactactccatcgcctcatcctccaaggtccaccccaactctgtgcacatctgtgcggtggttgtggagtacgagaccaaggccggccgcatcaacaagggcgtggccaccaactggctgcgggccaaggagcctgccggggagaacggcggccgtgcgctggtgcccatgttcgtgcgcaagtcccagttccgcctgcccttcaaggccaccacgcctgtcatcatggtgggccccggcaccggggtggcacccttcataggcttcatccaggagcgggcctggctgcgacagcagggcaaggaggtgggggagacgctgctgtactacggctgccgccgctcggatgaggactacctgtaccgggaggagctggcgcagttccacagggacggtgcgctcacccagctcaacgtggccttctcccgggagcagtcccacaaggtctacgtccagcacctgctaaagcaagaccgagagcacctgtggaagttgatcgaaggcggtgcccacatctacgtctgtggggatgcacggaacatggccagggatgtgcagaacaccttctacgacatcgtggctgagctcggggccatggagcacgcgcaggcggtggactacatcaagaaactgatgaccaagggctggcagcacagcccagggcctgcatgggggcaccgggctccatgcctctggaggcctctggccctcggtggctgcacagaagggctctttctctctgctgagctgggcccagcccctccacgtgatttccagtgagtgtaaataattttaaataacctctggcccttggaataaagttctgttttctgta

SEQ ID NO: 312010 - DNA, 1970 bp, Homo sapiens
aaacatccactattcagtggaaagctcccctctgccacccactcatccccactgttcttattatttatggatccttctagagttcctgtatgaacatacaagtaaaacaaacagagactcttatttttaatttaaaaaaacctttattttattttagagacagggtctcactgtgttgcccaggctggaagcgaaactctgtctcaaaaaaaaaaagagaactgcattggaccaggctgggagagcccttgatgtaaccggtgagatttcctcatggagatctctgagattccctgtgctttgtgcaaccagaagggtccttggagacagagactcagatcaaagccccggccgctcactgtgcttctctcctccccacccagcccctttgatgccaagaatccgttcctggctgcagtcaccaccaaccggaagctgaaccagggaaccgagcgccacctcatgcacctggaattggacatctcggactccaaaatcaggtatgaatctggggaccacgtggctgtgtacccagccaacgactctgctctcgtcaaccagctgggcaaaatcctgggtgccgacctggacgtcgtcatgtccctgaacaacctggatgaggagtccaacaagaagcacccattcccgtgccctacgtcctaccgcacggccctcacctactacctggacatcaccaacccgccgcgtaccaacgtgctgtacgagctggcgcagtacgcctcggagccctcggagcaggagctgctgcgcaagatggcctcctcctccggcgagggcaaggagctgtacctgagctgggtggtggaggcccggaggcacatcctggccatcctgcaggactgcccgtccctgcggccccccatcgaccacctgtgtgagctgctgccgcgcctgcaggcccgctactactccatcgcctcatcctccaaggtccaccccaactctgtgcacatctgtgcggtggttgtggagtacgagaccaaggccggccgcatcaacaagggcgtggccaccaactggctgcgggccaaggagcctgccggggagaacggcggccgtgcgctggtgcccatgttcgtgcgcaagtcccagttccgcctgcccttcaaggccaccacgcctgtcatcatggtgggccccggcaccggggtggcacccttcataggcttcatccaggagcgggcctggctgcgacagcagggcaaggaggtgggggagacgctgctgtactacggctgccgccgctcggatgaggactacctgtaccgggaggagctggcgcagttccacagggacggtgcgctcacccagctcaacgtggccttctcccgggagcagtcccacaaggtctacgtccagcacctgctaaagcaagaccgagagcacctgtggaagttgatcgaaggcggtgcccacatctacgtctgtggggatgcacggaacatggccagggatgtgcagaacaccttctacgacatcgtggctgagctcggggccatggagcacgcgcaggcggtggactacatcaagaaactgatgaccaagggccgctactccctggacgtgtggagctaggggcctgcctgccccacccaccccacagactccggcctgtaatcagctctcctggctccctcccgtagtctcctgggtgtgtttggcttggccttggcatgggcgcaggcccagtgacaaagactcctctgggcctggggtgcatcctcctcagcccccaggccaggtgaggtccaccggcccctggcagcacagcccagggcctgcatgggggcaccgggctccatgcctctggaggcctctggccctcggtggctgcacagaagggctctttctctctgctgagctgggcccagcccctccacgtgatttccagtgagtgtaaataattttaaataacctctggcccttggaataaagttctgttttctgta

SEQ ID NO: 312011 - DNA, 1518 bp, Homo sapiens
gcctggtggcgaattcggcacgagggacatctcggactccaaaatcaggtatgaatctggggaccacgtggctgtgtacccagccaacgactctgctctcgtcaaccagctgggcaaaatcctgggtgccgacctggacgtcgtcatgtccctgaacaacctggatgaggagtccaacaagaagcacccattcccgtgccctacgtcctaccgcacggccctcacctactacctggacatcaccaacccgccgcgtaccaacgtgctgtacgagctggcgcagtacgcctcggagccctcggagcaggagctgctgcgcaagatggcctcctcctccggcgagggcaaggagctgtacctgagctgggtggtggaggcccggaggcacatcctggccatcctgcaggactgcccgtccctgcggccccccatcgaccacctgtgtgagctgctgccgcgcctgcaggcccgctactactccatcgcctcatcctccaaggtccaccccaactctgtgcacatctgtgcggtggttgtggagtacgagaccaaggccggccgcatcaacaagggcgtggccaccaactggctgcgggccaaggagcctgccggggagaacggcggccgtgcgctggtgcccatgttcgtgcgcaagtcccagttccgcctgcccttcaaggccaccacgcctgtcatcatggtgggccccggcaccggggtggcacccttcataggcttcatccaggagcgggcctggctgcgacagcagggcaaggaggtgggggagacgctgctgtactacggctgccgccgctcggatgaggactacctgtaccgggaggagctggcgcagttccacagggacggtgcgctcacccagctcaacgtggccttctcccgggagcagtcccacaaggtctacgtccagcacctgctaaagcaagaccgagagcacctgtggaagttgatcgaaggcggtgcccacatctacgtctgtggggatgcacggaacatggccagggatgtgcagaacaccttctacgacatcgtggctgagctcggggccatggagcacgcgcaggcggtggactacatcaagaaactgatgaccaagggccgctactccctggacgtgtggagctaggggcctgcctgccccacccaccccacagactccggcctgtaatcagctctcctggctccctcccgtagtctcctgggtgtgtttggcttggccttggcatgggcgcaggcccagtgacaaagactcctctgggcctggggtgcatcctcctcagcccccaggccaggtgaggtccaccggcccctggcagcacagcccagggcctgcatgggggcaccgggctccatgcctctggaggcctctggccctcggtggctgcacagaagggctctttctctctgctgagctgggcccagcccctccacgtgatttccagtgagtgtaaataattttaaataacctctggcccttggaataaagttctgttttctgta

SEQ ID NO: 312012 - DNA, 520 bp, Homo sapiens
ccctgcccaggtgcccgcagagagcagccgggctgccagcgtttcatgatcaacatgggagactcccacgtggacaccagctccaccgtgtccgaggcggtggccgaagaagtatctcttttcagcatgacggacatgattctgttttcgctcatcgtgggtctcctaacctactggttcctcttcagaaagaaaaaagaagaagtccccgagttcaccaaaattcagacattgtaagtgccgcctctcagcctcctctctctgtccctcttctgtcaccactccaagcagtgtcctgcatgcgggcctcaggctgaaagaagcaaggctccttgtagcattttggggtgactcttgggttttgccttcttgctagattgtgcttgagctctcccttaatcatctcttatgtggggtttataaggcccttttctatctgctgtttatatgaccttcacaggaagcactgcgaaaatgacaccagtttacagattaagaaccgggggctcaagaatgttaa

SEQ ID NO: 312013 - DNA, 2394 bp, Homo sapiens
ccttcattttgcttaatctctcccttgaaattgctctcttggtaggtggatcctgtttttccttcaaagaattccttttcctgttgcatactggttcccagtttttccataggcctcttttttttcttatttttttatattgaaaaattccacacatccagaaaaagttgaaaggctagcacaatgaatactcagatacatactctccacttggattgaatagttgttaacattttgccagatttactattctctccaccccatgcatgtgtacatagaatgacatttcgacccctgagtattaccacatagatttcctgagcacaaagacaccgttctacatgattacattaagatgatcatgcctaaaaatataaacagtaacttctttatagcctctaatacagagcccttaatcagtattcaacaattgtctccagaatgtttgtctttaaaaacaacgacaacaaccaggtcccatcaaggttcatacattcttttggtttcaactctagtcactttcagtctacaacaaccccgacatattttcccatgatactttttgaagcatccaggccagctgtcttagcaaatgtcctctattctggaagtgtctgattgcttccttaggcctatgtctacactccactcgtggctcatatccctgcagagttgtaatctcctctgggccagggactcctgaatatctccaggccgagtgttctccccgggcctggagaaaaccttcatgcccaatcccttgctgcatgtctccacccctccttgcacatcctgcctctatgagtggacgaggcaaatctactcaaccccacatcccacccctcacctgataactaacatttactgggcactaacaatgtatcaggcacatactacacacttaacatgcattgctttcacataccagctccatggtaacattgcgctggctttacagctaaagaaactgagctagaaaggggttaagtatcctgtacaagatcacagctggccagcaatagaggtgggatcccactgcagacagtctccccctcagatgccatgctcccactgtaccaccatgtactgcttcctgagatctctgcttccttcagtcgacccagctgacacctgtttccttcctaactccaactaattaattccagttaatggaattgactggaattagtgacattaatatttactgagcattccccatgtgtcatcagagctgtgctaaatgctttacaagaataattacctgccataaagcaaccctatgacataggtgctactatgcccattttgtagatgagacaggttcaggggagttagtatcaccttcaagtcatacagtggctaagaatctgtggtctcgctgaatgctgggcgcctgctctgctaagtctatttctacaaaacattgcactgccttcctgttgcctgccaagctcagggcccatttatcatgcatcttcccatccttgtctcccccaactgtcccttacctgagtcacaatttcgccaaagccaaagggattgtcctaagccaatgttgatttatcactcttcctgctcaaaagcccccaagatcacctatcaatcacctacttgagtgcaagctttgactctgtcacctgacattcaagtccccctctgcccccatgccagtcttatcccctcccctacatatgccctatcctgcagccaaattggactctgttcttcctgacaagacctggtattggcatctctatgcctcagtttgccttccctccactttaaaaagcctcttcagtctcgatacaaaaaacatcccacacatgttctaaaaccatgctttccttgatttctcctcatgtcaagacatttcttacttctctagtctcctagcattttgtgcctcacaaccctcaggacaggccagctagtgtatggctgtgggtttttatctcacctcccctgcctgaccctgagcccttgtggggagtatactcaccctactcctacagtgccttgcattccgtagctgctcagtacattaacccattcaatgtctttaagatttttacaagttagttttcctgtaattactaatcatttatctttaattctgagtaaaattcacaacaacaaataaaaggaaatagtagtaattttttaagctgtttagtcaataaagatttaatgcgtcagttattggactgtttggtttgaagccaatcaaccattctggtatgtaaatctacttttttattatacaagtaacacaaaatgtattgcctcagtcaaggaagaagaacagaaaaaaacaacaccccaaaatcctgtcacctctgtaaaactgctattaattaacattttaatatattttcttttgtcttttgcaatttt

SEQ ID NO: 312014 - DNA, 831 bp, Homo sapiens
ggcacgagacaggttcaggggagttagtatcacctatcaatcacctacttgagtgcaagctttgactctgtcacctgacattcaagtccccctctgcccccatgccagtcttatcccctcccctacatatgccctatcctgcagccaaattggactctgttcttcctgacaagacctggtattggcatctctatgcctcagtttgccttccctccactttaaaaagcctcttcagtctcgatacaaaaaacatcccacacatgttctaaaaccatgctttccttgatttctcctcatgtcaagacatttcttacttctctagtctcctagcattttgtgcctcacaaccctcaggacaggccagctagtgtatggctgtgggtttttatctcacctcccctgcctgaccctgagcccttgtggggagtatactcaccctactcctacagtgccttgcattccgtagctgctcagtacattaacccattcaatgtctttaagatttttacaagttagttttcctgtaattactaatcatttatctttaattctgagtaaaattcacaacaacaaataaaaggaaatagtagtaattttttaagctgtttagtcaataaagatttaatgcgtcagttattggactgtttggtttgaagccaatcaaccattctggtatgtaaatctacttttttattatacaagtaacacaaaatgtattgcctcagtcaaggaagaagaacagaaaaaaacaacaccccaaaatcctgtcacctctgtaaaactgctattaattaacattttaatatattttcttttgtcttttgcaatttt

SEQ ID NO: 312015 - DNA, 742 bp, Homo sapiens
aatggggtgcaggataggtcatatgtacggggagggaataagactggcatgggggcagagggggactctgttcttcctgacaagacctggtattggcatctctatgcctcagtttgccttccctccactttaaaaagcctcttcagtctcgatacaaaaaacatcccacacatgttctaaaaccatgctttccttgatttctcctcatgtcaagacatttcttacttctctagtctcctagcattttgtgcctcacaaccctcaggacaggccagctagtgtatggctgtgggtttttatctcacctcccctgcctgaccctgagcccttgtggggagtatactcaccctactcctacagtgccttgcattccgtagctgctcagtacattaacccattcaatgtctttaagatttttacaagttagttttcctgtaattactaatcatttatctttaattctgagtaaaattcacaacaacaaataaaaggaaatagtagtaattttttaagctgtttagtcaataaagatttaatgcgtcagttattggactgtttggtttgaagccaatcaaccattctggtatgtaaatctacttttttattatacaagtaacacaaaatgtattgcctcagtcaaggaagaagaacagaaaaaaacaacaccccaaaatcctgtcacctctgtaaaactgctattaattaacattttaatatattttcttttgtcttttgcaatttt

SEQ ID NO: 312016 - DNA, 396 bp, Homo sapiens
ttttttttttgctgtttttctcaactgtcagtggaattattgtcttcctgtctccatatttaggtagtgtcagtggctgagtatcaccgcaggatcgatgctctaaatactgaagaactgcgcacactctgcagacgcctccaggtgcccccttcagtagtttaaacccctccagagactaaatactccctgtttttagtgttctttgtcatggcaaatctcatttgaagaatttgctttgactgcagcactaaaattaaattcctttttgtattaaaggttatagtattgccgtgaagagctgtggattatcttttctgtcatcttttcatttgaaaaatattctgaagaatgttctgtcacttcagaattattctcagtattgtgtgtttcttt

SEQ ID NO: 312017 - DNA, 727 bp, Homo sapiens
agcaaactgttttgtcactgtagtaaggctctagtgctggaaatttatctttgacagaggaagaatgcttttgaaaacagttcttacgtgattttatgtaacttaatttgccctggaaaggaaatgtctcgtctctggtatgggaaaaaagggagaagacatcaaccaattaatcataaatacactctgattactacaagggaagacataaattcaaagcaggttgctacagtgaaagcagacctggagtctgaatcttttcgaccaaacctaagtgatcccagtgaacttttactgccagatcaaattgaaaagcttaccaagcatcttccaccaagaacaattggctatccatggactcttgtttatggtactggaaaacatggcacaagcttgaaaactctttatcgaacaatgacaggtttagacaccccagtgctgatggtgattaaagacagtgatggacaggtttttggtgcgttagcatctgagccactgaaagtgagtgatggcttttatggtactggagagacctttgtttttacattctgtccggagtttgaggtcttaagtgacgggataatatgtttatcaaagggaatgattatagtttggggtgagagagaattggcttggtgagggatttacagaagagcatctgtaaagtggatcgtaattctagaggagattcttatcagattgaatcggttgatataatgtttgtaag

SEQ ID NO: 312018 - DNA, 449 bp, Homo sapiens
tgcttatattgttataaaatcttttcctacattggctacatcatagatattagatatgggccatcttttgccctataaaatcttaaggttaaagatttagccacattttctacgatataaagctttatttatctgaaaagtctgacaattttgaaagcatgtcacaagtttacattaatgcactacctctatttactgttttagatctgaggctggtggatcccctgaggtcagtagtttgcgacatcctggctaacacagtgaaatcccatctctactaaaaaacagaaaaaattagccgggcgtggtggcaggcacctgtagtcccagctatttgggaggctaaggcaggagaatggcgtgaacccaggaggcggagcttgcagtgcgccaagatcacgccactgcactccagctagggtgacagagcgagactctgtctcaaaaaa

SEQ ID NO: 312019 - DNA, 3668 bp, Homo sapiens
ctttggagatacgtgctacatccttttgttaaaaagtctttttagtgatactaattctgtgttcagtgtgtgaaaagtaaaataccacaattttaaaagtctaattatttttaattttgtttaatgacagagatatagatcagctatcaggaagggacttctgccattcaaagaaaatgacaggaagtaacactgaggaaatagactcaagaatccgagatgcaggtaatgatagtgccagcactgctcctaggagcactgaggagtctctttctgaagatgtgttcacagaatcagaactttcccctatacgagaggagcttgtatcttcagatgaactgcgacaagataaatcttctggtgcgtcatcagaatctgtgcaaactgtcaatcaggctgaagtagaaagtctgacagtcaaatcagaatctactggtactcctggtcacttaagatctgatactgaacattctacaaatgaagttgggactttatgtcataaaactgatttaaataatcttgaaatggccattaaggaagatcagattgcagataactttcaaggaatatcaggtcctaaagaagacagcacaagtataaaaggtaattcagaccaggattcttttcttcatgagaattcgttacaccaagaagagagtcaaaaagaaaatatgccttgtggggaaacagcagaatttaaacaaaagcaaagtgttaacaaaggaaaacaaggaaaggagcaaaatcaggactcacagacagaggcagaagagctacgcaaactttggaaaacccatactatgcaacaaactaaacagcaaagggaaaatattcaacaagtgtcacaaaaagaagctaagcataaaattacatctgctgatggacacatagaaagttctgcacttttaaaagaaaagcaaaggcatcgattacataagttcttgtgtctcagagttggaaaaccaatgaggaaaacgtttgtatctcaagcaagtgctacaatgcaacagtatgcacagagagataagaaacatgaatattggtttgctgtgccacaagaaaggacagatcacttgtatgccttcttcattcagtggagtccagaaatatatgcagaagatactggcgaatataccagagaacctggatttatagtagtaaaaaagattgaggagtctgaaacaattgaggattctagtaatcaagcagcagccagagaatgggaggtagtgtcagtggctgagtatcaccgcaggatcgatgctctaaatactgaagaactgcgcacactctgcagacgcctccagattactacaagggaagacataaattcaaagcaggttgctacagtgaaagcagacctggagtctgaatcttttcgaccaaacctaagtgatcccagtgaacttttactgccagatcaaattgaaaagcttaccaagcatcttccaccaagaacaattggctatccatggactcttgtttatggtactggaaaacatggcacaagcttgaaaactctttatcgaacaatgacaggtttagacaccccagtgctgatggtgattaaagacagtgatggacaggtttttggtgcgttagcatctgagccactgaaagtgagtgatggcttttatggtactggagagacctttgtttttacattctgtccggagtttgaggtctttaagtggacaggagataatatgttttttatcaaaggagacatggattcactagctttcggtggtggaggaggagaatttgcgctttggcttgatggagatctctaccatggaagaagccattcttgtaaaacgtttgggaatcgtacactttctaagaaggaagatttctttatccaagatattgaaatctgggcttttgaataaataaaatgctctctgtcttagcaggagaatggcccaaacctgacatggacaagcattgtttggaaagttcaagaagcaatacagtgtaacatgtcacttgtgctttaaaattagtctgtatcaccatttattacagttataattttggagtttatttttcaaatcatgttcttgtcccagagttctttaggttaacactagggactgcgtccatgtactagtataacagcttgggtttgttagaatttgggcaacattttgattataatgacaacttcattttcacatgttactcagttccctaataggatggtgctcttttgttgaacctgtattgatttttttttttttaactatattgattcgtttactagaacagtctaattggggcattgaggaaatgaagactggatacttctgtatctgtgaagttggcacaggtaacatttggacatgttcatcttattcttaggaaggaaaaaatcacttgccaaaataatacatacttcatagaccactgagttctagtttttattcacactacaacattctctttaacgatgttgcaggtattctcaatttccttttaagaaaaatgaaatgtgaggagaattctggttgtaatagatgacagtacatatgatctgcaggtttgggcatatgctttcatcattaaattatctgataaagttacaagtcacaaaggagaatgagaacttaatgattctattggatttaatatattagcaagaaaacatactatttacatatgtgtagcttagtaaggcattaacataagtacaaaaactatgaaacagatgcatatttcctcaacatactgtgtcaggtatactgttttataatttggttgttttagccttattgcacaccaactcccaaaatataggttactcttgttcaaaaggaaaaaaaaaaattgtgattttctttgagtggtatatgttattaattaccattagcatttgctcttataaagggcaatgattatagtagacaatattgtaactcagtagacttgttgaatatgcaaacttactgtcaagtgacctcaaaaaaaaaatgaaaagatagaatacactagtagttcttatcctcttttgtaggaaaccaataatagccattgtggcaataattcatcagttgattttaaagcttcatgttatgcaaaaaagaatcctgctgttatacatgtgacagtgactttgtgctgaaatttcagctattccagataaacattgtatatcttgtaaattaatgtttaaaggtagttttgttcttacagaaagtgttgattgccaggttgcttatagcactttaagttattctaaaaatgaaattataagccaaatatttggcttaagtagatttagttgtatagcacttacatatttagttcttttgaaagtttagataattatttaaagaaagcataatgctaatggaaaagaaaatctgatgttctattataatatgctattgctgaatatgaatagaaatacagggcatcatttccttgtctcattataagttagtaacaatatatagattaaatgtttacaatatagggaattgtaaataaatatatcagtttttttccccttcggtcttccacagcagtattattgtctttgtggagttgactaatgataatttaaaaatcctgtaatggatttctactaaaataaggtcatagtggcatataccaaataaaatcaaatacagaaatacaaatgagtttggatttattgaatactc

SEQ ID NO: 312020 - DNA, 2631 bp, Homo sapiens
agcaaactgttttgtcactgtagtaaggctctagtgctggaaatttatctttgacagaggaagaatgcttttgaaaacagttcttacgtgattttatgtaacttaatttgccctggaaaggaaatgtctcgtctctggtatgggaaaaaagggagaagacatcaaccaattaatcataaatacactctggtagtgtcagtggctgagtatcaccgcaggatcgatgctctaaatactgaagaactgcgcacactctgcagacgcctccagattactacaagggaagacataaattcaaagcaggttgctacagtgaaagcagacctggagtctgaatcttttcgaccaaacctaagtgatcccagtgaacttttactgccagatcaaattgaaaagcttaccaagcatcttccaccaagaacaattggctatccatggactcttgtttatggtactggaaaacatggcacaagcttgaaaactctttatcgaacaatgacaggtttagacaccccagtgctgatggtgattaaagacagtgatggacaggtttttggtgcgttagcatctgagccactgaaagtgagtgatggcttttatggtactggagagacctttgtttttacattctgtccggagtttgaggtctttaagtggacaggagataatatgttttttatcaaaggagacatggattcactagctttcggtggtggaggaggagaatttgcgctttggcttgatggagatctctaccatggaagaagccattcttgtaaaacgtttgggaatcgtacactttctaagaaggaagatttctttatccaagatattgaaatctgggcttttgaataaataaaatgctctctgtcttagcaggagaatggcccaaacctgacatggacaagcattgtttggaaagttcaagaagcaatacagtgtaacatgtcacttgtgctttaaaattagtctgtatcaccatttattacagttataattttggagtttatttttcaaatcatgttcttgtcccagagttctttaggttaacactagggactgcgtccatgtactagtataacagcttgggtttgttagaatttgggcaacattttgattataatgacaacttcattttcacatgttactcagttccctaataggatggtgctcttttgttgaacctgtattgatttttttttttttaactatattgattcgtttactagaacagtctaattggggcattgaggaaatgaagactggatacttctgtatctgtgaagttggcacaggtaacatttggacatgttcatcttattcttaggaaggaaaaaatcacttgccaaaataatacatacttcatagaccactgagttctagtttttattcacactacaacattctctttaacgatgttgcaggtattctcaatttccttttaagaaaaatgaaatgtgaggagaattctggttgtaatagatgacagtacatatgatctgcaggtttgggcatatgctttcatcattaaattatctgataaagttacaagtcacaaaggagaatgagaacttaatgattctattggatttaatatattagcaagaaaacatactatttacatatgtgtagcttagtaaggcattaacataagtacaaaaactatgaaacagatgcatatttcctcaacatactgtgtcaggtatactgttttataatttggttgttttagccttattgcacaccaactcccaaaatataggttactcttgttcaaaaggaaaaaaaaaaattgtgattttctttgagtggtatatgttattaattaccattagcatttgctcttataaagggcaatgattatagtagacaatattgtaactcagtagacttgttgaatatgcaaacttactgtcaagtgacctcaaaaaaaaaatgaaaagatagaatacactagtagttcttatcctcttttgtaggaaaccaataatagccattgtggcaataattcatcagttgattttaaagcttcatgttatgcaaaaaagaatcctgctgttatacatgtgacagtgactttgtgctgaaatttcagctattccagataaacattgtatatcttgtaaattaatgtttaaaggtagttttgttcttacagaaagtgttgattgccaggttgcttatagcactttaagttattctaaaaatgaaattataagccaaatatttggcttaagtagatttagttgtatagcacttacatatttagttcttttgaaagtttagataattatttaaagaaagcataatgctaatggaaaagaaaatctgatgttctattataatatgctattgctgaatatgaatagaaatacagggcatcatttccttgtctcattataagttagtaacaatatatagattaaatgtttacaatatagggaattgtaaataaatatatcagtttttttccccttcggtcttccacagcagtattattgtctttgtggagttgactaatgataatttaaaaatcctgtaatggatttctactaaaataaggtcatagtggcatataccaaataaaatcaaatacagaaatacaaatgagtttggatttattgaatactc

SEQ ID NO: 312021 - DNA, 1559 bp, Homo sapiens
ctttggagatacgtgctacatccttttgttaaaaagtctttttagtgatactaattctgtgttcagtgtgtgaaaagtaaaataccacaattttaaaagtctaattatttttaattttgtttaatgacagagatatagatcagctatcaggaagggacttctgccattcaaagaaaatgacaggaagtaacactgaggaaatagactcaagaatccgagatgcaggtaatgatagtgccagcactgctcctaggagcactgaggagtctctttctgaagatgtgttcacagaatcagaactttcccctatacgagaggagcttgtatcttcagatgaactgcgacaagataaatcttctggtgcgtcatcagaatctgtgcaaactgtcaatcaggctgaagtagaaagtctgacagtcaaatcagaatctactggtactcctggtcacttaagatctgatactgaacattctacaaatgaagttgggactttatgtcataaaactgatttaaataatcttgaaatggccattaaggaagatcagattgcagataactttcaaggaatatcaggtcctaaagaagacagcacaagtataaaaggtaattcagaccaggattcttttcttcatgagaattcgttacaccaagaagagagtcaaaaagaaaatatgccttgtggggaaacagcagaatttaaacaaaagcaaagtgttaacaaaggaaaacaaggaaaggagcaaaatcaggactcacagacagaggcagaagagctacgcaaactttggaaaacccatactatgcaacaaactaaacagcaaagggaaaatattcaacaagtgtcacaaaaagaagctaagcataaaattacatctgctgatggacacatagaaagttctgcacttttaaaagaaaagcaaaggcatcgattacataagttcttgtgtctcagagttggaaaaccaatgaggaaaacgtttgtatctcaagcaagtgctacaatgcaacagtatgcacagagagataagaaacatgaatattggtttgctgtgccacaagaaaggacagatcacttgtatgccttcttcattcagtggagtccagaaatatatgcagaagatactggcgaatataccagagaacctggatttatagtagtaaaaaagattgaggagtctgaaacaattgaggattctagtaatcaagcagcagccagagaatgggaggtagtgtcagtggctgagtatcaccgcaggatcgatgctctaaatactgaagaactgcgcacactctgcagacgcctccaggtgcccccttcagtagtttaaacccctccagagactaaatactccctgtttttagtgttctttgtcatggcaaatctcatttgaagaatttgctttgactgcagcactaaaattaaattcctttttgtattaaaggttatagtattgccgtgaagagctgtggattatcttttctgtcatcttttcatttgaaaaatattctgaagaatgttctgtcacttcagaattattctcagtattgtgtgtttcttt

SEQ ID NO: 312022 - DNA, 3587 bp, Homo sapiens
ctttggagatacgtgctacatccttttgttaaaaagtctttttagtgatactaattctgtgttcagtgtgtgaaaagtaaaataccacaattttaaaagtctaattatttttaattttgtttaatgacagagatatagatcagctatcaggaagggacttctgccattcaaagaaaatgacaggaagtaacactgaggaaatagactcaagaatccgagatgcaggtaatgatagtgccagcactgctcctaggagcactgaggagtctctttctgaagatgtgttcacagaatcagaactttcccctatacgagaggagcttgtatcttcagatgaactgcgacaagataaatcttctggtgcgtcatcagaatctgtgcaaactgtcaatcaggctgaagtagaaagtctgacagtcaaatcagaatctactggtactcctggtcacttaagatctgatactgaacattctacaaatgaagttgggactttatgtcataaaactgatttaaataatcttgaaatggccattaaggaagatcagattgcagataactttcaaggaatatcaggtcctaaagaagacagcacaagtataaaaggtaattcagaccaggattcttttcttcatgagaattcgttacaccaagaagagagtcaaaaagaaaatatgccttgtggggaaacagcagaatttaaacaaaagcaaagtgttaacaaaggaaaacaaggaaaggagcaaaatcaggactcacagacagaggcagaagagctacgcaaactttggaaaacccatactatgcaacaaactaaacagcaaagggaaaatattcaacaagtgtcacaaaaagaagctaagcataaaattacatctgctgatggacacatagaaagttctgcacttttaaaagaaaagcaaaggcatcgattacataagttcttgtgtctcagagttggaaaaccaatgaggaaaacgtttgtatctcaagcaagtgctacaatgcaacagtatgcacagagagataagaaacatgaatattggtttgctgtgccacaagaaaggacagatcacttgtatgccttcttcattcagtggagtccagaaatatatgcagaagatactggcgaatataccagagaacctggatttatagtagtaaaaaagattgaggagtctgaaacaattgaggattctagtaatcaagcagcagccagagaatgggagattactacaagggaagacataaattcaaagcaggttgctacagtgaaagcagacctggagtctgaatcttttcgaccaaacctaagtgatcccagtgaacttttactgccagatcaaattgaaaagcttaccaagcatcttccaccaagaacaattggctatccatggactcttgtttatggtactggaaaacatggcacaagcttgaaaactctttatcgaacaatgacaggtttagacaccccagtgctgatggtgattaaagacagtgatggacaggtttttggtgcgttagcatctgagccactgaaagtgagtgatggcttttatggtactggagagacctttgtttttacattctgtccggagtttgaggtctttaagtggacaggagataatatgttttttatcaaaggagacatggattcactagctttcggtggtggaggaggagaatttgcgctttggcttgatggagatctctaccatggaagaagccattcttgtaaaacgtttgggaatcgtacactttctaagaaggaagatttctttatccaagatattgaaatctgggcttttgaataaataaaatgctctctgtcttagcaggagaatggcccaaacctgacatggacaagcattgtttggaaagttcaagaagcaatacagtgtaacatgtcacttgtgctttaaaattagtctgtatcaccatttattacagttataattttggagtttatttttcaaatcatgttcttgtcccagagttctttaggttaacactagggactgcgtccatgtactagtataacagcttgggtttgttagaatttgggcaacattttgattataatgacaacttcattttcacatgttactcagttccctaataggatggtgctcttttgttgaacctgtattgatttttttttttttaactatattgattcgtttactagaacagtctaattggggcattgaggaaatgaagactggatacttctgtatctgtgaagttggcacaggtaacatttggacatgttcatcttattcttaggaaggaaaaaatcacttgccaaaataatacatacttcatagaccactgagttctagtttttattcacactacaacattctctttaacgatgttgcaggtattctcaatttccttttaagaaaaatgaaatgtgaggagaattctggttgtaatagatgacagtacatatgatctgcaggtttgggcatatgctttcatcattaaattatctgataaagttacaagtcacaaaggagaatgagaacttaatgattctattggatttaatatattagcaagaaaacatactatttacatatgtgtagcttagtaaggcattaacataagtacaaaaactatgaaacagatgcatatttcctcaacatactgtgtcaggtatactgttttataatttggttgttttagccttattgcacaccaactcccaaaatataggttactcttgttcaaaaggaaaaaaaaaaattgtgattttctttgagtggtatatgttattaattaccattagcatttgctcttataaagggcaatgattatagtagacaatattgtaactcagtagacttgttgaatatgcaaacttactgtcaagtgacctcaaaaaaaaaatgaaaagatagaatacactagtagttcttatcctcttttgtaggaaaccaataatagccattgtggcaataattcatcagttgattttaaagcttcatgttatgcaaaaaagaatcctgctgttatacatgtgacagtgactttgtgctgaaatttcagctattccagataaacattgtatatcttgtaaattaatgtttaaaggtagttttgttcttacagaaagtgttgattgccaggttgcttatagcactttaagttattctaaaaatgaaattataagccaaatatttggcttaagtagatttagttgtatagcacttacatatttagttcttttgaaagtttagataattatttaaagaaagcataatgctaatggaaaagaaaatctgatgttctattataatatgctattgctgaatatgaatagaaatacagggcatcatttccttgtctcattataagttagtaacaatatatagattaaatgtttacaatatagggaattgtaaataaatatatcagtttttttccccttcggtcttccacagcagtattattgtctttgtggagttgactaatgataatttaaaaatcctgtaatggatttctactaaaataaggtcatagtggcatataccaaataaaatcaaatacagaaatacaaatgagtttggatttattgaatactc

SEQ ID NO: 312023 - DNA, 2550 bp, Homo sapiens
agcaaactgttttgtcactgtagtaaggctctagtgctggaaatttatctttgacagaggaagaatgcttttgaaaacagttcttacgtgattttatgtaacttaatttgccctggaaaggaaatgtctcgtctctggtatgggaaaaaagggagaagacatcaaccaattaatcataaatacactctgattactacaagggaagacataaattcaaagcaggttgctacagtgaaagcagacctggagtctgaatcttttcgaccaaacctaagtgatcccagtgaacttttactgccagatcaaattgaaaagcttaccaagcatcttccaccaagaacaattggctatccatggactcttgtttatggtactggaaaacatggcacaagcttgaaaactctttatcgaacaatgacaggtttagacaccccagtgctgatggtgattaaagacagtgatggacaggtttttggtgcgttagcatctgagccactgaaagtgagtgatggcttttatggtactggagagacctttgtttttacattctgtccggagtttgaggtctttaagtggacaggagataatatgttttttatcaaaggagacatggattcactagctttcggtggtggaggaggagaatttgcgctttggcttgatggagatctctaccatggaagaagccattcttgtaaaacgtttgggaatcgtacactttctaagaaggaagatttctttatccaagatattgaaatctgggcttttgaataaataaaatgctctctgtcttagcaggagaatggcccaaacctgacatggacaagcattgtttggaaagttcaagaagcaatacagtgtaacatgtcacttgtgctttaaaattagtctgtatcaccatttattacagttataattttggagtttatttttcaaatcatgttcttgtcccagagttctttaggttaacactagggactgcgtccatgtactagtataacagcttgggtttgttagaatttgggcaacattttgattataatgacaacttcattttcacatgttactcagttccctaataggatggtgctcttttgttgaacctgtattgatttttttttttttaactatattgattcgtttactagaacagtctaattggggcattgaggaaatgaagactggatacttctgtatctgtgaagttggcacaggtaacatttggacatgttcatcttattcttaggaaggaaaaaatcacttgccaaaataatacatacttcatagaccactgagttctagtttttattcacactacaacattctctttaacgatgttgcaggtattctcaatttccttttaagaaaaatgaaatgtgaggagaattctggttgtaatagatgacagtacatatgatctgcaggtttgggcatatgctttcatcattaaattatctgataaagttacaagtcacaaaggagaatgagaacttaatgattctattggatttaatatattagcaagaaaacatactatttacatatgtgtagcttagtaaggcattaacataagtacaaaaactatgaaacagatgcatatttcctcaacatactgtgtcaggtatactgttttataatttggttgttttagccttattgcacaccaactcccaaaatataggttactcttgttcaaaaggaaaaaaaaaaattgtgattttctttgagtggtatatgttattaattaccattagcatttgctcttataaagggcaatgattatagtagacaatattgtaactcagtagacttgttgaatatgcaaacttactgtcaagtgacctcaaaaaaaaaatgaaaagatagaatacactagtagttcttatcctcttttgtaggaaaccaataatagccattgtggcaataattcatcagttgattttaaagcttcatgttatgcaaaaaagaatcctgctgttatacatgtgacagtgactttgtgctgaaatttcagctattccagataaacattgtatatcttgtaaattaatgtttaaaggtagttttgttcttacagaaagtgttgattgccaggttgcttatagcactttaagttattctaaaaatgaaattataagccaaatatttggcttaagtagatttagttgtatagcacttacatatttagttcttttgaaagtttagataattatttaaagaaagcataatgctaatggaaaagaaaatctgatgttctattataatatgctattgctgaatatgaatagaaatacagggcatcatttccttgtctcattataagttagtaacaatatatagattaaatgtttacaatatagggaattgtaaataaatatatcagtttttttccccttcggtcttccacagcagtattattgtctttgtggagttgactaatgataatttaaaaatcctgtaatggatttctactaaaataaggtcatagtggcatataccaaataaaatcaaatacagaaatacaaatgagtttggatttattgaatactc

SEQ ID NO: 312024 - DNA, 3534 bp, Homo sapiens
ctttggagatacgtgctacatccttttgttaaaaagtctttttagtgatactaattctgtgttcagtgtgtgaaaagtaaaataccacaattttaaaagtctaattatttttaattttgtttaatgacagagatatagatcagctatcaggaagggacttctgccattcaaagaaaatgacaggaagtaacactgaggaaatagactcaagaatccgagatgcaggtaatgatagtgccagcactgctcctaggagcactgaggagtctctttctgaagatgtgttcacagaatcagaactttcccctatacgagaggagcttgtatcttcagatgaactgcgacaagataaatcttctggtgcgtcatcagaatctgtgcaaactgtcaatcaggctgaagtagaaagtctgacagtcaaatcagaatctactggtactcctggtcacttaagatctgatactgaacattctacaaatgaagttgggactttatgtcataaaactgatttaaataatcttgaaatggccattaaggaagatcagattgcagataactttcaaggaatatcaggtcctaaagaagacagcacaagtataaaaggtaattcagaccaggattcttttcttcatgagaattcgttacaccaagaagagagtcaaaaagaaaatatgccttgtggggaaacagcagaatttaaacaaaagcaaagtgttaacaaaggaaaacaaggaaaggagcaaaatcaggactcacagacagaggcagaagagctacgcaaactttggaaaacccatactatgcaacaaactaaacagcaaagggaaaatattcaacaagtgtcacaaaaagaagctaagcataaaattacatctgctgatggacacatagaaagttctgcacttttaaaagaaaagcaaaggcatcgattacataagttcttgtgtctcagagttggaaaaccaatgaggaaaacgtttgtatctcaagcaagtgctacaatgcaacagtatgcacagagagataagaaacatgaatattggtttgctgtgccacaagaaaggacagatcacttgtatgccttcttcattcagtggagtccagaaatatatgcagaagatactggcgaatataccagagaacctggatttatagtagtaaaaaagattgaggagtctgaaacaattgaggattctagtaatcaagcagcagccagagaatgggagattactacaagggaagacataaattcaaagcaggttgctacagtgaaagcagacctggagtctgaatcttttcgaccaaacctaagtgatcccagtgaacttttactgccagatcaaattgaaaagcttaccaagcatcttccaccaagaacaattggctatccatggactcttgtttatggtactggaaaacatggcacaagcttgaaaactctttatcgaacaagtttttggtgcgttagcatctgagccactgaaagtgagtgatggcttttatggtactggagagacctttgtttttacattctgtccggagtttgaggtctttaagtggacaggagataatatgttttttatcaaaggagacatggattcactagctttcggtggtggaggaggagaatttgcgctttggcttgatggagatctctaccatggaagaagccattcttgtaaaacgtttgggaatcgtacactttctaagaaggaagatttctttatccaagatattgaaatctgggcttttgaataaataaaatgctctctgtcttagcaggagaatggcccaaacctgacatggacaagcattgtttggaaagttcaagaagcaatacagtgtaacatgtcacttgtgctttaaaattagtctgtatcaccatttattacagttataattttggagtttatttttcaaatcatgttcttgtcccagagttctttaggttaacactagggactgcgtccatgtactagtataacagcttgggtttgttagaatttgggcaacattttgattataatgacaacttcattttcacatgttactcagttccctaataggatggtgctcttttgttgaacctgtattgatttttttttttttaactatattgattcgtttactagaacagtctaattggggcattgaggaaatgaagactggatacttctgtatctgtgaagttggcacaggtaacatttggacatgttcatcttattcttaggaaggaaaaaatcacttgccaaaataatacatacttcatagaccactgagttctagtttttattcacactacaacattctctttaacgatgttgcaggtattctcaatttccttttaagaaaaatgaaatgtgaggagaattctggttgtaatagatgacagtacatatgatctgcaggtttgggcatatgctttcatcattaaattatctgataaagttacaagtcacaaaggagaatgagaacttaatgattctattggatttaatatattagcaagaaaacatactatttacatatgtgtagcttagtaaggcattaacataagtacaaaaactatgaaacagatgcatatttcctcaacatactgtgtcaggtatactgttttataatttggttgttttagccttattgcacaccaactcccaaaatataggttactcttgttcaaaaggaaaaaaaaaaattgtgattttctttgagtggtatatgttattaattaccattagcatttgctcttataaagggcaatgattatagtagacaatattgtaactcagtagacttgttgaatatgcaaacttactgtcaagtgacctcaaaaaaaaaatgaaaagatagaatacactagtagttcttatcctcttttgtaggaaaccaataatagccattgtggcaataattcatcagttgattttaaagcttcatgttatgcaaaaaagaatcctgctgttatacatgtgacagtgactttgtgctgaaatttcagctattccagataaacattgtatatcttgtaaattaatgtttaaaggtagttttgttcttacagaaagtgttgattgccaggttgcttatagcactttaagttattctaaaaatgaaattataagccaaatatttggcttaagtagatttagttgtatagcacttacatatttagttcttttgaaagtttagataattatttaaagaaagcataatgctaatggaaaagaaaatctgatgttctattataatatgctattgctgaatatgaatagaaatacagggcatcatttccttgtctcattataagttagtaacaatatatagattaaatgtttacaatatagggaattgtaaataaatatatcagtttttttccccttcggtcttccacagcagtattattgtctttgtggagttgactaatgataatttaaaaatcctgtaatggatttctactaaaataaggtcatagtggcatataccaaataaaatcaaatacagaaatacaaatgagtttggatttattgaatactc

SEQ ID NO: 312025 - DNA, 113 bp, Homo sapiens
gtttgctatgaagaaagccatcattctaccatcaaaatacatttatgaagatgaagtgagattggcaaagagaaaactgaatgtccctgaataaaacctctgtatctggataa

SEQ ID NO: 312026 - DNA, 1376 bp, Homo sapiens
agtttcagtcacacaagaagggaggagagaaaagccatggccgacaaggtcctgaaggagaagagaaagctgtttatccgttccatgggtgaaggtacaataaatggcttactggatgaattattacagacaagggtgctgaacaaggaagagatggagaaagtaaaacgtgaaaatgctacagttatggataagacccgagctttgattgactccgttattccgaaaggggcacaggcatgccaaatttgcatcacatacatttgtgaagaagacagttacctggcagggacgctgggactctcagcagatcaaacatctggaaattaccttaatatgcaagactctcaaggagtactttcttcctttccagctcctcaggcagtgcaggacaacccagctatgcccacatcctcaggctcagaagggaatgtcaagctttgctccctagaagaagctcaaaggatatggaaacaaaagtcggcagagatttatccaataatggacaagtcaagccgcacacgtcttgctctcattatctgcaatgaagaatttgacagtattcctagaagaactggagctgaggttgacatcacaggcatgacaatgctgctacaaaatctggggtacagcgtagatgtgaaaaaaaatctcactgcttcggacatgactacagagctggaggcatttgcacaccgcccagagcacaagacctctgacagcacgttcctggtgttcatgtctcatggtattcgggaaggcatttgtgggaagaaacactctgagcaagtcccagatatactacaactcaatgcaatctttaacatgttgaataccaagaactgcccaagtttgaaggacaaaccgaaggtgatcatcatccaggcctgccgtggtgacagccctggtgtggtgtggtttaaagattcagtaggagtttctggaaacctatctttaccaactacagaagagtttgaggatgatgctattaagaaagcccacatagagaaggattttatcgctttctgctcttccacaccagataatgtttcttggagacatcccacaatgggctctgtttttattggaagactcattgaacatatgcaagaatatgcctgttcctgtgatgtggaggaaattttccgcaaggttcgattttcatttgagcagccagatggtagagcgcagatgcccaccactgaaagagtgactttgacaagatgtttctacctcttcccaggacattaaaataaggaaactgtatgaatgtctgtgggcaggaagtgaagagatccttctgtaaaggtttttggaattatgtctgctgaataataaacttttttgaaataataaatctggtagaaaaatgaaaa

SEQ ID NO: 312027 - DNA, 1313 bp, Homo sapiens
agtttcagtcacacaagaagggaggagagaaaagccatggccgacaaggtcctgaaggagaagagaaagctgtttatccgttccatgggtgaaggtacaataaatggcttactggatgaattattacagacaagggtgctgaacaaggaagagatggagaaagtaaaacgtgaaaatgctacagttatggataagacccgagctttgattgactccgttattccgaaaggggcacaggcatgccaaatttgcatcacatacatttgtgaagaagacagttacctggcagggacgctgggactctcagcagctcctcaggcagtgcaggacaacccagctatgcccacatcctcaggctcagaagggaatgtcaagctttgctccctagaagaagctcaaaggatatggaaacaaaagtcggcagagatttatccaataatggacaagtcaagccgcacacgtcttgctctcattatctgcaatgaagaatttgacagtattcctagaagaactggagctgaggttgacatcacaggcatgacaatgctgctacaaaatctggggtacagcgtagatgtgaaaaaaaatctcactgcttcggacatgactacagagctggaggcatttgcacaccgcccagagcacaagacctctgacagcacgttcctggtgttcatgtctcatggtattcgggaaggcatttgtgggaagaaacactctgagcaagtcccagatatactacaactcaatgcaatctttaacatgttgaataccaagaactgcccaagtttgaaggacaaaccgaaggtgatcatcatccaggcctgccgtggtgacagccctggtgtggtgtggtttaaagattcagtaggagtttctggaaacctatctttaccaactacagaagagtttgaggatgatgctattaagaaagcccacatagagaaggattttatcgctttctgctcttccacaccagataatgtttcttggagacatcccacaatgggctctgtttttattggaagactcattgaacatatgcaagaatatgcctgttcctgtgatgtggaggaaattttccgcaaggttcgattttcatttgagcagccagatggtagagcgcagatgcccaccactgaaagagtgactttgacaagatgtttctacctcttcccaggacattaaaataaggaaactgtatgaatgtctgtgggcaggaagtgaagagatccttctgtaaaggtttttggaattatgtctgctgaataataaacttttttgaaataataaatctggtagaaaaatgaaaa

SEQ ID NO: 312028 - DNA, 428 bp, Homo sapiens
agtttcagtcacacaagaagggaggagagaaaagccatggccgacaaggtcctgaaggagaagagaaagctgtttatccgttccatgggtgaagataatgtttcttggagacatcccacaatgggctctgtttttattggaagactcattgaacatatgcaagaatatgcctgttcctgtgatgtggaggaaattttccgcaaggttcgattttcatttgagcagccagatggtagagcgcagatgcccaccactgaaagagtgactttgacaagatgtttctacctcttcccaggacattaaaataaggaaactgtatgaatgtctgtgggcaggaagtgaagagatccttctgtaaaggtttttggaattatgtctgctgaataataaacttttttgaaataataaatctggtagaaaaatgaaaa

SEQ ID NO: 312029 - DNA, 2480 bp, Homo sapiens
agtttcagtcacacaagaagggaggagagaaaagccatggccgacaaggtcctgaaggagaagagaaagctgtttatccgttccatgggtgaaggtacaataaatggcttactggatgaattattacagacaagggtgctgaacaaggaagagatggagaaagtaaaacgtgaaaatgctacagttatggataagacccgagctttgattgactccgttattccgaaaggggcacaggcatgccaaatttgcatcacatacatttgtgaagaagacagttacctggcagggacgctgggactctcagcagctcctcaggcagtgcaggacaacccagctatgcccacatcctcaggctcagaagggaatgtcaagctttgctccctagaagaagctcaaaggatatggaaacaaaagtcggcagagatttatccaataatggacaagtcaagccgcacacgtcttgctctcattatctgcaatgaagaatttgacagtattcctagaagaactggagctgaggttgacatcacaggcatgacaatgctgctacaaaatctggggtacagcgtagatgtgaaaaaaaatctcactgcttcggacatgactacagagctggaggcatttgcacaccgcccagagcacaagacctctgacagcacgttcctggtgttcatgtctcatggtattcgggaaggcatttgtgggaagaaacactctgagcaagtcccagatatactacaactcaatgcaatctttaacatgttgaataccaagaactgcccaagtttgaaggacaaaccgaaggtgatcatcatccaggcctgccgtggtgacagccctggtgtggtgtggtttaaagattcagtaggagtttctggaaacctatctttaccaactacagaagagtttgaggatgatgctattaagaaagcccacatagagaaggattttatcgctttctgctcttccacaccagataatgtttcttggagacatcccacaatgggctctgtttttattggaagactcattgaacatatgcaagaatatgcctgttcctgtgatgtggaggaaattttccgcaaggttcgattttcatttgagcagccagatggtagagcgcagatgcccaccactgaaagagtgactttgacaagatgtttctacctcttcccaggacattaaaataaggaaactgtatgaatgtctgtgggcaggtacatgtgtatggtcgggagtgtgggaaggttgaggaaagggtactgaaagtccatttgagtcaagaactctaggtttacaggctgagaatccttaatccaaaaatttgaattttgaaatgctctaaaatccaacactgtgtgagcgcccacatgatattcaaaggaaatgtttattgaaacatttcaaattataggtttttggattagggatgctaaaccagtaagtatacagctgaattccaatatacaaaaatatctgaaatttgaaatacttctggtagcatgcattttggataagggataatcaagccatatacagaaaatactgaagtaatgcctttcttctggtcagtgcagagcacgttgctcttctcccaaagtttttcatttagaccccttttgagattcatctgatattggcctagaagtggccgtaagactacaaaccctcacttttggatgtttctctccttcacctcagcagggtatatttaaacatagcatgtggtctttccttttaaaattgtgtatgttcccattggtggtataactttataacttgcatgtctttaacaaaattctttcctatgtttttttttttaattatttctttttctcataggaagtgaagagatccttctgtaaaggtttttggaattatgtctgctgaataataaacttttttgaaataataaatctggtagaaaaatgaaaaaaaaaaaaaaaaaaaaaaaaaaaaaaaaaaaaaaaaaaaaaaaaaaaaaaaaaaaaaaaaagagagaggggggcgggcacctaaaagaacaccaccgaggaggaggcgcccacaaaatcagagcgccacaacgaattcgtcagaaaggagggcgccacatgagaggacgactatattaaacaaacagacgacgcggcgcgcggataacaacaacagatgcaggaaaaaaaaaccgacaaagcgcgggggacacaccagagagagagggaaaccacacacaaggaggggggggggaacaacaaaaggagggaagaggcacaaacgaccacgacgcaaagggaagaagatagacgacgagagccgacggagggagagcaagaacacccatcagagagacagcatcgaataacatggcgacaaaaaaacaaccaggaaacatgaggcggagggggaagagaaagaagatgccgccgcaacgcgagaaggttgtagagcagaacaaacatcaccagcgacggcaccagacgaagacacagggaggt

SEQ ID NO: 312030 - DNA, 2136 bp, Homo sapiens
ctctgctttccagggactgatgtggaaatggtaaactcagtcttcaggtcactccatgcacatgtatggagactattgagggaaacaagtaggacagcaatacagtaagaagagggattacccaactgtgaggagggggacatttcactgatgaaatctaaatgaggtcactttctgttgattacatgagaggaatatgaggctgttttcatgatgtgagaaatccttgtgctctaaacagacaaggtcctgaaggagaagagaaagctgtttatccgttccatgggtgaaggtacaataaatggcttactggatgaattattacagacaagggtgctgaacaaggaagagatggagaaagtaaaacgtgaaaatgctacagttatggataagacccgagctttgattgactccgttattccgaaaggggcacaggcatgccaaatttgcatcacatacatttgtgaagaagacagttacctggcagggacgctgggactctcagcagctcctcaggcagtgcaggacaacccagctatgcccacatcctcaggctcagaagggaatgtcaagctttgctccctagaagaagctcaaaggatatggaaacaaaagtcggcagagatttatccaataatggacaagtcaagccgcacacgtcttgctctcattatctgcaatgaagaatttgacagtattcctagaagaactggagctgaggttgacatcacaggcatgacaatgctgctacaaaatctggggtacagcgtagatgtgaaaaaaaatctcactgcttcggacatgactacagagctggaggcatttgcacaccgcccagagcacaagacctctgacagcacgttcctggtgttcatgtctcatggtattcgggaaggcatttgtgggaagaaacactctgagcaagtcccagatatactacaactcaatgcaatctttaacatgttgaataccaagaactgcccaagtttgaaggacaaaccgaaggtgatcatcatccaggcctgccgtggtgacagccctggtgtggtgtggtttaaagattcagtaggagtttctggaaacctatctttaccaactacagaagagtttgaggatgatgctattaagaaagcccacatagagaaggattttatcgctttctgctcttccacaccagataatgtttcttggagacatcccacaatgggctctgtttttattggaagactcattgaacatatgcaagaatatgcctgttcctgtgatgtggaggaaattttccgcaaggttcgattttcatttgagcagccagatggtagagcgcagatgcccaccactgaaagagtgactttgacaagatgtttctacctcttcccaggacattaaaataaggaaactgtatgaatgtctgtgggcaggtacatgtgtatggtcgggagtgtgggaaggttgaggaaagggtactgaaagtccatttgagtcaagaactctaggtttacaggctgagaatccttaatccaaaaatttgaattttgaaatgctctaaaatccaacactgtgtgagcgcccacatgatattcaaaggaaatgtttattgaaacatttcaaattataggtttttggattagggatgctaaaccagtaagtatacagctgaattccaatatacaaaaatatctgaaatttgaaatacttctggtagcatgcattttggataagggataatcaagccatatacagaaaatactgaagtaatgcctttcttctggtcagtgcagagcacgttgctcttctcccaaagtttttcatttagaccccttttgagattcatctgatattggcctagaagtggccgtaagactacaaaccctcacttttggatgtttctctccttcacctcagcagggtatatttaaacatagcatgtggtctttccttttaaaattgtgtatgttcccattggtggtataactttataacttgcatgtctttaacaaaattctttcctatgtttttttttttaattatttctttttctcataggaagtgaagagatccttctgtaaaggtttttggaattatgtctgctgaataataaacttttttgaaataataaatctggtagaaaaatgaaaa

SEQ ID NO: 312031 - DNA, 1781 bp, Homo sapiens
ttgtcgcccctcccgcagggactgcgccgccgccggtgcagccgccgacgctgaccgggaggaggaaggaagacgccgagcgggagagctgaagagccgacagccactcggaccgattgccttacctggcagggacgctgggactctcagcagctcctcaggcagtgcaggacaacccagctatgcccacatcctcaggctcagaagggaatgtcaagctttgctccctagaagaagctcaaaggatatggaaacaaaagtcggcagagatttatccaataatggacaagtcaagccgcacacgtcttgctctcattatctgcaatgaagaatttgacagtattcctagaagaactggagctgaggttgacatcacaggcatgacaatgctgctacaaaatctggggtacagcgtagatgtgaaaaaaaatctcactgcttcggacatgactacagagctggaggcatttgcacaccgcccagagcacaagacctctgacagcacgttcctggtgttcatgtctcatggtattcgggaaggcatttgtgggaagaaacactctgagcaagtcccagatatactacaactcaatgcaatctttaacatgttgaataccaagaactgcccaagtttgaaggacaaaccgaaggtgatcatcatccaggcctgccgtggtgacagccctggtgtggtgtggtttaaagattcagtaggagtttctggaaacctatctttaccaactacagaagagtttgaggatgatgctattaagaaagcccacatagagaaggattttatcgctttctgctcttccacaccagataatgtttcttggagacatcccacaatgggctctgtttttattggaagactcattgaacatatgcaagaatatgcctgttcctgtgatgtggaggaaattttccgcaaggttcgattttcatttgagcagccagatggtagagcgcagatgcccaccactgaaagagtgactttgacaagatgtttctacctcttcccaggacattaaaataaggaaactgtatgaatgtctgtgggcaggtacatgtgtatggtcgggagtgtgggaaggttgaggaaagggtactgaaagtccatttgagtcaagaactctaggtttacaggctgagaatccttaatccaaaaatttgaattttgaaatgctctaaaatccaacactgtgtgagcgcccacatgatattcaaaggaaatgtttattgaaacatttcaaattataggtttttggattagggatgctaaaccagtaagtatacagctgaattccaatatacaaaaatatctgaaatttgaaatacttctggtagcatgcattttggataagggataatcaagccatatacagaaaatactgaagtaatgcctttcttctggtcagtgcagagcacgttgctcttctcccaaagtttttcatttagaccccttttgagattcatctgatattggcctagaagtggccgtaagactacaaaccctcacttttggatgtttctctccttcacctcagcagggtatatttaaacatagcatgtggtctttccttttaaaattgtgtatgttcccattggtggtataactttataacttgcatgtctttaacaaaattctttcctatgtttttttttttaattatttctttttctcataggaagtgaagagatccttctgtaaaggtttttggaattatgtctgctgaataataaacttttttgaaataataaatctggtagaaaaatgaaaa

SEQ ID NO: 312032 - DNA, 1097 bp, Homo sapiens
agtttcagtcacacaagaagggaggagagaaaagccatggccgacaaggtcctgaaggagaagagaaagctgtttatccgttccatgggtgaagctcctcaggcagtgcaggacaacccagctatgcccacatcctcaggctcagaagggaatgtcaagctttgctccctagaagaagctcaaaggatatggaaacaaaagtcggcagagatttatccaataatggacaagtcaagccgcacacgtcttgctctcattatctgcaatgaagaatttgacagtattcctagaagaactggagctgaggttgacatcacaggcatgacaatgctgctacaaaatctggggtacagcgtagatgtgaaaaaaaatctcactgcttcggacatgactacagagctggaggcatttgcacaccgcccagagcacaagacctctgacagcacgttcctggtgttcatgtctcatggtattcgggaaggcatttgtgggaagaaacactctgagcaagtcccagatatactacaactcaatgcaatctttaacatgttgaataccaagaactgcccaagtttgaaggacaaaccgaaggtgatcatcatccaggcctgccgtggtgacagccctggtgtggtgtggtttaaagattcagtaggagtttctggaaacctatctttaccaactacagaagagtttgaggatgatgctattaagaaagcccacatagagaaggattttatcgctttctgctcttccacaccagataatgtttcttggagacatcccacaatgggctctgtttttattggaagactcattgaacatatgcaagaatatgcctgttcctgtgatgtggaggaaattttccgcaaggttcgattttcatttgagcagccagatggtagagcgcagatgcccaccactgaaagagtgactttgacaagatgtttctacctcttcccaggacattaaaataaggaaactgtatgaatgtctgtgggcaggaagtgaagagatccttctgtaaaggtttttggaattatgtctgctgaataataaacttttttgaaataataaatctggtagaaaaatgaaaa

SEQ ID NO: 312033 - DNA, 953 bp, Homo sapiens
agtttcagtcacacaagaagggaggagagaaaagccatggccgacaaggtcctgaaggagaagagaaagctgtttatccgttccatgggtgaagctcctcaggcagtgcaggacaacccagctatgcccacatcctcaggctcagaagggaatgtcaagctttgctccctagaagaagctcaaaggatatggaaacaaaagtcggcagagatttatccaataatggacaagtcaagccgcacacgtcttgctctcattatctgcaatgaagaatttgacagtattcctagaagaactggagctgaggttgacatcacaggcatgacaatgctgctacaaaatctggggtacagcgtagatgtgaaaaaaaatctcactgcttcggacatgactacagagctggaggcatttgcacaccgcccagagcacaagacctctgacagcacgttcctggtgttcatgtctcatggtattcgggaaggcatttgtgggaagaaacactctgagcaagtcccagatatactacaactcaatgcaatctttaacatgttgaataccaagaactgcccaagtttgaaggacaaaccgaaggtgatcatcatccaggcctgccgtggtgataatgtttcttggagacatcccacaatgggctctgtttttattggaagactcattgaacatatgcaagaatatgcctgttcctgtgatgtggaggaaattttccgcaaggttcgattttcatttgagcagccagatggtagagcgcagatgcccaccactgaaagagtgactttgacaagatgtttctacctcttcccaggacattaaaataaggaaactgtatgaatgtctgtgggcaggaagtgaagagatccttctgtaaaggtttttggaattatgtctgctgaataataaacttttttgaaataataaatctggtagaaaaatgaaaa

SEQ ID NO: 312034 - DNA, 1938 bp, Homo sapiens
agtttcagtcacacaagaagggaggagagaaaagccatggccgacaaggtcctgaaggagaagagaaagctgtttatccgttccatgggtgaaggtacaataaatggcttactggatgaattattacagacaagggtgctgaacaaggaagagatggagaaagtaaaacgtgaaaatgctacagttatggataagacccgagctttgattgactccgttattccgaaaggggcacaggcatgccaaatttgcatcacatacatttgtgaagaagacagttacctggcagggacgctgggactctcagcagctcctcaggcagtgcaggacaacccagctatgcccacatcctcaggctcagaagggaatgtcaagctttgctccctagaagaagctcaaaggatatggaaacaaaagtcggcagagatttatccaataatggacaagtcaagccgcacacgtcttgctctcattatctgcaatgaagaatttgacagtattcctagaagaactggagctgaggttgacatcacaggcatgacaatgctgctacaaaatctggggtacagcgtagatgtgaaaaaaaatctcactgcttcggacatgactacagagctggaggcatttgcacaccgcccagagcacaagacctctgacagcacgttcctggtgttcatgtctcatggtattcgggaaggcatttgtgggaagaaacactctgagcaagtcccagatatactacaactcaatgcaatctttaacatgttgaataccaagaactgcccaagtttgaaggacaaaccgaaggtgatcatcatccaggcctgccgtggtgacagccctggtgtggtgtggtttaaagattcagtaggagtttctggaaacctatctttaccaactacagaagagtttgaggatgatgctattaagaaagcccacatagagaaggattttatcgctttctgctcttccacaccagataatgtttcttggagacatcccacaatgggctctgtttttattggaagactcattgaacatatgcaagaatatgcctgttcctgtgatgtggaggaaattttccgcaaggttcgattttcatttgagcagccagatggtagagcgcagatgcccaccactgaaagagtgactttgacaagatgtttctacctcttcccaggacattaaaataaggaaactgtatgaatgtctgtgggcaggtacatgtgtatggtcgggagtgtgggaaggttgaggaaagggtactgaaagtccatttgagtcaagaactctaggtttacaggctgagaatccttaatccaaaaatttgaattttgaaatgctctaaaatccaacactgtgtgagcgcccacatgatattcaaaggaaatgtttattgaaacatttcaaattataggtttttggattagggatgctaaaccagtaagtatacagctgaattccaatatacaaaaatatctgaaatttgaaatacttctggtagcatgcattttggataagggataatcaagccatatacagaaaatactgaagtaatgcctttcttctggtcagtgcagagcacgttgctcttctcccaaagtttttcatttagaccccttttgagattcatctgatattggcctagaagtggccgtaagactacaaaccctcacttttggatgtttctctccttcacctcagcagggtatatttaaacatagcatgtggtctttccttttaaaattgtgtatgttcccattggtggtataactttataacttgcatgtctttaacaaaattctttcctatgtttttttttttaattatttctttttctcataggaagtgaagagatccttctgtaaaggtttttggaattatgtctgctgaataataaacttttttgaaataataaatctggtagaaaaatgaaaa

SEQ ID NO: 312035 - DNA, 1878 bp, Homo sapiens
agtttcagtcacacaagaagggaggagagaaaagccatggccgacaaggtcctgaaggagaagagaaagctgtttatccgttccatgggtgaaggtacaataaatggcttactggatgaattattacagacaagggtgctgaacaaggaagagatggagaaagtaaaacgtgaaaatgctacagttatggataagacccgagctttgattgactccgttattccgaaaggggcacaggcatgccaaatttgcatcacatacatttgtgaagaagacactatgcccacatcctcaggctcagaagggaatgtcaagctttgctccctagaagaagctcaaaggatatggaaacaaaagtcggcagagatttatccaataatggacaagtcaagccgcacacgtcttgctctcattatctgcaatgaagaatttgacagtattcctagaagaactggagctgaggttgacatcacaggcatgacaatgctgctacaaaatctggggtacagcgtagatgtgaaaaaaaatctcactgcttcggacatgactacagagctggaggcatttgcacaccgcccagagcacaagacctctgacagcacgttcctggtgttcatgtctcatggtattcgggaaggcatttgtgggaagaaacactctgagcaagtcccagatatactacaactcaatgcaatctttaacatgttgaataccaagaactgcccaagtttgaaggacaaaccgaaggtgatcatcatccaggcctgccgtggtgacagccctggtgtggtgtggtttaaagattcagtaggagtttctggaaacctatctttaccaactacagaagagtttgaggatgatgctattaagaaagcccacatagagaaggattttatcgctttctgctcttccacaccagataatgtttcttggagacatcccacaatgggctctgtttttattggaagactcattgaacatatgcaagaatatgcctgttcctgtgatgtggaggaaattttccgcaaggttcgattttcatttgagcagccagatggtagagcgcagatgcccaccactgaaagagtgactttgacaagatgtttctacctcttcccaggacattaaaataaggaaactgtatgaatgtctgtgggcaggtacatgtgtatggtcgggagtgtgggaaggttgaggaaagggtactgaaagtccatttgagtcaagaactctaggtttacaggctgagaatccttaatccaaaaatttgaattttgaaatgctctaaaatccaacactgtgtgagcgcccacatgatattcaaaggaaatgtttattgaaacatttcaaattataggtttttggattagggatgctaaaccagtaagtatacagctgaattccaatatacaaaaatatctgaaatttgaaatacttctggtagcatgcattttggataagggataatcaagccatatacagaaaatactgaagtaatgcctttcttctggtcagtgcagagcacgttgctcttctcccaaagtttttcatttagaccccttttgagattcatctgatattggcctagaagtggccgtaagactacaaaccctcacttttggatgtttctctccttcacctcagcagggtatatttaaacatagcatgtggtctttccttttaaaattgtgtatgttcccattggtggtataactttataacttgcatgtctttaacaaaattctttcctatgtttttttttttaattatttctttttctcataggaagtgaagagatccttctgtaaaggtttttggaattatgtctgctgaataataaacttttttgaaataataaatctggtagaaaaatgaaaa

SEQ ID NO: 312036 - DNA, 1977 bp, Homo sapiens
ggggtatataagagctggattactagttagcaaatgagggggtaaatattccagtggatacaagcttggactcttttcttgaagctttctttctatcagaagcatttgctgatattgctgacattgaaacattaaaagaaaatttgagaagcaatgggcatcctgaagctgcaagtatttctcattgtgctctctgttgcattgaaccatctgaaagctacacccattgaaagtcatcaggtggaaaagcggaaatgcaacactgccacatgtgcaacgcagcgcctggcaaattttttagttcattccagcaacaactttggtgccattctctcatctaccaacgtgggatccaatacatatggcaagaggaatgcagtagaggttttaaagagagagccactgaattacttgcccctttagaggacaatgtaactctatagttattgttttatgttctagtgatttcctgtataatttaacagtgcccttttcatctccagtgtgaatatatggtctgtgtgtctgatgtttgttgctaggacatataccttctcaaaagattgttttatatgtagtactaactaaggtcccataataaaaagatagtatcttttaaaatgaaatgtttttgctatagatttgtattttaaaacataagaacgtcattttgggacctatatctcagtggcacaggtttaagaacgaaggagaaaaaggtagtttgaaccttggtaaattgtaaacagctaataatgaagttattcttgacatgagaaaatcagtaattggaccaggcgcggtggctcttgcctgtaatcccagcactttgggaggccgaggcaggcagatcacaaggtcaggagttcgagaccagcctgaccaacatggtgaaaccctgtctctactaaaaatacaaaaattagccgggggtggtgacatgtgcctgtaatcccagctactcaggaggctaaggcaggagaatcgcttaaacccaggaggcggaggttgcagtgagccgagattgcaccactgcactccagcctgggtggcagagtgagactcgtctcaaaaaaaagaaagaaaattagtaattgtaagtacccctgataagcaaattagtaattgtcaatacccctgttaagcaattcctttttgcagtatatttctgaaatgacagaatgctgttttaaaaacaaagaaataaaatcctgctcctgactcggtcaaaatattttttaaagtctattgtttgttgtgcttgctggtactaagaggctatttaaaagtataaaactgctttgtatccatgagggtttcattgtgtgttagcagcagtgagcttctattaaatgtatatgtcatttattttgtttaagtggctttcagcaaacctcagtcatattcttatgcagggtattgcgaaacaacttgtgttctattaatcgtgtcttcaattaaaagaccacagacttctggaaactctttgctgtataagaattatttcttttgtttaacaaattagacatttctggcagaggttatgtatatgatacactttttttgatagcagctgcaatgttggacagaagatgaaatgctttgctttgagtcagattcttatgaatatctgcttttccctgactttgagttaggtagctttggaagtagcattaattcagataaactgccatcatgctgcgttatgccatttctaaagacactcaacttgtacttttaaaaaaatagaaaaaataagcatttcaatctaagtggaaatttgactcattgacttacatttctaagttaaaatttccctttatgaagtgtgccttaggttaccaaattgtagaggctttcgttggtggtggtaagtggtagcggtagtgagtgtatagaggcagggaaatatatttataataaattctatgtcatgaattacatattgaaataaataggtgaatatacaaatttata

SEQ ID NO: 312037 - DNA, 1895 bp, Homo sapiens
aagctttgcacatctccaggtcagacctatcctaatatctacatctacatttccagaaaatttgagaagcaatgggcatcctgaagctgcaagtatttctcattgtgctctctgttgcattgaaccatctgaaagctacacccattgaaagtcatcaggtggaaaagcggaaatgcaacactgccacatgtgcaacgcagcgcctggcaaattttttagttcattccagcaacaactttggtgccattctctcatctaccaacgtgggatccaatacatatggcaagaggaatgcagtagaggttttaaagagagagccactgaattacttgcccctttagaggacaatgtaactctatagttattgttttatgttctagtgatttcctgtataatttaacagtgcccttttcatctccagtgtgaatatatggtctgtgtgtctgatgtttgttgctaggacatataccttctcaaaagattgttttatatgtagtactaactaaggtcccataataaaaagatagtatcttttaaaatgaaatgtttttgctatagatttgtattttaaaacataagaacgtcattttgggacctatatctcagtggcacaggtttaagaacgaaggagaaaaaggtagtttgaaccttggtaaattgtaaacagctaataatgaagttattcttgacatgagaaaatcagtaattggaccaggcgcggtggctcttgcctgtaatcccagcactttgggaggccgaggcaggcagatcacaaggtcaggagttcgagaccagcctgaccaacatggtgaaaccctgtctctactaaaaatacaaaaattagccgggggtggtgacatgtgcctgtaatcccagctactcaggaggctaaggcaggagaatcgcttaaacccaggaggcggaggttgcagtgagccgagattgcaccactgcactccagcctgggtggcagagtgagactcgtctcaaaaaaaagaaagaaaattagtaattgtaagtacccctgataagcaaattagtaattgtcaatacccctgttaagcaattcctttttgcagtatatttctgaaatgacagaatgctgttttaaaaacaaagaaataaaatcctgctcctgactcggtcaaaatattttttaaagtctattgtttgttgtgcttgctggtactaagaggctatttaaaagtataaaactgctttgtatccatgagggtttcattgtgtgttagcagcagtgagcttctattaaatgtatatgtcatttattttgtttaagtggctttcagcaaacctcagtcatattcttatgcagggtattgcgaaacaacttgtgttctattaatcgtgtcttcaattaaaagaccacagacttctggaaactctttgctgtataagaattatttcttttgtttaacaaattagacatttctggcagaggttatgtatatgatacactttttttgatagcagctgcaatgttggacagaagatgaaatgctttgctttgagtcagattcttatgaatatctgcttttccctgactttgagttaggtagctttggaagtagcattaattcagataaactgccatcatgctgcgttatgccatttctaaagacactcaacttgtacttttaaaaaaatagaaaaaataagcatttcaatctaagtggaaatttgactcattgacttacatttctaagttaaaatttccctttatgaagtgtgccttaggttaccaaattgtagaggctttcgttggtggtggtaagtggtagcggtagtgagtgtatagaggcagggaaatatatttataataaattctatgtcatgaattacatattgaaataaataggtgaatatacaaatttata

SEQ ID NO: 312038 - DNA, 2069 bp, Homo sapiens
ggggtatataagagctggattactagttagcaaatgagggggtaaatattccagtggatacaagcttggactcttttcttgaagctttctttctatcagaagcatttgctgatattgctgacattgaaacattaaaagaaaatttgagaagcaatgggcatcctgaagctgcaagtatttctcattgtgctctctgttgcattgaaccatctgaaagctacacccattgaaagacaggaatggataattccagttttgtcaagaaatatactcttggaacttagaggggcaaagccagaacatgaagcgggaaaaaaatcaaaagtcatcaggtggaaaagcggaaatgcaacactgccacatgtgcaacgcagcgcctggcaaattttttagttcattccagcaacaactttggtgccattctctcatctaccaacgtgggatccaatacatatggcaagaggaatgcagtagaggttttaaagagagagccactgaattacttgcccctttagaggacaatgtaactctatagttattgttttatgttctagtgatttcctgtataatttaacagtgcccttttcatctccagtgtgaatatatggtctgtgtgtctgatgtttgttgctaggacatataccttctcaaaagattgttttatatgtagtactaactaaggtcccataataaaaagatagtatcttttaaaatgaaatgtttttgctatagatttgtattttaaaacataagaacgtcattttgggacctatatctcagtggcacaggtttaagaacgaaggagaaaaaggtagtttgaaccttggtaaattgtaaacagctaataatgaagttattcttgacatgagaaaatcagtaattggaccaggcgcggtggctcttgcctgtaatcccagcactttgggaggccgaggcaggcagatcacaaggtcaggagttcgagaccagcctgaccaacatggtgaaaccctgtctctactaaaaatacaaaaattagccgggggtggtgacatgtgcctgtaatcccagctactcaggaggctaaggcaggagaatcgcttaaacccaggaggcggaggttgcagtgagccgagattgcaccactgcactccagcctgggtggcagagtgagactcgtctcaaaaaaaagaaagaaaattagtaattgtaagtacccctgataagcaaattagtaattgtcaatacccctgttaagcaattcctttttgcagtatatttctgaaatgacagaatgctgttttaaaaacaaagaaataaaatcctgctcctgactcggtcaaaatattttttaaagtctattgtttgttgtgcttgctggtactaagaggctatttaaaagtataaaactgctttgtatccatgagggtttcattgtgtgttagcagcagtgagcttctattaaatgtatatgtcatttattttgtttaagtggctttcagcaaacctcagtcatattcttatgcagggtattgcgaaacaacttgtgttctattaatcgtgtcttcaattaaaagaccacagacttctggaaactctttgctgtataagaattatttcttttgtttaacaaattagacatttctggcagaggttatgtatatgatacactttttttgatagcagctgcaatgttggacagaagatgaaatgctttgctttgagtcagattcttatgaatatctgcttttccctgactttgagttaggtagctttggaagtagcattaattcagataaactgccatcatgctgcgttatgccatttctaaagacactcaacttgtacttttaaaaaaatagaaaaaataagcatttcaatctaagtggaaatttgactcattgacttacatttctaagttaaaatttccctttatgaagtgtgccttaggttaccaaattgtagaggctttcgttggtggtggtaagtggtagcggtagtgagtgtatagaggcagggaaatatatttataataaattctatgtcatgaattacatattgaaataaataggtgaatatacaaatttata

SEQ ID NO: 312039 - DNA, 1767 bp, Homo sapiens
ggggtatataagagctggattactagttagcaaatgagggggtaaatattccagtggatacaagcttggactcttttcttgaagctttctttctatcagaagcatttgctgatattgctgacattgaaacattaaaagaaaatttgagaagcaatgggcatcctgaagctgcaagtatttctcattgtgctctctgttgcattgaaccatctgaaagctacacccattgaaagtcatcaggtggaaaagcggaaatgcaacactgccacatgtgcaacgcagcgcctggcaaattttttagttcattccagcaacaactttggtgccattctctcatctaccaacgtgggatccaatacatatggcaagaggaatgcagtagaggttttaaagagagagccactgaattacttgcccctttagaggacaatgtaactctatagttattgttttatgttctagtgatttcctgtataatttaacagtgcccttttcatctccagtgtgaatatatggtctgtgtgtctgatgtttgttgctaggacatataccttctcaaaagattgttttatatgtagtactaactaaggtcccataataaaaagatagtatcttttaaaatgaaatgtttttgctatagatttgtattttaaaacataagaacgtcattttgggacctatatctcagtggcacaggtttaagaacgaaggagaaaaaggtagtttgaaccttggtaaattgtaaacactactcaggaggctaaggcaggagaatcgcttaaacccaggaggcggaggttgcagtgagccgagattgcaccactgcactccagcctgggtggcagagtgagactcgtctcaaaaaaaagaaagaaaattagtaattgtaagtacccctgataagcaaattagtaattgtcaatacccctgttaagcaattcctttttgcagtatatttctgaaatgacagaatgctgttttaaaaacaaagaaataaaatcctgctcctgactcggtcaaaatattttttaaagtctattgtttgttgtgcttgctggtactaagaggctatttaaaagtataaaactgctttgtatccatgagggtttcattgtgtgttagcagcagtgagcttctattaaatgtatatgtcatttattttgtttaagtggctttcagcaaacctcagtcatattcttatgcagggtattgcgaaacaacttgtgttctattaatcgtgtcttcaattaaaagaccacagacttctggaaactctttgctgtataagaattatttcttttgtttaacaaattagacatttctggcagaggttatgtatatgatacactttttttgatagcagctgcaatgttggacagaagatgaaatgctttgctttgagtcagattcttatgaatatctgcttttccctgactttgagttaggtagctttggaagtagcattaattcagataaactgccatcatgctgcgttatgccatttctaaagacactcaacttgtacttttaaaaaaatagaaaaaataagcatttcaatctaagtggaaatttgactcattgacttacatttctaagttaaaatttccctttatgaagtgtgccttaggttaccaaattgtagaggctttcgttggtggtggtaagtggtagcggtagtgagtgtatagaggcagggaaatatatttataataaattctatgtcatgaattacatattgaaataaataggtgaatatacaaatttata

SEQ ID NO: 312040 - DNA, 623 bp, Homo sapiens
ggggtatataagagctggattactagttagcaaatgagggggtaaatattccagtggatacaagcttggactcttttcttgaagctttctttctatcagaagcatttgctgatattgctgacattgaaacattaaaagaaaatttgagaagcaatgggcatcctgaagctgcaagtatttctcattgtgctctctgttgcattgaaccatctgaaagctacacccattgaaagtcatcaggtggaaaagcggaaatgcaacactgccacatgtgcaacgcagcgcctggcaaattttttagttcattccagcaacaactttggtgccattctctcatctaccaacgtgggatccaatacatatggcaagaggaatgcagtagaggttttaaagagagagccactgaattacttgcccctttagaggacaatgtaactctatagttattgttttatgttctagtgatttcctgtataatttaacagtgcccttttcatctccagtgtgaatatatggtctgtgtgtctgatgtttgttgctaggacatataccttctcaaaagattgttttatatgtagtactaactaaggtcccataataaaaagatagtatcttttaaaatg

SEQ ID NO: 312041 - DNA, 1119 bp, Homo sapiens
  misc_feature (1119)..(1119): n is a, c, g, or t
gttttattcattcttgaatttttcctttctaaagagctcttctatttatacatgcctaaattcttttaaaatgtagagggatacctgtctgcataataaagctgatcatgtttttcacctgcaaactgtagcaaaacctctttctgaaggaagagaagacatttgccttttgttaaaagatggtaaaccagatctgtctccaagaccttggcctctccttggaggacctttaggtcaaactccctagtctccacctgagaccctgggagagaagtttgaagcacaactcccttaaggtctccaaaccagacggtgacgcctgcgggaccatctggggcacctgcttccacccgtctctctgcccactcgggtctgcagacctggttcccactgaggccctttgcaggatggaactacggggcttacaggagcttttgtgtgcctggtagaaactatttctgttccagtcacattgccatcactcttgtactgcctgccaccgcggaggaggctggtgacaggccaaaggccagtggaagaaacaccctttcatctcagagtccactgtggcactggccacccctccccagtacaggggtgctgcaggtggcagagtgaatgtcccccatcatgtggcccaactctcctggcctggccatctccctccccagaaacagtgtgcatgggttattttggagtgtaggtgacttgtttactcattgaagcagatttctgcttccttttatttttataggaatagaggaagaaaggtcagatgcgtgcccagctcttcaccccccaatctcttggtggggaggggtgtacctaaatatttatcatatccttgcccttgagtgcttgttagagagaaagagaactactaaggaaaataatattatttaaacttcgaaacaaaaaaggggggggtttaaattcctggaggggccagtaggtaccagttttgaaagggccaagggaggaaaagaagggtcgggtaaaggggaggaacggatggttggagactttggggtgaaggacacaggtcgcggttatgtgaggaggtcgtgatgtggtaaagagaaaagaaagaagaagaggacagcggtcacaggtctcgcn

SEQ ID NO: 312042 - DNA, 396 bp, Homo sapiens
ggggtggtgccagtgccagcatccctctgttctaagacattgtcccttctcttgcagctgtcatagtctcagcccgcatggcccccgaggagatcatcatggacagacccttcctctttgtggtccggcacaaccccacaggtgagcctggaacccatcaccgttccacatcctcccacccattctttctctcaggaactagtcccgacagatgcagacatccctctatccctgagagggctctgggcagggaacccataaccctaccctgcttcctgtcccaagaggaggctaccttctatcacccacagacagtgccgggtccccgctctgtgactcaggcagctgcgactccagacagctcactcatctgcctagatctcagtccttccaccc

SEQ ID NO: 312043 - DNA, 325 bp, Homo sapiens
  misc_feature (15)..(15): n is a, c, g, or t
ttttgggggatggantcctagctcagtcatccccaggtggaggttgcagtgagccgaacgaaattgagccacttcaccccagcctgggcaaaagagtgaaattcccattcaaaaaaaaaaaaaaaaaaaaaggatgaggactgggatgaactggtggctgggtgtggggaaaatggaagtgaaggaaggccaaaagagacagagaaggcctggcgcggcgactcacgcctataatcccagcactttgggaggctgagaagggggattgcttgaggccagaagttgaataccagtctgggcagcatagcaagccctgcctctacaa

SEQ ID NO: 312044 - DNA, 299 bp, Homo sapiens
ccttcaccagccctctttccattgctctaggatgcagatgtctccagccctcacctgcctagtcctgggcctggcccttgtctttggtgaagggtctgctgtgcaccatcccccatcctacgtggcccacctggcctcagacttcggggtgagggtgtttcagcaggtggcgcaggcctccaaggaccgcaacgtggttttctcaccctatggggtggcctcggtgttggccatgctccagctgacaacaggaaggatcacccaaggctaggagttcaaggccagcctgggcaatacgg

SEQ ID NO: 312045 - DNA, 3192 bp, Homo sapiens
ggggcacagctgtgtttggctgcagggccaagagcgctgtcaagaagacccacacgcccccctccagcagctgaattcctgcagctcagcagccgccgccagagcaggacgaaccgccaatcgcaaggcacctctgagaacttcaggatgcagatgtctccagccctcacctgcctagtcctgggcctggcccttgtctttggtgaagggtctgctgtgcaccatcccccatcctacgtggcccacctggcctcagacttcggggtgagggtgtttcagcaggtggcgcaggcctccaaggaccgcaacgtggttttctcaccctatggggtggcctcggtgttggccatgctccagctgacaacaggaggagaaacccagcagcagattcaagcagctatgggattcaagattgatgacaagggcatggcccccgccctccggcatctgtacaaggagctcatggggccatggaacaaggatgagatcagcaccacagacgcgatcttcgtccagcgggatctgaagctggtccagggcttcatgccccacttcttcaggctgttccggagcacggtcaagcaagtggacttttcagaggtggagagagccagattcatcatcaatgactgggtgaagacacacacaaaaggtatgatcagcaacttgcttgggaaaggagccgtggaccagctgacacggctggtgctggtgaatgccctctacttcaacggccagtggaagactcccttccccgactccagcacccaccgccgcctcttccacaaatcagacggcagcactgtctctgtgcccatgatggctcagaccaacaagttcaactatactgagttcaccacgcccgatggccattactacgacatcctggaactgccctaccacggggacaccctcagcatgttcattgctgccccttatgaaaaagaggtgcctctctctgccctcaccaacattctgagtgcccagctcatcagccactggaaaggcaacatgaccaggctgccccgcctcctggttctgcccaagttctccctggagactgaagtcgacctcaggaagcccctagagaacctgggaatgaccgacatgttcagacagtttcaggctgacttcacgagtctttcagaccaagagcctctccacgtcgcgcaggcgctgcagaaagtgaagatcgaggtgaacgagagtggcacggtggcctcctcatccacagctgtcatagtctcagcccgcatggcccccgaggagatcatcatggacagacccttcctctttgtggtccggcacaaccccacaggaacagtccttttcatgggccaagtgatggaaccctgaccctggggaaagacgccttcatctgggacaaaactggagatgcatcgggaaagaagaaactccgaagaaaagaattttagtgttaatgactctttctgaaggaagagaagacatttgccttttgttaaaagatggtaaaccagatctgtctccaagaccttggcctctccttggaggacctttaggtcaaactccctagtctccacctgagaccctgggagagaagtttgaagcacaactcccttaaggtctccaaaccagacggtgacgcctgcgggaccatctggggcacctgcttccacccgtctctctgcccactcgggtctgcagacctggttcccactgaggccctttgcaggatggaactacggggcttacaggagcttttgtgtgcctggtagaaactatttctgttccagtcacattgccatcactcttgtactgcctgccaccgcggaggaggctggtgacaggccaaaggccagtggaagaaacaccctttcatctcagagtccactgtggcactggccacccctccccagtacaggggtgctgcaggtggcagagtgaatgtcccccatcatgtggcccaactctcctggcctggccatctccctccccagaaacagtgtgcatgggttattttggagtgtaggtgacttgtttactcattgaagcagatttctgcttccttttatttttataggaatagaggaagaaaggtcagatgcgtgcccagctcttcaccccccaatctcttggtggggaggggtgtacctaaatatttatcatatccttgcccttgagtgcttgttagagagaaagagaactactaaggaaaataatattatttaaactcgctcctagtgtttctttgtggtctgtgtcaccgtatctcaggaagtccagccacttgactggcacacacccctccggacatccagcgtgacggagcccacactgccaccttgtggccgcctgagaccctcgcgccccccgcgccccccgcgcccctctttttccccttgatggaaattgaccatacaatttcatcctccttcaggggatcaaaaggacggagtggggggacagagactcagatgaggacagagtggtttccaatgtgttcaatagatttaggagcagaaatgcaaggggctgcatgacctaccaggacagaactttccccaattacagggtgactcacagccgcattggtgactcacttcaatgtgtcatttccggctgctgtgtgtgagcagtggacacgtgaggggggggtgggtgagagagacaggcagctcggattcaactaccttagataatatttctgaaaacctaccagccagagggtagggcacaaagatggatgtaatgcactttgggaggccaaggcgggaggattgcttgagcccaggagttcaagaccagcctgggcaacataccaagacccccgtctctttaaaaatatatatattttaaatatacttaaatatatatttctaatatctttaaatatatatatatattttaaagaccaatttatgggagaattgcacacagatgtgaaatgaatgtaatctaatagaagcctaatcagcccaccatgttctccactgaaaaatcctctttctttggggtttttctttctttcttttttgattttgcactggacggtgacgtcagccatgtacaggatccacaggggtggtgtcaaatgctattgaaattgtgttgaattgtatgctttttcacttttgataaataaacatgtaaaaatgtttcaaaaaaataataaaataaataaatacgaagaatatgtcaggacagtcactg

SEQ ID NO: 312046 - DNA, 3840 bp, Homo sapiens
ggggcacagctgtgtttggctgcagggccaagagcgctgtcaagaagacccacacgcccccctccagcagctgaattcctgcagctcagcagccgccgccagagcaggacgaaccgccaatcgcaaggcacctctgagaacttcaggatgcagatgtctccagccctcacctgcctagtcctgggcctggcccttgtctttggtgaagggtctgctgtgcaccatcccccatcctacgtggcccacctggcctcagacttcggggtgagggtgtttcagcaggtggcgcaggcctccaaggaccgcaacgtggttttctcaccctatggggtggcctcggtgttggccatgctccagctgacaacaggaggagaaacccagcagcagattcaagcagctatgggattcaagattgatgacaagggcatggcccccgccctccggcatctgtacaaggagctcatggggccatggaacaaggatgagatcagcaccacagacgcgatcttcgtccagcgggatctgaagctggtccagggcttcatgccccacttcttcaggctgttccggagcacggtcaagcaagtggacttttcagaggtggagagagccagattcatcatcaatgactgggtgaagacacacacaaaaggtatgatcagcaacttgcttgggaaaggagccgtggaccagctgacacggctggtgctggtgaatgccctctacttcaacggccagtggaagactcccttccccgactccagcacccaccgccgcctcttccacaaatcagacggcagcactgtctctgtgcccatgatggctcagaccaacaagttcaactatactgagttcaccacgcccgatggccattactacgacatcctggaactgccctaccacggggacaccctcagcatgttcattgctgccccttatgaaaaagaggtgcctctctctgccctcaccaacattctgagtgcccagctcatcagccactggaaaggcaacatgaccaggctgccccgcctcctggttctgcccaagttctccctggagactgaagtcgacctcaggaagcccctagagaacctgggaatgaccgacatgttcagacagtttcaggctgacttcacgagtctttcagaccaagagcctctccacgtcgcgcaggcgctgcagaaagtgaagatcgaggtgaacgagagtggcacggtggcctcctcatccacagctgtcatagtctcagcccgcatggcccccgaggagatcatcatggacagacccttcctctttgtggtccggcacaaccccacaggaacagtccttttcatgggccaagtgatggaaccctgaccctggggaaagacgccttcatctgggacaaaactggagatgcatcgggaaagaagaaactccgaagaaaagaattttagtgttaatgactctttctgaaggaagagaagacatttgccttttgttaaaagatggtaaaccagatctgtctccaagaccttggcctctccttggaggacctttaggtcaaactccctagtctccacctgagaccctgggagagaagtttgaagcacaactcccttaaggtctccaaaccagacggtgacgcctgcgggaccatctggggcacctgcttccacccgtctctctgcccactcgggtctgcagacctggttcccactgaggccctttgcaggatggaactacggggcttacaggagcttttgtgtgcctggtagaaactatttctgttccagtcacattgccatcactcttgtactgcctgccaccgcggaggaggctggtgacaggccaaaggccagtggaagaaacaccctttcatctcagagtccactgtggcactggccacccctccccagtacaggggtgctgcaggtggcagagtgaatgtcccccatcatgtggcccaactctcctggcctggccatctccctccccagaaacagtgtgcatgggttattttggagtgtaggtgacttgtttactcattgaagcagatttctgcttccttttatttttataggaatagaggaagaaaggtcagatgcgtgcccagctcttcaccccccaatctcttggtggggaggggtgtacctaaatatttatcatatccttgcccttgagtgcttgttagagagaaagagaactactaaggaaaataatattatttaaactcgctcctagtgtttctttgtggtctgtgtcaccgtatctcaggaagtccagccacttgactggcacacacccctccggacatccagcgtgacggagcccacactgccaccttgtggccgcctgagaccctcgcgccccccgcgccccccgcgcccctctttttccccttgatggaaattgaccatacaatttcatcctccttcaggggatcaaaaggacggagtggggggacagagactcagatgaggacagagtggtttccaatgtgttcaatagatttaggagcagaaatgcaaggggctgcatgacctaccaggacagaactttccccaattacagggtgactcacagccgcattggtgactcacttcaatgtgtcatttccggctgctgtgtgtgagcagtggacacgtgaggggggggtgggtgagagagacaggcagctcggattcaactaccttagataatatttctgaaaacctaccagccagagggtagggcacaaagatggatgtaatgcactttgggaggccaaggcgggaggattgcttgagcccaggagttcaagaccagcctgggcaacataccaagacccccgtctctttaaaaatatatatattttaaatatacttaaatatatatttctaatatctttaaatatatatatatattttaaagaccaatttatgggagaattgcacacagatgtgaaatgaatgtaatctaatagaagcctaatcagcccaccatgttctccatggacggtgacgtcagccatgtacaggatccacaggggtggtgtcaaatgctattgaaattgtgttgaattgtatgctttttcacttttgataaataaacatgtaaaaatgtttcaaaaaaataataaaataaataaatacgaagaaaaaaaaaaaaaaaaaaaaaaaaaaaaaaaaaaaaaaaaaaaaaaaaaaaaaaaaaaaaaaaaaaacaaaacaaaaaaaaaaaaaaaaaaaaaaaaaaacgagcacagagaggacaaacgacaaaaaacaaaacacaacaacaaaacgggggggggcggggggccgcgcgaggaaacccggggggcggcgacccagacaggatagaaaaaagtaaagagaggcgagggtctgatcaacacaacaaaaaaacaaggcagaggccgagaacaagcgggtagtcgaccaacacaacaaataagaaggagcgcaggcgcgatcagaggtatatatagaaaaacacgatagctagcgggggagcaactcgatctcaacatacgttgcaacagcaagggcgacggagcgaagttaataaaataaagctccaccgcgcgtgataagacacaacgggagcgaagaccgacggcgacgagaaacgaacgagaacgggcgagagaagaagggtcgagcctgggacgcgcaagactgacgaatgagcgagacgacgggacgcaccgcgagagagcgaaaggacacgagaaacagcggaaggtacaggcaggagcacagcgaaagacagaagcgacacaagcggaagagagagaggacatgaaaggacagagagagaagacgggtgacgaagcagacgcagaagagagacagaaagaaaaccaaaaatgggcgt

SEQ ID NO: 312047 - DNA, 2799 bp, Homo sapiens
cggacgcgtgggcgaccacgcgtcgacaagggcatggcccccgccctccggcatctgtacaaggagctcatggggccatggaacaaggatgagatcagcaccacagacgcgatcttcgtccagcgggatctgaagctggtccagggcttcatgccccacttcttcaggctgttccggagcacggtcaagcaagtggacttttcagaggtggagagagccagattcatcatcaatgactgggtgaagacacacacaaaaggtatgatcagcaacttgcttgggaaaggagccgtggaccagctgacacggctggtgctggtgaatgccctctacttcaacggccagtggaagactcccttccccgactccagcacccaccgccgcctcttccacaaatcagacggcagcactgtctctgtgcccatgatggctcagaccaacaagttcaactatactgagttcaccacgcccgatggccattactacgacatcctggaactgccctaccacggggacaccctcagcatgttcattgctgccccttatgaaaaagaggtgcctctctctgccctcaccaacattctgagtgcccagctcatcagccactggaaaggcaacatgaccaggctgccccgcctcctggttctgcccaagttctccctggagactgaagtcgacctcaggaagcccctagagaacctgggaatgaccgacatgttcagacagtttcaggctgacttcacgagtctttcagaccaagagcctctccacgtcgcgcaggcgctgcagaaagtgaagatcgaggtgaacgagagtggcacggtggcctcctcatccacagctgtcatagtctcagcccgcatggcccccgaggagatcatcatggacagacccttcctctttgtggtccggcacaaccccacaggaacagtccttttcatgggccaagtgatggaaccctgaccctggggaaagacgccttcatctgggacaaaactggagatgcatcgggaaagaagaaactccgaagaaaagaattttagtgttaatgactctttctgaaggaagagaagacatttgccttttgttaaaagatggtaaaccagatctgtctccaagaccttggcctctccttggaggacctttaggtcaaactccctagtctccacctgagaccctgggagagaagtttgaagcacaactcccttaaggtctccaaaccagacggtgacgcctgcgggaccatctggggcacctgcttccacccgtctctctgcccactcgggtctgcagacctggttcccactgaggccctttgcaggatggaactacggggcttacaggagcttttgtgtgcctggtagaaactatttctgttccagtcacattgccatcactcttgtactgcctgccaccgcggaggaggctggtgacaggccaaaggccagtggaagaaacaccctttcatctcagagtccactgtggcactggccacccctccccagtacaggggtgctgcaggtggcagagtgaatgtcccccatcatgtggcccaactctcctggcctggccatctccctccccagaaacagtgtgcatgggttattttggagtgtaggtgacttgtttactcattgaagcagatttctgcttccttttatttttataggaatagaggaagaaaggtcagatgcgtgcccagctcttcaccccccaatctcttggtggggaggggtgtacctaaatatttatcatatccttgcccttgagtgcttgttagagagaaagagaactactaaggaaaataatattatttaaactcgctcctagtgtttctttgtggtctgtgtcaccgtatctcaggaagtccagccacttgactggcacacacccctccggacatccagcgtgacggagcccacactgccaccttgtggccgcctgagaccctcgcgccccccgcgccccccgcgcccctctttttccccttgatggaaattgaccatacaatttcatcctccttcaggggatcaaaaggacggagtggggggacagagactcagatgaggacagagtggtttccaatgtgttcaatagatttaggagcagaaatgcaaggggctgcatgacctaccaggacagaactttccccaattacagggtgactcacagccgcattggtgactcacttcaatgtgtcatttccggctgctgtgtgtgagcagtggacacgtgaggggggggtgggtgagagagacaggcagctcggattcaactaccttagataatatttctgaaaacctaccagccagagggtagggcacaaagatggatgtaatgcactttgggaggccaaggcgggaggattgcttgagcccaggagttcaagaccagcctgggcaacataccaagacccccgtctctttaaaaatatatatattttaaatatacttaaatatatatttctaatatctttaaatatatatatatattttaaagaccaatttatgggagaattgcacacagatgtgaaatgaatgtaatctaatagaagcctaatcagcccaccatgttctccactgaaaaatcctctttctttggggtttttctttctttcttttttgattttgcactggacggtgacgtcagccatgtacaggatccacaggggtggtgtcaaatgctattgaaattgtgttgaattgtatgctttttcacttttgataaataaacatgtaaaaatgtttcaaaaaaataataaaataaataaatacgaagaatatgtcaggacagtcactg

SEQ ID NO: 312048 - DNA, 3139 bp, Homo sapiens
ggggcacagctgtgtttggctgcagggccaagagcgctgtcaagaagacccacacgcccccctccagcagctgaattcctgcagctcagcagccgccgccagagcaggacgaaccgccaatcgcaaggcacctctgagaacttcaggatgcagatgtctccagccctcacctgcctagtcctgggcctggcccttgtctttggtgaagggtctgctgtgcaccatcccccatcctacgtggcccacctggcctcagacttcggggtgagggtgtttcagcaggtggcgcaggcctccaaggaccgcaacgtggttttctcaccctatggggtggcctcggtgttggccatgctccagctgacaacaggaggagaaacccagcagcagattcaagcagctatgggattcaagattgatgacaagggcatggcccccgccctccggcatctgtacaaggagctcatggggccatggaacaaggatgagatcagcaccacagacgcgatcttcgtccagcgggatctgaagctggtccagggcttcatgccccacttcttcaggctgttccggagcacggtcaagcaagtggacttttcagaggtggagagagccagattcatcatcaatgactgggtgaagacacacacaaaaggtatgatcagcaacttgcttgggaaaggagccgtggaccagctgacacggctggtgctggtgaatgccctctacttcaacggccagtggaagactcccttccccgactccagcacccaccgccgcctcttccacaaatcagacggcagcactgtctctgtgcccatgatggctcagaccaacaagttcaactatactgagttcaccacgcccgatggccattactacgacatcctggaactgccctaccacggggacaccctcagcatgttcattgctgccccttatgaaaaagaggtgcctctctctgccctcaccaacattctgagtgcccagctcatcagccactggaaaggcaacatgaccaggctgccccgcctcctggttctgcccaagttctccctggagactgaagtcgacctcaggaagcccctagagaacctgggaatgaccgacatgttcagacagtttcaggctgacttcacgagtctttcagaccaagagcctctccacgtcgcgcaggcgctgcagaaagtgaagatcgaggtgaacgagagtggcacggtggcctcctcatccacagctgtcatagtctcagcccgcatggcccccgaggagatcatcatggacagacccttcctctttgtggtccggcacaaccccacaggaacagtccttttcatgggccaagtgatggaaccctgaccctggggaaagacgccttcatctgggacaaaactggagatgcatcgggaaagaagaaactccgaagaaaagaattttagtgttaatgactctttctgaaggaagagaagacatttgccttttgttaaaagatggtaaaccagatctgtctccaagaccttggcctctccttggaggacctttaggtcaaactccctagtctccacctgagaccctgggagagaagtttgaagcacaactcccttaaggtctccaaaccagacggtgacgcctgcgggaccatctggggcacctgcttccacccgtctctctgcccactcgggtctgcagacctggttcccactgaggccctttgcaggatggaactacggggcttacaggagcttttgtgtgcctggtagaaactatttctgttccagtcacattgccatcactcttgtactgcctgccaccgcggaggaggctggtgacaggccaaaggccagtggaagaaacaccctttcatctcagagtccactgtggcactggccacccctccccagtacaggggtgctgcaggtggcagagtgaatgtcccccatcatgtggcccaactctcctggcctggccatctccctccccagaaacagtgtgcatgggttattttggagtgtaggtgacttgtttactcattgaagcagatttctgcttccttttatttttataggaatagaggaagaaaggtcagatgcgtgcccagctcttcaccccccaatctcttggtggggaggggtgtacctaaatatttatcatatccttgcccttgagtgcttgttagagagaaagagaactactaagcgtatctcaggaagtccagccacttgactggcacacacccctccggacatccagcgtgacggagcccacactgccaccttgtggccgcctgagaccctcgcgccccccgcgccccccgcgcccctctttttccccttgatggaaattgaccatacaatttcatcctccttcaggggatcaaaaggacggagtggggggacagagactcagatgaggacagagtggtttccaatgtgttcaatagatttaggagcagaaatgcaaggggctgcatgacctaccaggacagaactttccccaattacagggtgactcacagccgcattggtgactcacttcaatgtgtcatttccggctgctgtgtgtgagcagtggacacgtgaggggggggtgggtgagagagacaggcagctcggattcaactaccttagataatatttctgaaaacctaccagccagagggtagggcacaaagatggatgtaatgcactttgggaggccaaggcgggaggattgcttgagcccaggagttcaagaccagcctgggcaacataccaagacccccgtctctttaaaaatatatatattttaaatatacttaaatatatatttctaatatctttaaatatatatatatattttaaagaccaatttatgggagaattgcacacagatgtgaaatgaatgtaatctaatagaagcctaatcagcccaccatgttctccactgaaaaatcctctttctttggggtttttctttctttcttttttgattttgcactggacggtgacgtcagccatgtacaggatccacaggggtggtgtcaaatgctattgaaattgtgttgaattgtatgctttttcacttttgataaataaacatgtaaaaatgtttcaaaaaaataataaaataaataaatacgaagaatatgtcaggacagtcactg

SEQ ID NO: 312049 - DNA, 2646 bp, Homo sapiens
tcagtcggtacacaagctgactcttccacggtcaagcaagtggacttttcagaggtggagagagccagattcatcatcaatgactgggtgaagacacacacaaaaggtatgatcagcaacttgcttgggaaaggagccgtggaccagctgacacggctggtgctggtgaatgccctctacttcaacggccagtggaagactcccttccccgactccagcacccaccgccgcctcttccacaaatcagacggcagcactgtctctgtgcccatgatggctcagaccaacaagttcaactatactgagttcaccacgcccgatggccattactacgacatcctggaactgccctaccacggggacaccctcagcatgttcattgctgccccttatgaaaaagaggtgcctctctctgccctcaccaacattctgagtgcccagctcatcagccactggaaaggcaacatgaccaggctgccccgcctcctggttctgcccaagttctccctggagactgaagtcgacctcaggaagcccctagagaacctgggaatgaccgacatgttcagacagtttcaggctgacttcacgagtctttcagaccaagagcctctccacgtcgcgcaggcgctgcagaaagtgaagatcgaggtgaacgagagtggcacggtggcctcctcatccacagctgtcatagtctcagcccgcatggcccccgaggagatcatcatggacagacccttcctctttgtggtccggcacaaccccacaggaacagtccttttcatgggccaagtgatggaaccctgaccctggggaaagacgccttcatctgggacaaaactggagatgcatcgggaaagaagaaactccgaagaaaagaattttagtgttaatgactctttctgaaggaagagaagacatttgccttttgttaaaagatggtaaaccagatctgtctccaagaccttggcctctccttggaggacctttaggtcaaactccctagtctccacctgagaccctgggagagaagtttgaagcacaactcccttaaggtctccaaaccagacggtgacgcctgcgggaccatctggggcacctgcttccacccgtctctctgcccactcgggtctgcagacctggttcccactgaggccctttgcaggatggaactacggggcttacaggagcttttgtgtgcctggtagaaactatttctgttccagtcacattgccatcactcttgtactgcctgccaccgcggaggaggctggtgacaggccaaaggccagtggaagaaacaccctttcatctcagagtccactgtggcactggccacccctccccagtacaggggtgctgcaggtggcagagtgaatgtcccccatcatgtggcccaactctcctggcctggccatctccctccccagaaacagtgtgcatgggttattttggagtgtaggtgacttgtttactcattgaagcagatttctgcttccttttatttttataggaatagaggaagaaaggtcagatgcgtgcccagctcttcaccccccaatctcttggtggggaggggtgtacctaaatatttatcatatccttgcccttgagtgcttgttagagagaaagagaactactaaggaaaataatattatttaaactcgctcctagtgtttctttgtggtctgtgtcaccgtatctcaggaagtccagccacttgactggcacacacccctccggacatccagcgtgacggagcccacactgccaccttgtggccgcctgagaccctcgcgccccccgcgccccccgcgcccctctttttccccttgatggaaattgaccatacaatttcatcctccttcaggggatcaaaaggacggagtggggggacagagactcagatgaggacagagtggtttccaatgtgttcaatagatttaggagcagaaatgcaaggggctgcatgacctaccaggacagaactttccccaattacagggtgactcacagccgcattggtgactcacttcaatgtgtcatttccggctgctgtgtgtgagcagtggacacgtgaggggggggtgggtgagagagacaggcagctcggattcaactaccttagataatatttctgaaaacctaccagccagagggtagggcacaaagatggatgtaatgcactttgggaggccaaggcgggaggattgcttgagcccaggagttcaagaccagcctgggcaacataccaagacccccgtctctttaaaaatatatatattttaaatatacttaaatatatatttctaatatctttaaatatatatatatattttaaagaccaatttatgggagaattgcacacagatgtgaaatgaatgtaatctaatagaagcctaatcagcccaccatgttctccactgaaaaatcctctttctttggggtttttctttctttcttttttgattttgcactggacggtgacgtcagccatgtacaggatccacaggggtggtgtcaaatgctattgaaattgtgttgaattgtatgctttttcacttttgataaataaacatgtaaaaatgtttcaaaaaaataataaaataaataaatacgaagaatatgtcaggacagtcactg

SEQ ID NO: 312050 - DNA, 3110 bp, Homo sapiens
ggggcacagctgtgtttggctgcagggccaagagcgctgtcaagaagacccacacgcccccctccagcagctgaattcctgcagctcagcagccgccgccagagcaggacgaaccgccaatcgcaaggcacctctgagaacttcaggatgcagatgtctccagccctcacctgcctagtcctgggcctggcccttgtctttggtgaagggtctgctgtgcaccatcccccatcctacgtggcccacctggcctcagacttcggggtgagggtgtttcagcaggtggcgcaggcctccaaggaccgcaacgtggttttctcaccctatggggtggcctcggtgttggccatgctccagctgacaacaggaggagaaacccagcagcagattcaagcagctatgggattcaagattgatgacaagggcatggcccccgccctccggcatctgtacaaggagctcatggggccatggaacaaggatgagatcagcaccacagacgcgatcttcgtccagcgggatctgaagctggtccagggcttcatgccccacttcttcaggctgttccggagcacggtcaagcaagtggacttttcagaggtggagagagccagattcatcatcaatgactgggtgaagacacacacaaaaggtatgatcagcaacttgcttgggaaaggagccgtggaccagctgacacggctggtgctggtgaatgccctctacttcaacggccagtggaagactcccttccccgactccagcacccaccgccgcctcttccacaaatcagacggcagcactgtctctgtgcccatgatggctcagaccaacaagttcaactatactgagttcaccacgcccgatggccattactacgacatcctggaactgccctaccacggggacaccctcagcatgttcattgctgccccttatgaaaaagaggtgcctctctctgccctcaccaacattctgagtgcccagctcatcagccactggaaaggcaacatgaccaggctgccccgcctcctggttctgcccaagttctccctggagactgaagtcgacctcaggaagcccctagagaacctgggaatgaccgacatgttcagacagtttcaggctgacttcacgagtctttcagaccaagagcctctccacgtcgcgcaggcgctgcagaaagtgaagatcgaggtgaacgagagtggcacggtggcctcctcatccacagctgtcatagtctcagcccgcatggcccccgaggagatcatcatggacagacccttcctctttgtggtccggcacaaccccacaggaacagtccttttcatgggccaagtgatggaaccctgaccctggggaaagacgccttcatctgggacaaaactggagatgcatcgggaaagaagaaactccgaagaaaagaattttagtgttaatgactctttctgaaggaagagaagacatttgccttttgttaaaagatggtaaaccagatctgtctccaagaccttggcctctccttggaggacctttaggtcaaactccctagtctccacctgagaccctgggagagaagtttgaagcacaactcccttaaggtctccaaaccagacggtgacgcctgcgggaccatctggggcacctgcttccacccgtctctctgcccactcgggtctgcagacctggttcccactgaggccctttgcaggatggaactacggggcttacaggagcttttgtgtgcctggtagaaactatttctgttccagtcacattgccatcactcttgtactgcctgccaccgcggaggaggctggtgacaggccaaaggccagtggaagaaacaccctttcatctcagagtccactgtggcactggccacccctccccaaaacagtgtgcatgggttattttggagtgtaggtgacttgtttactcattgaagcagatttctgcttccttttatttttataggaatagaggaagaaaggtcagatgcgtgcccagctcttcaccccccaatctcttggtggggaggggtgtacctaaatatttatcatatccttgcccttgagtgcttgttagagagaaagagaactactaaggaaaataatattatttaaactcgctcctagtgtttctttgtggtctgtgtcaccgtatctcaggaagtccagccacttgactggcacacacccctccggacatccagcgtgacggagcccacactgccaccttgtggccgcctgagaccctcgcgccccccgcgccccccgcgcccctctttttccccttgatggaaattgaccatacaatttcatcctccttcaggggatcaaaaggacggagtggggggacagagactcagatgaggacagagtggtttccaatgtgttcaatagatttaggagcagaaatgcaaggggctgcatgacctaccaggacagaactttccccaattacagggtgactcacagccgcattggtgactcacttcaatgtgtcatttccggctgctgtgtgtgagcagtggacacgtgaggggggggtgggtgagagagacaggcagctcggattcaactaccttagataatatttctgaaaacctaccagccagagggtagggcacaaagatggatgtaatgcactttgggaggccaaggcgggaggattgcttgagcccaggagttcaagaccagcctgggcaacataccaagacccccgtctctttaaaaatatatatattttaaatatacttaaatatatatttctaatatctttaaatatatatatatattttaaagaccaatttatgggagaattgcacacagatgtgaaatgaatgtaatctaatagaagcctaatcagcccaccatgttctccactgaaaaatcctctttctttggggtttttctttctttcttttttgattttgcactggacggtgacgtcagccatgtacaggatccacaggggtggtgtcaaatgctattgaaattgtgttgaattgtatgctttttcacttttgataaataaacatgtaaaaatgtttcaaaaaaataataaaataaataaatacgaagaatatgtcaggacagtcactg

SEQ ID NO: 312051 - DNA, 2441 bp, Homo sapiens
ggggcacagctgtgtttggctgcagggccaagagcgctgtcaagaagacccacacgcccccctccagcagctgaattcctgcagctcagcagccgccgccagagcaggacgaaccgccaatcgcaaggcacctctgagaacttcaggatgcagatgtctccagccctcacctgcctagtcctgggcctggcccttgtctttggtgaagggtctgctgtgcaccatcccccatcctacgtggcccacctggcctcagacttcggggtgagggtgtttcagcaggtggcgcaggcctccaaggaccgcaacgtggttttctcaccctatggggtggcctcggtgttggccatgctccagctgacaacaggaggagaaacccagcagcagattcaagcagctatgggattcaagattgatgacaagggcatggcccccgccctccggcatctgtacaaggagctcatggggccatggaacaaggatgagatcagcaccacagacgcgatcttcgtccagcgggatctgaagctggtccagggcttcatgccccacttcttcaggctgttccggagcacggtcaagcaagtggacttttcagaggtggagagagccagattcatcatcaatgactgggtgaagacacacacaaaaggtatgatcagcaacttgcttgggaaaggagccgtggaccagctgacacggctggtgctggtgaatgccctctacttcaacggccagtggaagactcccttccccgactccagcacccaccgccgcctcttccacaaatcagacggcagcactgtctctgtgcccatgatggctcagaccaacaagttcaactatactgagttcaccacgcccgatggccattactacgacatcctggaactgccctaccacggggacaccctcagcatgttcattgcctgcagacctggttcccactgaggccctttgcaggatggaactacggggcttacaggagcttttgtgtgcctggtagaaactatttctgttccagtcacattgccatcactcttgtactgcctgccaccgcggaggaggctggtgacaggccaaaggccagtggaagaaacaccctttcatctcagagtccactgtggcactggccacccctccccagtacaggggtgctgcaggtggcagagtgaatgtcccccatcatgtggcccaactctcctggcctggccatctccctccccagaaacagtgtgcatgggttattttggagtgtaggtgacttgtttactcattgaagcagatttctgcttccttttatttttataggaatagaggaagaaaggtcagatgcgtgcccagctcttcaccccccaatctcttggtggggaggggtgtacctaaatatttatcatatccttgcccttgagtgcttgttagagagaaagagaactactaaggaaaataatattatttaaactcgctcctagtgtttctttgtggtctgtgtcaccgtatctcaggaagtccagccacttgactggcacacacccctccggacatccagcgtgacggagcccacactgccaccttgtggccgcctgagaccctcgcgccccccgcgccccccgcgcccctctttttccccttgatggaaattgaccatacaatttcatcctccttcaggggatcaaaaggacggagtggggggacagagactcagatgaggacagagtggtttccaatgtgttcaatagatttaggagcagaaatgcaaggggctgcatgacctaccaggacagaactttccccaattacagggtgactcacagccgcattggtgactcacttcaatgtgtcatttccggctgctgtgtgtgagcagtggacacgtgaggggggggtgggtgagagagacaggcagctcggattcaactaccttagataatatttctgaaaacctaccagccagagggtagggcacaaagatggatgtaatgcactttgggaggccaaggcgggaggattgcttgagcccaggagttcaagaccagcctgggcaacataccaagacccccgtctctttaaaaatatatatattttaaatatacttaaatatatatttctaatatctttaaatatatatatatattttaaagaccaatttatgggagaattgcacacagatgtgaaatgaatgtaatctaatagaagcctaatcagcccaccatgttctccactgaaaaatcctctttctttggggtttttctttctttcttttttgattttgcactggacggtgacgtcagccatgtacaggatccacaggggtggtgtcaaatgctattgaaattgtgttgaattgtatgctttttcacttttgataaataaacatgtaaaaatgtttcaaaaaaataataaaataaataaatacgaagaatatgtcaggacagtcactg

SEQ ID NO: 312052 - DNA, 1884 bp, Homo sapiens
gttttattcattcttgaatttttcctttctaaagagctcttctatttatacatgcctaaattcttttaaaatgtagagggatacctgtctgcataataaagctgatcatgtttttcacctgcaaactgtagcaaaacctctttctgaaggaagagaagacatttgccttttgttaaaagatggtaaaccagatctgtctccaagaccttggcctctccttggaggacctttaggtcaaactccctagtctccacctgagaccctgggagagaagtttgaagcacaactcccttaaggtctccaaaccagacggtgacgcctgcgggaccatctggggcacctgcttccacccgtctctctgcccactcgggtctgcagacctggttcccactgaggccctttgcaggatggaactacggggcttacaggagcttttgtgtgcctggtagaaactatttctgttccagtcacattgccatcactcttgtactgcctgccaccgcggaggaggctggtgacaggccaaaggccagtggaagaaacaccctttcatctcagagtccactgtggcactggccacccctccccagtacaggggtgctgcaggtggcagagtgaatgtcccccatcatgtggcccaactctcctggcctggccatctccctccccagaaacagtgtgcatgggttattttggagtgtaggtgacttgtttactcattgaagcagatttctgcttccttttatttttataggaatagaggaagaaaggtcagatgcgtgcccagctcttcaccccccaatctcttggtggggaggggtgtacctaaatatttatcatatccttgcccttgagtgcttgttagagagaaagagaactactaaggaaaataatattatttaaactcgctcctagtgtttctttgtggtctgtgtcaccgtatctcaggaagtccagccacttgactggcacacacccctccggacatccagcgtgacggagcccacactgccaccttgtggccgcctgagaccctcgcgccccccgcgccccccgcgcccctctttttccccttgatggaaattgaccatacaatttcatcctccttcaggggatcaaaaggacggagtggggggacagagactcagatgaggacagagtggtttccaatgtgttcaatagatttaggagcagaaatgcaaggggctgcatgacctaccaggacagaactttccccaattacagggtgactcacagccgcattggtgactcacttcaatgtgtcatttccggctgctgtgtgtgagcagtggacacgtgaggggggggtgggtgagagagacaggcagctcggattcaactaccttagataatatttctgaaaacctaccagccagagggtagggcacaaagatggatgtaatgcactttgggaggccaaggcgggaggattgcttgagcccaggagttcaagaccagcctgggcaacataccaagacccccgtctctttaaaaatatatatattttaaatatacttaaatatatatttctaatatctttaaatatatatatatattttaaagaccaatttatgggagaattgcacacagatgtgaaatgaatgtaatctaatagaagcctaatcagcccaccatgttctccactgaaaaatcctctttctttggggtttttctttctttcttttttgattttgcactggacggtgacgtcagccatgtacaggatccacaggggtggtgtcaaatgctattgaaattgtgttgaattgtatgctttttcacttttgataaataaacatgtaaaaatgtttcaaaaaaataataaaataaataaatacgaagaatatgtcaggacagtcactg

SEQ ID NO: 312053 - DNA, 2534 bp, Homo sapiens
ggggcacagctgtgtttggctgcagggccaagagcgctgtcaagaagacccacacgcccccctccagcagctgaattcctgcagctcagcagccgccgccagagcaggacgaaccgccaatcgcaaggcacctctgagaacttcaggatgcagatgtctccagccctcacctgcctagtcctgggcctggcccttgtctttggtgaagggtctgctgtgcaccatcccccatcctacgtggcccacctggcctcagacttcggggtgagggtgtttcagcaggtggcgcaggcctccaaggaccgcaacgtggttttctcaccctatggggtggcctcggtgttggccatgctccagctgacaacaggaggagaaacccagcagcagattcaagcagctatgggattcaagattgatgacaagggcatggcccccgccctccggcatctgtacaaggagctcatggggccatggaacaaggatgagatcagcaccacagacgcgatcttcgtccagcgggatctgaagctggtccagggcttcatgccccacttcttcaggctgttccggagcacggtcaagcaagtggacttttcagaggtggagagagccagattcatcatcaatgactgggtgaagacacacacaaaaggtatgatcagcaacttgcttgggaaaggagccgtggaccagctgacacggctggtgctggtgaatgccctctacttcaacggccagtggaagactcccttccccgactccagcacccaccgccgcctcttccacaaatcagacggcagcactgtctctgtgcccatgatggctcagaccaacaagttcaactatactgagttcaccacgcccgatggccattactacgacatcctggaactgccctaccacggggacaccctcagcatgttcattgctgccccttatgaaaaagaggtgcctctctctgccctcaccaacattctgagtgcccagctcatcagccactggaaaggcaacatgaccaggctgccccgcctcctggttctgcccaagttctccctggagactgaagtcgacctcaggaagcccctagagaacctgggaatgaccgacatgttcagacagtttcaggctgacttcacgagtctttcagaccaagagcctctccacgtcgcgcaggcgctgcagaaagtgaagatcgaggtgaacgagagtggcacggtggcctcctcatccacagctgtcatagtctcagcccgcatggcccccgaggagatcatcatggacagacccttcctctttgtggcctggccatctccctccccagaaacagtgtgcatgggttattttggagtgtaggtgacttgtttactcattgaagcagatttctgcttccttttatttttataggaatagaggaagaaaggtcagatgcgtgcccagctcttcaccccccaatctcttggtggggaggggtgtacctaaatatttatcatatccttgcccttgagtgcttgttagagagaaagagaactactaaggaaaataatattatttaaactcgctcctagtgtttctttgtggtctgtgtcaccgtatctcaggaagtccagccacttgactggcacacacccctccggacatccagcgtgacggagcccacactgccaccttgtggccgcctgagaccctcgcgccccccgcgccccccgcgcccctctttttccccttgatggaaattgaccatacaatttcatcctccttcaggggatcaaaaggacggagtggggggacagagactcagatgaggacagagtggtttccaatgtgttcaatagatttaggagcagaaatgcaaggggctgcatgacctaccaggacagaactttccccaattacagggtgactcacagccgcattggtgactcacttcaatgtgtcatttccggctgctgtgtgtgagcagtggacacgtgaggggggggtgggtgagagagacaggcagctcggattcaactaccttagataatatttctgaaaacctaccagccagagggtagggcacaaagatggatgtaatgcactttgggaggccaaggcgggaggattgcttgagcccaggagttcaagaccagcctgggcaacataccaagacccccgtctctttaaaaatatatatattttaaatatacttaaatatatatttctaatatctttaaatatatatatatattttaaagaccaatttatgggagaattgcacacagatgtgaaatgaatgtaatctaatagaagcctaatcagcccaccatgttctccactgaaaaatcctctttctttggggtttttctttctttcttttttgattttgcactggacggtgacgtcagccatgtacaggatccacaggggtggtgtcaaatgctattgaaattgtgttgaattgtatgctttttcacttttgataaataaacatgtaaaaatgtttcaaaaaaataataaaataaataaatacgaagaatatgtcaggacagtcactg

SEQ ID NO: 312054 - DNA, 2888 bp, Homo sapiens
ggggcacagctgtgtttggctgcagggccaagagcgctgtcaagaagacccacacgcccccctccagcagctgaattcctgcagctcagcagccgccgccagagcaggacgaaccgccaatcgcaaggcacctctgagaacttcaggatgcagatgtctccagccctcacctgcctagtcctgggcctggcccttgtctttggtgaagggtctgctgtgcaccatcccccatcctacgtggcccacctggcctcagacttcggggtgagggtgtttcagcaggtggcgcaggcctccaaggaccgcaacgtggttttctcaccctatggggtggcctcggtgttggccatgctccagctgacaacaggaggagaaacccagcagcagattcaagcagctatgggattcaagattgatgacaagggcatggcccccgccctccggcatctgtacaaggagctcatggggccatggaacaaggatgagatcagcaccacagacgcgatcttcgtccagcgggatctgaagctggtccagggcttcatgccccacttcttcaggctgttccggagcacggtcaagcaagtggacttttcagaggtggagagagccagattcatcatcaatgactgggtgaagacacacacaaaaggtatgatcagcaacttgcttgggaaaggagccgtggaccagctgacacggctggtgctggtgaatgccctctacttcaacggccagtggaagactcccttccccgactccagcacccaccgccgcctcttccacaaatcagacggcagcactgtctctgtgcccatgatggctcagaccaacaagttcaactatactgagttcaccacgcccgatggccattactacgacatcctggaactgccctaccacggggacaccctcagcatgttcattgctgccccttatgaaaaagaggtgcctctctctgccctcaccaacattctgagtgcccagctcatcagccactggaaaggcaacatgaccaggctgccccgcctcctggttctgcccaagttctccctggagactgaagtcgacctcaggaagcccctagagaacctgggaatgaccgacatgttcagacagtttcaggctgacttcacgagtctttcagaccaagagcctctccacgtcgcgcaggcgctgcagaaagtgaagatcgaggtgaacgagagtggcacggtggcctcctcatccacagctgtcatagtctcagcccgcatggcccccgaggagatcatcatggacagacccttcctctttgtggtccggcacaaccccacaggaacagtccttttcatgggccaagtgatggaaccctgaccctggggaaagacgccttcatctgggacaaaactggagatgcatcgggaaagaagaaactccgaagaaaagaattttagtgttaatgactctttctgaaggaagagaagacatttgccttttgttaaaagatggtaaaccagatctgtctccaagaccttggcctctccttggaggacctttaggtcaaactccctagtctccacctgagaccctgggagagaagtttgaagcacaactcccttaaggtctccaaaccagacggtgacgcctgcgggaccatctggggcacctgcttccacccgtctctctgcccactcgggtctgcagacctggttcccactgaggccctttgcaggatggaactacggggcttacaggagcttttgtgtgcctggtagaaactatttctgttccagtcacattgccatcactcttgtactgcctgccaccgcggaggaggctggtgacaggccaaaggccagtggaagaaacaccctttcatctcagagtccactgtggcactggccacccctccccagtacaggggtgctgcaggtggcagagtgaatgtcccccatcatgtggcccaactctcctggcctggccatctccctccccagaaacagtgtgcatgggttattttggagtgtaggtgacttgtttactcattgaagcagatttctgcttccttttatttttataggaatagaggaagaaaggtcagatgcgtgcccagctcttcaccccccaatctcttggtggggaggggtgtacctaaatatttatcatatccttgcccttgagtgcttgttagagagaaagagaactactaaggaaaataatattatttaaactaaaaaaaaaaaaaaaaaacaaaacaaaaaaaaaaaaaaaaaaaaaaaaaaacgagcacagagaggacaaacgacaaaaaacaaaacacaacaacaaaacgggggggggcggggggccgcgcgaggaaacccggggggcggcgacccagacaggatagaaaaaagtaaagagaggcgagggtctgatcaacacaacaaaaaaacaaggcagaggccgagaacaagcgggtagtcgaccaacacaacaaataagaaggagcgcaggcgcgatcagaggtatatatagaaaaacacgatagctagcgggggagcaactcgatctcaacatacgttgcaacagcaagggcgacggagcgaagttaataaaataaagctccaccgcgcgtgataagacacaacgggagcgaagaccgacggcgacgagaaacgaacgagaacgggcgagagaagaagggtcgagcctgggacgcgcaagactgacgaatgagcgagacgacgggacgcaccgcgagagagcgaaaggacacgagaaacagcggaaggtacaggcaggagcacagcgaaagacagaagcgacacaagcggaagagagagaggacatgaaaggacagagagagaagacgggtgacgaagcagacgcagaagagagacagaaagaaaaccaaaaatgggcgt

SEQ ID NO: 312055 - DNA, 1427 bp, Homo sapiens
tcgacccacgcgtcggcctgccaccgcggaggcaggcagtacaagagtgatggcaatgtgactggccaaaggccagtggaagaaacaccctttcatctcagagtccactgtggcactggccacccctccccagtacaggggtgctgcaggtggcagagtgaatgtcccccatcatgtggcccaactctcctggcctggccatctccctccccagaaacagtgtgcatgggttattttggagtgtaggtgacttgtttactcattgaagcagatttctgcttccttttatttttataggaatagaggaagaaaggtcagatgcgtgcccagctcttcaccccccaatctcttggtggggaggggtgtacctaaatatttatcatatccttgcccttgagtgcttgttagagagaaagagaactactaaggaaaataatattatttaaactcgctcctagtgtttctttgtggtctgtgtcaccgtatctcaggaagtccagccacttgactggcacacacccctccggacatccagcgtgacggagcccacactgccaccttgtggccgcctgagaccctcgcgccccccgcgccccccgcgcccctctttttccccttgatggaaattgaccatacaatttcatcctccttcaggggatcaaaaggacggagtggggggacagagactcagatgaggacagagtggtttccaatgtgttcaatagatttaggagcagaaatgcaaggggctgcatgacctaccaggacagaactttccccaattacagggtgactcacagccgcattggtgactcacttcaatgtgtcatttccggctgctgtgtgtgagcagtggacacgtgaggggggggtgggtgagagagacaggcagctcggattcaactaccttagataatatttctgaaaacctaccagccagagggtagggcacaaagatggatgtaatgcactttgggaggccaaggcgggaggattgcttgagcccaggagttcaagaccagcctgggcaacataccaagacccccgtctctttaaaaatatatatattttaaatatacttaaatatatatttctaatatctttaaatatatatatatattttaaagaccaatttatgggagaattgcacacagatgtgaaatgaatgtaatctaatagaagcctaatcagcccaccatgttctccactgaaaaatcctctttctttggggtttttctttctttcttttttgattttgcactggacggtgacgtcagccatgtacaggatccacaggggtggtgtcaaatgctattgaaattgtgttgaattgtatgctttttcacttttgataaataaacatgtaaaaatgtttcaaaaaaataataaaataaataaatacgaagaatatgtcaggacagtcactg

SEQ ID NO: 312056 - DNA, 1573 bp, Homo sapiens
ggggcacagctgtgtttggctgcagggccaagagcgctgtcaagaagacccacacgcccccctccagcagctgaattcctgcagctcagcagccgccgccagagcaggacgaaccgccaatcgcaaggcacctctgagaacttcaggatgcagatgtctccagccctcacctgcctagtcctgggcctggcccttgtctttggtgaagggtctgctgtgcaccatcccccatcctacgtggcccacctggcctcagacttcggggtgagggtgtttcagcaggtggcgcaggcctccaaggaccgcaacgtggttttctcaccctatggggtggcctcggtgttggccatgctccagctgacaacaggaggagaaacccagcagcagattcaagcagctatgggattcaagattgatgacaagggcatggcccccgccctccggcatctgtacaaggagctcatggggccatggaacaaggatgagatcagcaccacagacgcgatcttcgtccagcgggatctgaagctggtccagggcttcatgccccacttcttcaggctgttccggagcacggtcaagcaagtggacttttcagaggtggagagagccagattcatcatcaatgactgggtgaagacacacacaaaaggtatgatcagcaacttgcttgggaaaggagccgtggaccagctgacacggctggtgctggtgaatgccctctacttcaacggccagtggaagactcccttccccgactccagcacccaccgccgcctcttccacaaatcagacggcagcactgtctctgtgcccatgatggctcagaccaacaagttcaactatactgagttcaccacgcccgatggccattactacgacatcctggaactgccctaccacggggacaccctcagcatgttcattgctgccccttatgaaaaagaggtgcctctctctgccctcaccaacattctgagtgcccagctcatcagccactggaaaggcaacatgaccaggctgccccgcctcctggttctgcccaagttctccctggagactgaagtcgacctcaggaagcccctagagaacctgggaatgaccgacatgttcagacagtttcaggctgacttcacgagtctttcagaccaagagcctctccacgtcgcgcaggcgctgcagaaagtgaagatcgaggtgaacgagagtggcacggtggcctcctcatccacagctgtcatagtctcagcccgcatggcccccgaggagatcatcatggacagacccttcctctttgtggtccggcacaaccccacaggtgagcctggaacccatcaccgttccacatcctcccacccattctttctctcaggaactagtcccgacagatgcagacatccctctatccctgagagggctctgggcagggaacccataaccctaccctgcttcctgtcccaagaggaggctaccttctatcacccacagacagtgccgggtccccgctctgtgactcaggcagctgcgactccagacagctcactcatctgcctagatctcagtccttccaccc

SEQ ID NO: 312057 - DNA, 1296 bp, Homo sapiens
ggggcacagctgtgtttggctgcagggccaagagcgctgtcaagaagacccacacgcccccctccagcagctgaattcctgcagctcagcagccgccgccagagcaggacgaaccgccaatcgcaaggcacctctgagaacttcaggatgcagatgtctccagccctcacctgcctagtcctgggcctggcccttgtctttggtgaagggtctgctgtgcaccatcccccatcctacgtggcccacctggcctcagacttcggggtgagggtgtttcagcaggtggcgcaggcctccaaggaccgcaacgtggttttctcaccctatggggtggcctcggtgttggccatgctccagctgacaacaggaggagaaacccagcagcagattcaagcagctatgggattcaagattgatgacaagggcatggcccccgccctccggcatctgtacaaggagctcatggggccatggaacaaggatgagatcagcaccacagacgcgatcttcgtccagcgggatctgaagctggtccagggcttcatgccccacttcttcaggctgttccggagcacggtcaagcaagtggacttttcagaggtggagagagccagattcatcatcaatgactgggtgaagacacacacaaaaggtatgatcagcaacttgcttgggaaaggagccgtggaccagctgacacggctggtgctggtgaatgccctctacttcaacggccagtggaagactcccttccccgactccagcacccaccgccgcctcttccacaaatcagacggcagcactgtctctgtgcccatgatggctcagaccaacaagttcaactatactgagttcaccacgcccgatggccattactacgacatcctggaactgccctaccacggggacaccctcagcatgttcattgctgccccttatgaaaaagaggtgcctctctctgccctcaccaacattctgagtgcccagctcatcagccactggaaaggcaacatgaccaggctgccccgcctcctggttctgcccaagttctccctggagactgaagtcgacctcaggaagcccctagagaacctgggaatgaccgacatgttcagacagtttcaggctgacttcacgagtctttcagaccaagagcctctccacgtcgcgcaggcgctgcagaaagtgaagatcgaggtgaacgagagtggcacggtggcctcctcatccacagctgtcatagtctcagccccattgccccagaggtatttctgcacgatgggatcctctagaaca

SEQ ID NO: 312058 - DNA, 1528 bp, Homo sapiens
ggggcacagctgtgtttggctgcagggccaagagcgctgtcaagaagacccacacgcccccctccagcagctgaattcctgcagctcagcagccgccgccagagcaggacgaaccgccaatcgcaaggcacctctgagaacttcaggatgcagatgtctccagccctcacctgcctagtcctgggcctggcccttgtctttggtgaagggtctgctgtgcaccatcccccatcctacgtggcccacctggcctcagacttcggggtgagggtgtttcagcaggtggcgcaggcctccaaggaccgcaacgtggttttctcaccctatggggtggcctcggtgttggccatgctccagctgacaacaggaggagaaacccagcagcagattcaagcagctatgggattcaagattgatgacaagggcatggcccccgccctccggcatctgtacaaggagctcatggggccatggaacaaggatgagatcagcaccacagacgcgatcttcgtccagcgggatctgaagctggtccagggcttcatgccccacttcttcaggctgttccggagcacggtcaagcaagtggacttttcagaggtggagagagccagattcatcatcaatgactgggtgaagacacacacaaaaggtatgatcagcaacttgcttgggaaaggagccgtggaccagctgacacggctggtgctggtgaatgccctctacttcaacggccagtggaagactcccttccccgactccagcacccaccgccgcctcttccacaaatcagacggcagcactgtctctgtgcccatgatggctcagaccaacaagttcaactatactgagttcaccacgcccgatggccattactacgacatcctggaactgccctaccacggggacaccctcagcatgttcattgctgccccttatgaaaaagaggtgcctctctctgccctcaccaacattctgagtgcccagctcatcagccactggaaaggcaacatgaccaggctgccccgcctcctggttctgcccaagttctccctggagactgaagtcgacctcaggaagcccctagagaacctgggaatgaccgacatgttcagacagtttcaggctgacttcacgagtctttcagaccaagagcctctccacgtcgcgcaggcgctgcagaaagtgaagatcgaggtgaacgagagtggcacggtggcctcctcatccacaggtgagtctggctcaggtgaggctccacgggtgtcgcctccatcgcccttcaggataactggtccccagacccggaaaggaccccgcagccctctcggcacagagcagctctgtctgtgctcagccatcacccactccccacctgtttctcagcctggaaaacgggcttgggaccatggaaccctgtttcctcgcctgatggctcctaagttccctgactgtgaaaaggcctcctaaagaaaaacccaagttgttcccacagtgggaagtaaacttaagaaacatgcttatcagg

SEQ ID NO: 312059 - DNA, 1361 bp, Homo sapiens
ggggcacagctgtgtttggctgcagggccaagagcgctgtcaagaagacccacacgcccccctccagcagctgaattcctgcagctcagcagccgccgccagagcaggacgaaccgccaatcgcaaggcacctctgagaacttcaggatgcagatgtctccagccctcacctgcctagtcctgggcctggcccttgtctttggtgaagggtctgctgtgcaccatcccccatcctacgtggcccacctggcctcagacttcggggtgagggtgtttcagcaggtggcgcaggcctccaaggaccgcaacgtggttttctcaccctatggggtggcctcggtgttggccatgctccagctgacaacaggaggagaaacccagcagcagattcaagcagctatgggattcaagattgatgacaagggcatggcccccgccctccggcatctgtacaaggagctcatggggccatggaacaaggatgagatcagcaccacagacgcgatcttcgtccagcgggatctgaagctggtccagggcttcatgccccacttcttcaggctgttccggagcacggtcaagcaagtggacttttcagaggtggagagagccagattcatcatcaatgactgggtgaagacacacacaaaaggtatgatcagcaacttgcttgggaaaggagccgtggaccagctgacacggctggtgctggtgaatgccctctacttcaacggccagtggaagactcccttccccgactccagcacccaccgccgcctcttccacaaatcagacggcagcactgtctctgtgcccatgatggctcagaccaacaagttcaactatactgagttcaccacgcccgatggccattactacgacatcctggaactgccctaccacggggacaccctcagcatgttcattgctgccccttatgaaaaagaggtgcctctctctgccctcaccaacattctgagtgcccagctcatcagccactggaaaggcaacatgaccaggctgccccgcctcctggttctgcccaagtaagccaccccgctatctccccgacctaccaacccctctctcctggctccctaaagtcaccgcccccaggttgaatttcccagatctgtgatgcttgcaggacatgcatgtgtgggaggctgatgggaaactgtggcctgggtttgattatgagtcttgcaatcatccctccccctgtttctgctggagggcaggggacagctcttcctgaccacacccccacattgactatccccagaatacccagcaaaagcccccttagggtcgccccatcagcacttccatccccaaccctttcaagtcaacatccaaac

SEQ ID NO: 312060 - DNA, 1718 bp, Homo sapiens
ggggcacagctgtgtttggctgcagggccaagagcgctgtcaagaagacccacacgcccccctccagcagctgaattcctgcagctcagcagccgccgccagagcaggacgaaccgccaatcgcaaggcacctctgagaacttcaggatgcagatgtctccagccctcacctgcctagtcctgggcctggcccttgtctttggtgaagggtctgctgtgcaccatcccccatcctacgtggcccacctggcctcagacttcggggtgagggtgtttcagcaggtggcgcaggcctccaaggaccgcaacgtggttttctcaccctatggggtggcctcggtgttggccatgctccagctgacaacaggaggagaaacccagcagcagattcaagcagctatgggattcaagattgatgacaagggcatggcccccgccctccggcatctgtacaaggagctcatggggccatggaacaaggatgagatcagcaccacagacgcgatcttcgtccagcgggatctgaagctggtccagggcttcatgccccacttcttcaggctgttccggagcacggtcaagcaagtggacttttcagaggtggagagagccagattcatcatcaatgactgggtgaagacacacacaaaaggtatgatcagcaacttgcttgggaaaggagccgtggaccagctgacacggctggtgctggtgaatgccctctacttcaacggccagtggaagactcccttccccgactccagcacccaccgccgcctcttccacaaatcagacggcagcactgtctctgtgcccatgatggctcagaccaacaagttcaactatagtaagtccaagagccccttccccacagcccacagcaactgcatctcattcctggggtctcccaaggaatacccaaaatgtcaccctctgagggaggaagaccacagggaatgctcccctttaagggaggagagaccctagaatatactccagctttgacaaagatttcccaagcaggagacatcaggataatgggaacagaagacaggaggtttatcccatgaaggatgaagaagctgaaatccagagattccctcagggccacatttgtccacctgactccagggtctcatcttcgtgtgttgctagtgtgattacctggggatgagaaatcctgctgggggagttgaggttaagaggatgaggactccaggtgctgtggctcacgcctgtaatcccagcactttgggaggccaaggcaggtggatcaggagtttgaggtcaggagtttgagaccagcctggccaacatggtgaaaccctgtctctactaaaaatgcaaaaattagccaggtgtggtggcaggcgcctgtaatcccagctactcgggaggctgaggcaggagaatcacttgagcccgggaggtggaggttgcagtgagccgaacgaaattgagccacttcaccccagcctgggcaaaagagtgaaattcccattcaaaaaaaaaaaaaaaaaaaaaggatgaggactgggatgaactggtggctgggtgtggggaaaatggaagtgaaggaaggccaaaagagacagagaaggcctggcgcggcgactcacgcctataatcccagcactttgggaggctgagaagggggattgcttgaggccagaagttgaataccagtctgggcagcatagcaagccctgcctctacaa

SEQ ID NO: 312061 - DNA, 519 bp, Homo sapiens
agccatacctgaaagtattatagagagtgtgtgtatgtgtgtctgtgtgtgtgtgtgtgtctgtgtgtgtgttagagagagagagagtgccccttatgaaaaagaggtgcctctctctgccctcaccaacattctgagtgcccagctcatcagccactggaaaggcaacatgaccaggctgccccgcctcctggttctgcccaagtaagccaccccgctatctccccgacctaccaacccctctctcctggctccctaaagtcaccgcccccaggttgaatttcccagatctgtgatgcttgcaggacatgcatgtgtgggaggctgatgggaaactgtggcctgggtttgattatgagtcttgcaatcatccctccccctgtttctgctggagggcaggggacagctcttcctgaccacacccccacattgactatccccagaatacccagcaaaagcccccttagggtcgccccatcagcacttccatccccaaccctttcaagtcaacatccaaac

SEQ ID NO: 312062 - DNA, 229 bp, Homo sapiens
ggtttgattatgagtcttgcaatcatccctccccctgtttctgctggagggcaggggacagctcttcctgaccacacccccacattgactatccccagaatacccagcaaaagcccccaaaaggagagtcagagaaatgagggaggtgggggcccaatcagtccacatctacttagggtcgccccatcagcacttccatccccaaccctttcaagtcaacatccaaaca

SEQ ID NO: 312063 - DNA, 221 bp, Homo sapiens
gttctccctggagactgaagtcgacctcaggaagcccctagagaacctgggaatgaccgacatgttcagacagtttcaggctgacttcacgagtctttcaggtaagaagactttcctttgcattttctcaccccagtggactgcgggggcccctaagaggaaaaaggaacctctccttgagagcggcagctgatctaatcctgtatccacatctgtttcag

SEQ ID NO: 312064 - DNA, 489 bp, Homo sapiens
tggttcttccaccctcaggaacagtccttttcatgggccaagtgatggaaccctgaccctggggaaagacgccttcatctgggacaaaactggagatgcatcgggaaagaagaaactccgaagaaaagaattttagtgttaatgactctttctgaaggaagagaagacatttgccttttgttaaaagatggtaaaccagatctgtctccaagaccttggcctctccttggaggacctttaggtcaaactccctagtctccacctgagaccctgggagagaagtttgaagcacaactcccttaaggtctccaaaccagacggtgacgcctgcgggaccatctggggcacctgcttccacccgtctctctgcccactcgggtctgcagacctggttcccactgaggccctttgcaggatggaactacggggcttacaggagcttttgtgtgcctggtagaaactatttctgttccagtcacattgccatca

SEQ ID NO: 312065 - DNA, 858 bp, Homo sapiens
ggggcacagctgtgtttggctgcagggccaagagcgctgtcaagaagacccacacgcccccctccagcagctgaattcctgcagctcagcagccgccgccagagcaggacgaaccgccaatcgcaaggcacctctgagaacttcaggtaggagaaaagcaaactccctccaacctcttacttcgggcttaaggcagagaactcgcctccccagaatctcctccctccatgatcccccgctattcctctattttcttttcctcggacctgcagccttgggtcgaccctgccctaggggtgactgcaggagagcagggaggatggtcaggcgtcaccaacaaccccatcacccagtaacaagaaccttgactctctcagtccctctgcatcaagacacttacccatttcccacctcatgcctgctaacttgaatgaaacaatcgctgggaaagcattaagagaattaaggctgggcactgtggctcatgcctgtaatcccagcactttgtgaggctgaggcaggcagataacttgagcccaggagtttgagaccagcctgggcaacatggcaaaaccctgctctcccaaaaaaatacaaaaattagctgggcgtgctggtgtgcctgtattcccagctacttgggaggctgaggtgggaggattgcttcagctggggaggcggaggctgcagggagccaagactgagccattgcacccagcctgggtgacagagcaagaccctgtctctaaaaatgaatgaaaggaaggaagaaagagagagaaagagagagaggaaagaaggaaggaagtaaagaagaaagaaagaaagaaagaggaaagaggaagaaagaaagaaaag

SEQ ID NO: 312066 - DNA, 745 bp, Homo sapiens
gaacagagaaaaatattctagcccaaagaaagggttgggatctgagacttttgaagaaaggaaggagatacagaaaagagatttcatcctggaatgaaatctccctccagagagccctgggaaagcacggtagcccccatccatcagagtggagccccttgtgggggaagtgggctcggctgggaaccctcaattcagcataagcctcacatgtcctctcctctctgtcccggtgcagacaagggcatggcccccgccctccggcatctgtacaaggagctcatggggccatggaacaaggatgagatcagcaccacagacgcgatcttcgtccagcgggatctgaagctggtccagggcttcatgccccacttcttcaggctgttccggagcacggtcaagcaagtggacttttcagaggtggagagagccagattcatcatcaatgactgggtgaagacacacacaaaaggtgagcaggcagggaaaggaaacccatttcctgggcctcaagagaaagggaatttggaaataaatccacatatcccagttgggtgcagtagttcacacctgtaatcccagcccaacactttgggaggtctaggcgagaggaaggcttgaggcctggagtttgagaccagcctggccaacataacaagacctcatctcttcaaaaaatttaaaaaccagccgggcatggtggtgcacacctgtagtcccagctacttgggaggctgaggtggga

SEQ ID NO: 312067 - DNA, 3157 bp, Homo sapiens
tcctgctgcattcctcctgctgcttcctcctgctgctgaattcctgcagctcagcagccgccgccagagcaggacgaaccgccaatcgcaaggcacctctgagaacttcaggatgcagatgtctccagccctcacctgcctagtcctgggcctggcccttgtctttggtgaagggtctgctgtgcaccatcccccatcctacgtggcccacctggcctcagacttcggggtgagggtgtttcagcaggtggcgcaggcctccaaggaccgcaacgtggttttctcaccctatggggtggcctcggtgttggccatgctccagctgacaacaggaggagaaacccagcagcagattcaagcagctatgggattcaagattgatgacaagggcatggcccccgccctccggcatctgtacaaggagctcatggggccatggaacaaggatgagatcagcaccacagacgcgatcttcgtccagcgggatctgaagctggtccagggcttcatgccccacttcttcaggctgttccggagcacggtcaagcaagtggacttttcagaggtggagagagccagattcatcatcaatgactgggtgaagacacacacaaaaggtatgatcagcaacttgcttgggaaaggagccgtggaccagctgacacggctggtgctggtgaatgccctctacttcaacggccagtggaagactcccttccccgactccagcacccaccgccgcctcttccacaaatcagacggcagcactgtctctgtgcccatgatggctcagaccaacaagttcaactatactgagttcaccacgcccgatggccattactacgacatcctggaactgccctaccacggggacaccctcagcatgttcattgctgccccttatgaaaaagaggtgcctctctctgccctcaccaacattctgagtgcccagctcatcagccactggaaaggcaacatgaccaggctgccccgcctcctggttctgcccaagttctccctggagactgaagtcgacctcaggaagcccctagagaacctgggaatgaccgacatgttcagacagtttcaggctgacttcacgagtctttcagaccaagagcctctccacgtcgcgcaggcgctgcagaaagtgaagatcgaggtgaacgagagtggcacggtggcctcctcatccacagctgtcatagtctcagcccgcatggcccccgaggagatcatcatggacagacccttcctctttgtggtccggcacaaccccacaggaacagtccttttcatgggccaagtgatggaaccctgaccctggggaaagacgccttcatctgggacaaaactggagatgcatcgggaaagaagaaactccgaagaaaagaattttagtgttaatgactctttctgaaggaagagaagacatttgccttttgttaaaagatggtaaaccagatctgtctccaagaccttggcctctccttggaggacctttaggtcaaactccctagtctccacctgagaccctgggagagaagtttgaagcacaactcccttaaggtctccaaaccagacggtgacgcctgcgggaccatctggggcacctgcttccacccgtctctctgcccactcgggtctgcagacctggttcccactgaggccctttgcaggatggaactacggggcttacaggagcttttgtgtgcctggtagaaactatttctgttccagtcacattgccatcactcttgtactgcctgccaccgcggaggaggctggtgacaggccaaaggccagtggaagaaacaccctttcatctcagagtccactgtggcactggccacccctccccagtacaggggtgctgcaggtggcagagtgaatgtcccccatcatgtggcccaactctcctggcctggccatctccctccccagaaacagtgtgcatgggttattttggagtgtaggtgacttgtttactcattgaagcagatttctgcttccttttatttttataggaatagaggaagaaaggtcagatgcgtgcccagctcttcaccccccaatctcttggtggggaggggtgtacctaaatatttatcatatccttgcccttgagtgcttgttagagagaaagagaactactaaggaaaataatattatttaaactcgctcctagtgtttctttgtggtctgtgtcaccgtatctcaggaagtccagccacttgactggcacacacccctccggacatccagcgtgacggagcccacactgccaccttgtggccgcctgagaccctcgcgccccccgcgccccccgcgcccctctttttccccttgatggaaattgaccatacaatttcatcctccttcaggggatcaaaaggacggagtggggggacagagactcagatgaggacagagtggtttccaatgtgttcaatagatttaggagcagaaatgcaaggggctgcatgacctaccaggacagaactttccccaattacagggtgactcacagccgcattggtgactcacttcaatgtgtcatttccggctgctgtgtgtgagcagtggacacgtgaggggggggtgggtgagagagacaggcagctcggattcaactaccttagataatatttctgaaaacctaccagccagagggtagggcacaaagatggatgtaatgcactttgggaggccaaggcgggaggattgcttgagcccaggagttcaagaccagcctgggcaacataccaagacccccgtctctttaaaaatatatatattttaaatatacttaaatatatatttctaatatctttaaatatatatatatattttaaagaccaatttatgggagaattgcacacagatgtgaaatgaatgtaatctaatagaagcctaatcagcccaccatgttctccactgaaaaatcctctttctttggggtttttctttctttcttttttgattttgcactggacggtgacgtcagccatgtacaggatccacaggggtggtgtcaaatgctattgaaattgtgttgaattgtatgctttttcacttttgataaataaacatgtaaaaatgtttcaaaaaaataataaaataaataaatacgaagaatatgtcaggacagtcactg

SEQ ID NO: 312068 - DNA, 3139 bp, Homo sapiens
ggggcacagctgtgtttggctgcagggccaagagcgctgtcaagaagacccacacgcccccctccagcagctgaattcctgcagctcagcagccgccgccagagcaggacgaaccgccaatcgcaaggcacctctgagaacttcaggatgcagatgtctccagccctcacctgcctagtcctgggcctggcccttgtctttggtgaagggtctgctgtgcaccatcccccatcctacgtggcccacctggcctcagacttcggggtgagggtgtttcagcaggtggcgcaggcctccaaggaccgcaacgtggttttctcaccctatggggtggcctcggtgttggccatgctccagctgacaacaggaggagaaacccagcagcagattcaagcagctatgggattcaagattgatgacaagggcatggcccccgccctccggcatctgtacaaggagctcatggggccatggaacaaggatgagatcagcaccacagacgcgatcttcgtccagcgggatctgaagctggtccagggcttcatgccccacttcttcaggctgttccggagcacggtcaagcaagtggacttttcagaggtggagagagccagattcatcatcaatgactgggtgaagacacacacaaaaggtatgatcagcaacttgcttgggaaaggagccgtggaccagctgacacggctggtgctggtgaatgccctctacttcaacggccagtggaagactcccttccccgactccagcacccaccgccgcctcttccacaaatcagacggcagcactgtctctgtgcccatgatggctcagaccaacaagttcaactatactgagttcaccacgcccgatggccattactacgacatcctggaactgccctaccacggggacaccctcagcatgttcattgctgccccttatgaaaaagaggtgcctctctctgccctcaccaacattctgagtgcccagctcatcagccactggaaaggcaacatgaccaggctgccccgcctcctggttctgcccaagttctccctggagactgaagtcgacctcaggaagcccctagagaacctgggaatgaccgacatgttcagacagtttcaggctgacttcacgagtctttcagaccaagagcctctccacgtcgcgcaggcgctgcagaaagtgaagatcgaggtgaacgagagtggcacggtggcctcctcatccacagctgtcatagtctcagcccgcatggcccccgaggagatcatcatggacagacccttcctctttgtggtccggcacaaccccacaggaacagtccttttcatgggccaagtgatggaaccctgaccctggggaaagacgccttcatctgggacaaaactggagatgcatcgggaaagaagaaactccgaagaaaagaattttagtgttaatgactctttctgaaggaagagaagacatttgccttttgttctttaggtcaaactccctagtctccacctgagaccctgggagagaagtttgaagcacaactcccttaaggtctccaaaccagacggtgacgcctgcgggaccatctggggcacctgcttccacccgtctctctgcccactcgggtctgcagacctggttcccactgaggccctttgcaggatggaactacggggcttacaggagcttttgtgtgcctggtagaaactatttctgttccagtcacattgccatcactcttgtactgcctgccaccgcggaggaggctggtgacaggccaaaggccagtggaagaaacaccctttcatctcagagtccactgtggcactggccacccctccccagtacaggggtgctgcaggtggcagagtgaatgtcccccatcatgtggcccaactctcctggcctggccatctccctccccagaaacagtgtgcatgggttattttggagtgtaggtgacttgtttactcattgaagcagatttctgcttccttttatttttataggaatagaggaagaaaggtcagatgcgtgcccagctcttcaccccccaatctcttggtggggaggggtgtacctaaatatttatcatatccttgcccttgagtgcttgttagagagaaagagaactactaaggaaaataatattatttaaactcgctcctagtgtttctttgtggtctgtgtcaccgtatctcaggaagtccagccacttgactggcacacacccctccggacatccagcgtgacggagcccacactgccaccttgtggccgcctgagaccctcgcgccccccgcgccccccgcgcccctctttttccccttgatggaaattgaccatacaatttcatcctccttcaggggatcaaaaggacggagtggggggacagagactcagatgaggacagagtggtttccaatgtgttcaatagatttaggagcagaaatgcaaggggctgcatgacctaccaggacagaactttccccaattacagggtgactcacagccgcattggtgactcacttcaatgtgtcatttccggctgctgtgtgtgagcagtggacacgtgaggggggggtgggtgagagagacaggcagctcggattcaactaccttagataatatttctgaaaacctaccagccagagggtagggcacaaagatggatgtaatgcactttgggaggccaaggcgggaggattgcttgagcccaggagttcaagaccagcctgggcaacataccaagacccccgtctctttaaaaatatatatattttaaatatacttaaatatatatttctaatatctttaaatatatatatatattttaaagaccaatttatgggagaattgcacacagatgtgaaatgaatgtaatctaatagaagcctaatcagcccaccatgttctccactgaaaaatcctctttctttggggtttttctttctttcttttttgattttgcactggacggtgacgtcagccatgtacaggatccacaggggtggtgtcaaatgctattgaaattgtgttgaattgtatgctttttcacttttgataaataaacatgtaaaaatgtttcaaaaaaataataaaataaataaatacgaagaatatgtcaggacagtcactg

SEQ ID NO: 312069 - DNA, 2802 bp, Homo sapiens
tacatatacgacttgagttagtacctgaacaagggcatggcccccgccctccggcatctgtacaaggagctcatggggccatggaacaaggatgagatcagcaccacagacgcgatcttcgtccagcgggatctgaagctggtccagggcttcatgccccacttcttcaggctgttccggagcacggtcaagcaagtggacttttcagaggtggagagagccagattcatcatcaatgactgggtgaagacacacacaaaaggtatgatcagcaacttgcttgggaaaggagccgtggaccagctgacacggctggtgctggtgaatgccctctacttcaacggccagtggaagactcccttccccgactccagcacccaccgccgcctcttccacaaatcagacggcagcactgtctctgtgcccatgatggctcagaccaacaagttcaactatactgagttcaccacgcccgatggccattactacgacatcctggaactgccctaccacggggacaccctcagcatgttcattgctgccccttatgaaaaagaggtgcctctctctgccctcaccaacattctgagtgcccagctcatcagccactggaaaggcaacatgaccaggctgccccgcctcctggttctgcccaagttctccctggagactgaagtcgacctcaggaagcccctagagaacctgggaatgaccgacatgttcagacagtttcaggctgacttcacgagtctttcagaccaagagcctctccacgtcgcgcaggcgctgcagaaagtgaagatcgaggtgaacgagagtggcacggtggcctcctcatccacagctgtcatagtctcagcccgcatggcccccgaggagatcatcatggacagacccttcctctttgtggtccggcacaaccccacaggaacagtccttttcatgggccaagtgatggaaccctgaccctggggaaagacgccttcatctgggacaaaactggagatgcatcgggaaagaagaaactccgaagaaaagaattttagtgttaatgactctttctgaaggaagagaagacatttgccttttgttaaaagatggtaaaccagatctgtctccaagaccttggcctctccttggaggacctttaggtcaaactccctagtctccacctgagaccctgggagagaagtttgaagcacaactcccttaaggtctccaaaccagacggtgacgcctgcgggaccatctggggcacctgcttccacccgtctctctgcccactcgggtctgcagacctggttcccactgaggccctttgcaggatggaactacggggcttacaggagcttttgtgtgcctggtagaaactatttctgttccagtcacattgccatcactcttgtactgcctgccaccgcggaggaggctggtgacaggccaaaggccagtggaagaaacaccctttcatctcagagtccactgtggcactggccacccctccccagtacaggggtgctgcaggtggcagagtgaatgtcccccatcatgtggcccaactctcctggcctggccatctccctccccagaaacagtgtgcatgggttattttggagtgtaggtgacttgtttactcattgaagcagatttctgcttccttttatttttataggaatagaggaagaaaggtcagatgcgtgcccagctcttcaccccccaatctcttggtggggaggggtgtacctaaatatttatcatatccttgcccttgagtgcttgttagagagaaagagaactactaaggaaaataatattatttaaactcgctcctagtgtttctttgtggtctgtgtcaccgtatctcaggaagtccagccacttgactggcacacacccctccggacatccagcgtgacggagcccacactgccaccttgtggccgcctgagaccctcgcgccccccgcgccccccgcgcccctctttttccccttgatggaaattgaccatacaatttcatcctccttcaggggatcaaaaggacggagtggggggacagagactcagatgaggacagagtggtttccaatgtgttcaatagatttaggagcagaaatgcaaggggctgcatgacctaccaggacagaactttccccaattacagggtgactcacagccgcattggtgactcacttcaatgtgtcatttccggctgctgtgtgtgagcagtggacacgtgaggggggggtgggtgagagagacaggcagctcggattcaactaccttagataatatttctgaaaacctaccagccagagggtagggcacaaagatggatgtaatgcactttgggaggccaaggcgggaggattgcttgagcccaggagttcaagaccagcctgggcaacataccaagacccccgtctctttaaaaatatatatattttaaatatacttaaatatatatttctaatatctttaaatatatatatatattttaaagaccaatttatgggagaattgcacacagatgtgaaatgaatgtaatctaatagaagcctaatcagcccaccatgttctccactgaaaaatcctctttctttggggtttttctttctttcttttttgattttgcactggacggtgacgtcagccatgtacaggatccacaggggtggtgtcaaatgctattgaaattgtgttgaattgtatgctttttcacttttgataaataaacatgtaaaaatgtttcaaaaaaataataaaataaataaatacgaagaatatgtcaggacagtcactg

SEQ ID NO: 312070 - DNA, 2611 bp, Homo sapiens
caaaacaacaacaacaacaacaacaaaatcgtctaacttcctgatcttcctgatcattgattttcccataggtatgatcagcaacttgcttgggaaaggagccgtggaccagctgacacggctggtgctggtgaatgccctctacttcaacggccagtggaagactcccttccccgactccagcacccaccgccgcctcttccacaaatcagacggcagcactgtctctgtgcccatgatggctcagaccaacaagttcaactatactgagttcaccacgcccgatggccattactacgacatcctggaactgccctaccacggggacaccctcagcatgttcattgctgccccttatgaaaaagaggtgcctctctctgccctcaccaacattctgagtgcccagctcatcagccactggaaaggcaacatgaccaggctgccccgcctcctggttctgcccaagttctccctggagactgaagtcgacctcaggaagcccctagagaacctgggaatgaccgacatgttcagacagtttcaggctgacttcacgagtctttcagaccaagagcctctccacgtcgcgcaggcgctgcagaaagtgaagatcgaggtgaacgagagtggcacggtggcctcctcatccacagctgtcatagtctcagcccgcatggcccccgaggagatcatcatggacagacccttcctctttgtggtccggcacaaccccacaggaacagtccttttcatgggccaagtgatggaaccctgaccctggggaaagacgccttcatctgggacaaaactggagatgcatcgggaaagaagaaactccgaagaaaagaattttagtgttaatgactctttctgaaggaagagaagacatttgccttttgttaaaagatggtaaaccagatctgtctccaagaccttggcctctccttggaggacctttaggtcaaactccctagtctccacctgagaccctgggagagaagtttgaagcacaactcccttaaggtctccaaaccagacggtgacgcctgcgggaccatctggggcacctgcttccacccgtctctctgcccactcgggtctgcagacctggttcccactgaggccctttgcaggatggaactacggggcttacaggagcttttgtgtgcctggtagaaactatttctgttccagtcacattgccatcactcttgtactgcctgccaccgcggaggaggctggtgacaggccaaaggccagtggaagaaacaccctttcatctcagagtccactgtggcactggccacccctccccagtacaggggtgctgcaggtggcagagtgaatgtcccccatcatgtggcccaactctcctggcctggccatctccctccccagaaacagtgtgcatgggttattttggagtgtaggtgacttgtttactcattgaagcagatttctgcttccttttatttttataggaatagaggaagaaaggtcagatgcgtgcccagctcttcaccccccaatctcttggtggggaggggtgtacctaaatatttatcatatccttgcccttgagtgcttgttagagagaaagagaactactaaggaaaataatattatttaaactcgctcctagtgtttctttgtggtctgtgtcaccgtatctcaggaagtccagccacttgactggcacacacccctccggacatccagcgtgacggagcccacactgccaccttgtggccgcctgagaccctcgcgccccccgcgccccccgcgcccctctttttccccttgatggaaattgaccatacaatttcatcctccttcaggggatcaaaaggacggagtggggggacagagactcagatgaggacagagtggtttccaatgtgttcaatagatttaggagcagaaatgcaaggggctgcatgacctaccaggacagaactttccccaattacagggtgactcacagccgcattggtgactcacttcaatgtgtcatttccggctgctgtgtgtgagcagtggacacgtgaggggggggtgggtgagagagacaggcagctcggattcaactaccttagataatatttctgaaaacctaccagccagagggtagggcacaaagatggatgtaatgcactttgggaggccaaggcgggaggattgcttgagcccaggagttcaagaccagcctgggcaacataccaagacccccgtctctttaaaaatatatatattttaaatatacttaaatatatatttctaatatctttaaatatatatatatattttaaagaccaatttatgggagaattgcacacagatgtgaaatgaatgtaatctaatagaagcctaatcagcccaccatgttctccactgaaaaatcctctttctttggggtttttctttctttcttttttgattttgcactggacggtgacgtcagccatgtacaggatccacaggggtggtgtcaaatgctattgaaattgtgttgaattgtatgctttttcacttttgataaataaacatgtaaaaatgtttcaaaaaaataataaaataaataaatacgaagaatatgtcaggacagtcactg

SEQ ID NO: 312071 - DNA, 2545 bp, Homo sapiens
caaaacaacaacaacaacaacaacaaaatcgtctaacttcctgatcttcctgatcattgattttcccataggtatgatcagcaacttgcttgggaaaggagccgtggaccagctgacacggctggtgctggtgaatgccctctacttcaacggccagtggaagactcccttccccgactccagcacccaccgccgcctcttccacaaatcagacggcagcactgtctctgtgcccatgatggctcagaccaacaagttcaactatactgagttcaccacgcccgatggccattactacgacatcctggaactgccctaccacggggacaccctcagcatgttcattgcccactggaaaggcaacatgaccaggctgccccgcctcctggttctgcccaagttctccctggagactgaagtcgacctcaggaagcccctagagaacctgggaatgaccgacatgttcagacagtttcaggctgacttcacgagtctttcagaccaagagcctctccacgtcgcgcaggcgctgcagaaagtgaagatcgaggtgaacgagagtggcacggtggcctcctcatccacagctgtcatagtctcagcccgcatggcccccgaggagatcatcatggacagacccttcctctttgtggtccggcacaaccccacaggaacagtccttttcatgggccaagtgatggaaccctgaccctggggaaagacgccttcatctgggacaaaactggagatgcatcgggaaagaagaaactccgaagaaaagaattttagtgttaatgactctttctgaaggaagagaagacatttgccttttgttaaaagatggtaaaccagatctgtctccaagaccttggcctctccttggaggacctttaggtcaaactccctagtctccacctgagaccctgggagagaagtttgaagcacaactcccttaaggtctccaaaccagacggtgacgcctgcgggaccatctggggcacctgcttccacccgtctctctgcccactcgggtctgcagacctggttcccactgaggccctttgcaggatggaactacggggcttacaggagcttttgtgtgcctggtagaaactatttctgttccagtcacattgccatcactcttgtactgcctgccaccgcggaggaggctggtgacaggccaaaggccagtggaagaaacaccctttcatctcagagtccactgtggcactggccacccctccccagtacaggggtgctgcaggtggcagagtgaatgtcccccatcatgtggcccaactctcctggcctggccatctccctccccagaaacagtgtgcatgggttattttggagtgtaggtgacttgtttactcattgaagcagatttctgcttccttttatttttataggaatagaggaagaaaggtcagatgcgtgcccagctcttcaccccccaatctcttggtggggaggggtgtacctaaatatttatcatatccttgcccttgagtgcttgttagagagaaagagaactactaaggaaaataatattatttaaactcgctcctagtgtttctttgtggtctgtgtcaccgtatctcaggaagtccagccacttgactggcacacacccctccggacatccagcgtgacggagcccacactgccaccttgtggccgcctgagaccctcgcgccccccgcgccccccgcgcccctctttttccccttgatggaaattgaccatacaatttcatcctccttcaggggatcaaaaggacggagtggggggacagagactcagatgaggacagagtggtttccaatgtgttcaatagatttaggagcagaaatgcaaggggctgcatgacctaccaggacagaactttccccaattacagggtgactcacagccgcattggtgactcacttcaatgtgtcatttccggctgctgtgtgtgagcagtggacacgtgaggggggggtgggtgagagagacaggcagctcggattcaactaccttagataatatttctgaaaacctaccagccagagggtagggcacaaagatggatgtaatgcactttgggaggccaaggcgggaggattgcttgagcccaggagttcaagaccagcctgggcaacataccaagacccccgtctctttaaaaatatatatattttaaatatacttaaatatatatttctaatatctttaaatatatatatatattttaaagaccaatttatgggagaattgcacacagatgtgaaatgaatgtaatctaatagaagcctaatcagcccaccatgttctccactgaaaaatcctctttctttggggtttttctttctttcttttttgattttgcactggacggtgacgtcagccatgtacaggatccacaggggtggtgtcaaatgctattgaaattgtgttgaattgtatgctttttcacttttgataaataaacatgtaaaaatgtttcaaaaaaataataaaataaataaatacgaagaatatgtcaggacagtcactg

SEQ ID NO: 312072 - DNA, 1793 bp, Homo sapiens
gcagaagagaagggaaatagaaattaaaatactgaataggggagcagtgaacaggggatacccaaaagccaagagcgagagagagcctggcttccagaaatagtggagaagccaggagaactaggtgaaaacccagtgctgggttgccatcagcgagagctggagccatttccaacgaaccatcttgtcgtcttcacagctgagttcaccacgcccgatggccattactacgacatcctggaactgccctaccacggggacaccctcagcatgttcattgcctgcagacctggttcccactgaggccctttgcaggatggaactacggggcttacaggagcttttgtgtgcctggtagaaactatttctgttccagtcacattgccatcactcttgtactgcctgccaccgcggaggaggctggtgacaggccaaaggccagtggaagaaacaccctttcatctcagagtccactgtggcactggccacccctccccagtacaggggtgctgcaggtggcagagtgaatgtcccccatcatgtggcccaactctcctggcctggccatctccctccccagaaacagtgtgcatgggttattttggagtgtaggtgacttgtttactcattgaagcagatttctgcttccttttatttttataggaatagaggaagaaaggtcagatgcgtgcccagctcttcaccccccaatctcttggtggggaggggtgtacctaaatatttatcatatccttgcccttgagtgcttgttagagagaaagagaactactaaggaaaataatattatttaaactcgctcctagtgtttctttgtggtctgtgtcaccgtatctcaggaagtccagccacttgactggcacacacccctccggacatccagcgtgacggagcccacactgccaccttgtggccgcctgagaccctcgcgccccccgcgccccccgcgcccctctttttccccttgatggaaattgaccatacaatttcatcctccttcaggggatcaaaaggacggagtggggggacagagactcagatgaggacagagtggtttccaatgtgttcaatagatttaggagcagaaatgcaaggggctgcatgacctaccaggacagaactttccccaattacagggtgactcacagccgcattggtgactcacttcaatgtgtcatttccggctgctgtgtgtgagcagtggacacgtgaggggggggtgggtgagagagacaggcagctcggattcaactaccttagataatatttctgaaaacctaccagccagagggtagggcacaaagatggatgtaatgcactttgggaggccaaggcgggaggattgcttgagcccaggagttcaagaccagcctgggcaacataccaagacccccgtctctttaaaaatatatatattttaaatatacttaaatatatatttctaatatctttaaatatatatatatattttaaagaccaatttatgggagaattgcacacagatgtgaaatgaatgtaatctaatagaagcctaatcagcccaccatgttctccactgaaaaatcctctttctttggggtttttctttctttcttttttgattttgcactggacggtgacgtcagccatgtacaggatccacaggggtggtgtcaaatgctattgaaattgtgttgaattgtatgctttttcacttttgataaataaacatgtaaaaatgtttcaaaaaaataataaaataaataaatacgaagaatatgtcaggacagtcactg

SEQ ID NO: 312073 - DNA, 2427 bp, Homo sapiens
  misc_feature (2427)..(2427): n is a, c, g, or t
ggggcacagctgtgtttggctgcagggccaagagcgctgtcaagaagacccacacgcccccctccagcagctgaattcctgcagctcagcagccgccgccagagcaggacgaaccgccaatcgcaaggcacctctgagaacttcaggatgcagatgtctccagccctcacctgcctagtcctgggcctggcccttgtctttggtgaagggtctgctgtgcaccatcccccatcctacgtggcccacctggcctcagacttcggggtgagggtgtttcagcaggtggcgcaggcctccaaggaccgcaacgtggttttctcaccctatggggtggcctcggtgttggccatgctccagctgacaacaggaggagaaacccagcagcagattcaagcagctatgggattcaagattgatgacaagggcatggcccccgccctccggcatctgtacaaggagctcatggggccatggaacaaggatgagatcagcaccacagacgcgatcttcgtccagcgggatctgaagctggtccagggcttcatgccccacttcttcaggctgttccggagcacggtcaagcaagtggacttttcagaggtggagagagccagattcatcatcaatgactgggtgaagacacacacaaaaggtatgatcagcaacttgcttgggaaaggagccgtggaccagctgacacggctggtgctggtgaatgccctctacttcaacggccagtggaagactcccttccccgactccagcacccaccgccgcctcttccacaaatcagacggcagcactgtctctgtgcccatgatggctcagaccaacaagttcaactatactgagttcaccacgcccgatggccattactacgacatcctggaactgccctaccacggggacaccctcagcatgttcattgctgccccttatgaaaaagaggtgcctctctctgccctcaccaacattctgagtgcccagctcatcagccactggaaaggcaacatgaccaggctgccccgcctcctggttctgcccaagttctccctggagactgaagtcgacctcaggaagcccctagagaacctgggaatgaccgacatgttcagacagtttcaggctgacttcacgagtctttcagaccaagagcctctccacgtcgcgcaggcgctgcagaaagtgaagatcgaggtgaacgagagtggcacggtggcctcctcatccacagctgtcatagtctcagcccgcatggcccccgaggagatcatcatggacagacccttcctctttgtggtccggcacaaccccacaggaacagtccttttcatgggccaagtgatggaaccctgaccctggggaaagacgccttcatctgggacaaaactggagatgcatcgggaaagaagaaactccgaagaaaagaattttagtgttaatgactctttctgaaggaagagaagacatttgccttttgttaaaagatggtaaaccagatctgtctccaagaccttggcctctccttggaggacctttaggtcaaactccctagtctccacctgagaccctgggagagaagtttgaagcacaactcccttaaggtctccaaaccagacggtgacgcctgcgggaccatctggggcacctgcttccacccgtctctctgcccactcgggtctgcagacctggttcccactgaggccctttgcaggatggaactacggggcttacaggagcttttgtgtgcctggtagaaactatttctgttccagtcacattgccatcactcttgtactgcctgccaccgcggaggaggctggtgacaggccaaaggccagtggaagaaacaccctttcatctcagagtccactgtggcactggccacccctccccagtacaggggtgctgcaggtggcagagtgaatgtcccccatcatgtggcccaactctcctggcctggccatctccctccccagaaacagtgtgcatgggttattttggagtgtaggtgacttgtttactcattgaagcagatttctgcttccttttatttttataggaatagaggaagaaaggtcagatgcgtgcccagctcttcaccccccaatctcttggtggggaggggtgtacctaaatatttatcatatccttgcccttgagtgcttgttagagagaaagagaactactaaggaaaataatattatttaaacttcgaaacaaaaaaggggggggtttaaattcctggaggggccagtaggtaccagttttgaaagggccaagggaggaaaagaagggtcgggtaaaggggaggaacggatggttggagactttggggtgaaggacacaggtcgcggttatgtgaggaggtcgtgatgtggtaaagagaaaagaaagaagaagaggacagcggtcacaggtctcgcn

SEQ ID NO: 312074 - DNA, 1371 bp, Homo sapiens
ggggcacagctgtgtttggctgcagggccaagagcgctgtcaagaagacccacacgcccccctccagcagctgaattcctgcagctcagcagccgccgccagagcaggacgaaccgccaatcgcaaggcacctctgagaacttcaggatgcagatgtctccagccctcacctgcctagtcctgggcctggcccttgtctttggtgaagggtctgctgtgcaccatcccccatcctacgtggcccacctggcctcagacttcggggtgagggtgtttcagcaggtggcgcaggcctccaaggaccgcaacgtggttttctcaccctatggggtggcctcggtgttggccatgctccagctgacaacaggaggagaaacccagcagcagattcaagcagctatgggattcaagattgatgacaagggcatggcccccgccctccggcatctgtacaaggagctcatggggccatggaacaaggatgagatcagcaccacagacgcgatcttcgtccagcgggatctgaagctggtccagggcttcatgccccacttcttcaggctgttccggagcacggtcaagcaagtggacttttcagaggtggagagagccagattcatcatcaatgactgggtgaagacacacacaaaaggtatgatcagcaacttgcttgggaaaggagccgtggaccagctgacacggctggtgctggtgaatgccctctacttcaacggccagtggaagactcccttccccgactccagcacccaccgccgcctcttccacaaatcagacggcagcactgtctctgtgcccatgatggctcagaccaacaagttcaactatactgagttcaccacgcccgatggccattactacgacatcctggaactgccctaccacggggacaccctcagcatgttcattgctgccccttatgaaaaagaggtgcctctctctgccctcaccaacattctgagtgcccagctcatcagccactggaaaggcaacatgaccaggctgccccgcctcctggttctgcccaagttctccctggagactgaagtcgacctcaggaagcccctagagaacctgggaatgaccgacatgttcagacagtttcaggctgacttcacgagtctttcagaccaagagcctctccacgtcgcgcaggcgctgcagaaagtgaagatcgaggtgaacgagagtggcacggtggcctcctcatccacagctgtcatagtctcagcccgcatggcccccgaggagatcatcatggacagacccttcctctttgtggtccggcacaaccccacaggaacagtccttttcatgggccaagtgatggacccacgcgggatcttagatcga

SEQ ID NO: 312075 - DNA, 1884 bp, Homo sapiens
  misc_feature (1852)..(1852): n is a, c, g, or t
ggggcacagctgtgtttggctgcagggccaagagcgctgtcaagaagacccacacgcccccctccagcagctgaattcctgcagctcagcagccgccgccagagcaggacgaaccgccaatcgcaaggcacctctgagaacttcaggatgcagatgtctccagccctcacctgcctagtcctgggcctggcccttgtctttggtgaagggtctgctgtgcaccatcccccatcctacgtggcccacctggcctcagacttcggggtgagggtgtttcagcaggtggcgcaggcctccaaggaccgcaacgtggttttctcaccctatggggtggcctcggtgttggccatgctccagctgacaacaggaggagaaacccagcagcagattcaagcagctatgggattcaagattgatgacaagggcatggcccccgccctccggcatctgtacaaggagctcatggggccatggaacaaggatgagatcagcaccacagacgcgatcttcgtccagcgggatctgaagctggtccagggcttcatgccccacttcttcaggctgttccggagcacggtcaagcaagtggacttttcagaggtggagagagccagattcatcatcaatgactgggtgaagacacacacaaaaggtatgatcagcaacttgcttgggaaaggagccgtggaccagctgacacggctggtgctggtgaatgccctctacttcaacggccagtggaagactcccttccccgactccagcacccaccgccgcctcttccacaaatcagacggcagcactgtctctgtgcccatgatggctcagaccaacaagttcaactatagtaagtccaagagccccttccccacagcccacagcaactgcatctcattcctggggtctcccaaggaatacccaaaatgtcaccctctgagggaggaagaccacagggaatgctcccctttaagggaggagagaccctagaatatactccagctttgacaaagatttcccaagcaggagacatcaggataatgggaacagaagacaggaggtttatcccatgaaggatgaagaagctgaaatccagagattccctcagggccacatttgtccacctgactccagggtctcatcttcgtgtgttgctagtgtgattacctggggatgagaaatcctgctgggggagttgaggttaagaggatgaggactccaggtgctgtggctcacgcctgtaatcccagcactttgggaggccaaggcaggtggatcaggagtttgaggtcaggagtttgagaccagcctggccaacatggtgaaaccctgtctctactaaaaatgcaaaaattagccaggtgtggtggcaggcgcctgtaatcccagctactcgggaggctgaggcaggagaatcacttgagcccgggaggtggaggttgcagtgagccgaacgaaattgagccacttcaccccagcctgggcaaaagagtgaaattccctgcagctcagcagccgccgccagagcaggacgaaccgccaatcgcaaggaacctctgagaacttcaggtaggagaaaaagcaaactccctccaacctcttacttcgggcttaaggcagagaactcgcctcccagaatcttctccctccatgatccccgctattctctatttctttcctcggacctgcagcctggggtcgaccctgccctaggggtgaatggcaggagagcaggaaggatggtccggcgttaccgaaaagcccattaaaccagttaacaagaaccctggaatcctcttcagtccccctgggatcaggaaatttacccattttccaccctcaaggccggttactngaatggacaatccctgggaaagccttagagga

SEQ ID NO: 312076 - DNA, 390 bp, Homo sapiens
tgaaagtgttggtatcccttgtttgaggctgtgttgaacttgtgtttgatatctggtctgtatcttggattcttctcctcctctcttcctctttatacgctctcataacctatgaataggattgctggaagatcagggaagtgaagttcaatggaaatgactttggattttatcctaagggcagtgggataccactgaagggtgtcatgagaggagtgacataatcagatttggagctctgaaggatcatttgactgctgcacacagcacgggctgcagggaagcaacagcaagagagaccaactctgggcaactccagccacggtcccagcagggactgatgatgcctggactagaatgatgatgaaggaaagagggggagcagacaga

SEQ ID NO: 312077 - DNA, 887 bp, Homo sapiens
  misc_feature (1)..(3): n is a, c, g, or t
nnnggagacagctaaggaaagaagctggggcgcatgtttctgcccaaagccgggttttggccgaggtgactacacaccccctttcctggctcccataggctaagtgcctggcttcttgagaagcctgcttcttgagaacaaaaaagtgatttaaagcctcatgggagatgagcaatcctcaagacacaagcagaaaaagtcccagtgatacaggaagcgggttcaggaacctgctggttcctgatacataaatcagacagcctctgctgcatgacacgaagcttgcttctgcctggcatctgtgagcagctgccaggctccggccaggatcccttccttctcctcattggctgatggatcccaaggggctcctctccttgaccttcgtgctgtttctctccctggcttttggggcaagctacggaacaggtgggcgcatgatgaactgcccaaagattctccggcagttgggaagcaaagtgctgctgcccctgacatatgaaaggataaataagagcatgaacaaaagcatccacattgtcgtcacaatggcaaaatcactggagaacagtgtcgagaacaaaatagtgtctcttgatccatccgaagcaggccctccacgttatctaggagatcgctacaagttttatctggagaatctcaccctggggatacgggaaagcaggaaggaggatgagggatggtaccttatgaccctggagaaaaattttacattttggctatctttactttgttctgggagctgatcatgataacctgcagacctgatcaagcctctgtgcctcagtttctctctcaggataaagagtgaatagaggctgaagggtgaatttcttattatacataaaacactctgatattattgt

SEQ ID NO: 312078 - DNA, 412 bp, Homo sapiens
gtctgtgcttctctatcggagagttgggtgagaactagctctctctgttcagctaatctgctttctttgcttctcttgtagcctcttcagaagaaacttgactccttcccagctcaggacccttgcaccaccatatatgttgctgccacagagcctgtcccagagtctgtccaggtgaggcatctctctgcctactctccgtagagagggaatacatgaaggaggggaaaatgaggaagttttttttttttaaggtgggaagagggagaggatcagggaaaatagctattgggcactaggcttcatacctaggtgacaaaatactgtgtataacaaatcctcatgacacaagtttacctatgtaacaaaccagcacatgtacgcctgaacttaaaataaaagtaaaaaaaaa

SEQ ID NO: 312079 - DNA, 2017 bp, Homo sapiens
  misc_feature (1)..(3): n is a, c, g, or t
nnnggagacagctaaggaaagaagctggggcgcatgtttctgcccaaagccgggttttggccgaggtgactacacaccccctttcctggctcccataggctaagtgcctggcttcttgagaagcctgcttcttgagaacaaaaaagtgatttaaagcctcatgggagatgagcaatcctcaagacacaagcagaaaaagtcccagtgatacaggaagcgggttcaggaacctgctggttcctgatacataaatcagacagcctctgctgcatgacacgaagcttgcttctgcctggcatctgtgagcagctgccaggctccggccaggatcccttccttctcctcattggctgatggatcccaaggggctcctctccttgaccttcgtgctgtttctctccctggcttttggggcaagctacggaacaggtgggcgcatgatgaactgcccaaagattctccggcagttgggaagcaaagtgctgctgcccctgacatatgaaaggataaataagagcatgaacaaaagcatccacattgtcgtcacaatggcaaaatcactggagaacagtgtcgagaacaaaatagtgtctcttgatccatccgaagcaggccctccacgttatctaggagatcgctacaagttttatctggagaatctcaccctggggatacgggaaagcaggaaggaggatgagggatggtaccttatgaccctggagaaaaatgtttcagttcagcgcttttgcctgcagttgaggctttatgagcaggtctccactccagaaattaaagttttaaacaagacccaggagaacgggacctgcaccttgatactgggctgcacagtggagaagggggaccatgtggcttacagctggagtgaaaaggcgggcacccacccactgaacccagccaacagctcccacctcctgtccctcaccctcggcccccagcatgctgacaatatctacatctgcaccgtgagcaaccctatcagcaacaattcccagaccttcagcccgtggcccggatgcaggacagacccctcagaaacaaaaccatgggcagtgtatgctgggctgttagggggtgtcatcatgattctcatcatggtggtaatactacagttgagaagaagaggtaaaacgaaccattaccagacaacagtggaaaaaaaaagccttacgatctatgcccaagtccagaaaccaggtcctcttcagaagaaacttgactccttcccagctcaggacccttgcaccaccatatatgttgctgccacagagcctgtcccagagtctgtccaggaaacaaattccatcacagtctatgctagtgtgacacttccagagagctgacaccagagaccaacaaagggactttctgaaggaaaatggaaaaaccaaaatgaacactgaacttggccacaggccccaagtttcctctggcagacatgctgcacgtctgtacccttctcagatcaactccctggtgatgtttcttccacatacatctgtgaaatgaacaaggaagtgaggcttcccaagaatttagcttgctgtgcagtggctgcaggcgcagaacagagcgttacttgataacagcgttccatctttgtgttgtagcagatgaaatggacagtaatgtgagttcagactttgggcatcttgctcttggctggaactggataataaaaatcagactgaaagccaggacatctgagtacctatctcacacactggaccaccagtcacaaagtctggaaaagtttacattttggctatctttactttgttctgggagctgatcatgataacctgcagacctgatcaagcctctgtgcctcagtttctctctcaggataaagagtgaatagaggctgaagggtgaatttcttattatacataaaacactctgatattattgtataaaggaagctaagaatattattttatttgcaaaacccagaagctaaaaagtcaataaacagaaagaatgattttgaaaaaaaaaa

SEQ ID NO: 312080 - DNA, 1059 bp, Homo sapiens
gaaacctctgttttcttagatttgagcagggtggtcacactgaccttgcagagttctgagaatcagagacagaacataaaaggcctggaaaacattctccaaaaagaagctgcaacatgtgtggacaatgggcttttcatgcctctcttactgtctcttactgtctattgacctggtgcaagaaacatgctctggtgatggctgtgagggaggaatgaggatagacatagacactcctgtgtctcaaacatgcttctttattactctgttatgactctgtcttccctggggcaggaccccagcctgcctacatttgcagacagacacagtggcatgtggagacaacagtgtgtcccaatgacttttctttaccccctagctgtcggcagtactcagtggaagggtgatattatgacactgacactgctattttgaaacctggaggatggaaaggtgcaaaaatctatcaccagcaacagaaggtgcagactgtgttggtggcggtaattttgtccatcaaatgaatatgtgtgaaaacattccctcctttggccctacaggtcagaatggcggcagtggagcatcgtcattcttcaggattgccctactggccctacctcacagctgaaactttaaaaaacaggatgggccaccagccacctcctccaactcaacaacattctataattgataactccctgagcctcaagacaccttccgagtgtgtgctctatccccttccaccctcagcggatgataatctcaagacacctcccgagtgtctgctcactccccttccaccctcagctctaccctcagcggatgataatctcaagacacctgccgagtgcctgctctatccccttccaccctcagcggatgataatctcaagacacctcccgagtgtctgctcactccccttccaccctcagctccaccctcagcggatgataatctcaagacacctcctgagtgtgtctgctcactccccttccaccctcagcggatgataatctcaagaaactaaggaagaataaataaataatataaaaataaaa

SEQ ID NO: 312081 - DNA, 500 bp, Homo sapiens
tgaaagtgattgtaatccatagggaaatgtttcaacgtgcgcaagcgttgcggcggcgggcagaggactactacagatgcaaaatcaccccttctgcaagaaagcctctttgcaaccgggtaagtttgcttgttttccttgcttttggacatagtctgccaggtcaggacatggatacatttttctccctacggctctgtgctcaagccctgcagagggagatggcagagaggaaggctgcctacaagcatcacagtcccatccctgttggtaactgtgttgcgcaaaaacaccttcatccccacccagtggggcccccatctaatattctaagtgtcagaggttccgtatttgtaatagcaaatgggccctgactgtaaattagtgaagagtgaatgtaacttattacccacagggacaattccaaatgagggccttaaatgatgctcagctaagctggttcttgtgtggcctctgtaccttcaaaagctgccgagtcc

SEQ ID NO: 312082 - DNA, 3234 bp, Homo sapiens
gggctgcggcagtgccatctctcacagcacacgaagcaccgggatgatcctcctagtagaagctctgcattcaggcgtcaactccggtgtcggtttccgggcagactcccaccccgacgtgccgggctcagtgcccagtgctacccaaacccagagcacccctacttcccggcaggcgtgtgacctgcgcgttctgccccaggccgctacctgtctgaggaacccgagccctacctggcagtctacctgcactcggagccccggcccaatgagcgcaactgctcggctagcaggaggatccgcccagagtccctccagggtgccgaccaccggccctacaccttcttcatttccccggggaccagagacccagtggggagttaccgtctgaacctctccagccacttccgctggtcggcgctggaggtgtccgtgggcttgtacacgtccctgtgccagtacttcagcgaggaggacgtggtgtggcggacagaggggctgctgcccctggaggagacctcgccccgccaggccgtctgcctcacccgccacctcaccgccttcggcaccagcctcttcgtgcccccaagccatatccgctttgtgtttcctgagccaacagcggatgtaaactacatcgtcatgctgacatgtgctgtgtgcctggtgacctacatggtcatggccgccatcctgcacaagctggaccagttggatgccagccggggctgcgccatccccttctgtgggcagcggggccgcttcaagtacgagatcctcgtcaagacaggctggggccggggctcaggtaccacggcccacgtgggcatcatgctgtatggggtggacagccggagcggccaccggcacctggacggcgacagagccttccaccgcaacagtctggacatcttccagatcgccaccccgcacagcctgggtagcgtgtggaagatccgagtgtggcacgacaacaaaggtctgtatggaccctgccaagctctgcccctctgcccctgcattggggcgccctgcgaacctgacctccctcccgcgcctctgcagggctcagccctgcctggttcctgcagcacatcatcgtcagggacctgcagacggcacgcagcaccttcttcctggtcaatgactggctttcggtggagacggaggccaacgggggcctggtggagaaggaggtgctggccgcgagtaaggcctcgttccgtgttcccactccgtgggaggttgggcagggtggtcctgccccgtggcctcctgcagtgcggccctccctgccttctaggtcacgcagccctgttgcgcttccggcgcctgctggtggctgagctgcagcgtggcttctttgacaagcacatctggctctccatatgggaccggccgcctcgtagctgtttcactcgcatccagagggccacctgctgcgttctcctcatctgtctcttcctgggcgccaacgccgtgtggtacggggctgttggagactctgcctacagcacggggcgtgtgtccaggctgaacccgctgagcgtcgacacagtcgctgttggcctggtgtccagcgtggttgtctatcccgtctacctggccatcctctttctcttccggatgtcccggagcaaggtggctgggagcccgagccccacacctgccgggcagcaggtgctggacgtcgacagctgcctggactcatccgtgctggacagctccttcctcacgttctcaggcctccacgctgaggtgagggctctactgggggtcctgccgccttggcgcagcttggactcaagaccctgtgcacctctcagcaggcctttgctggacagatgaagagtgacttgtttctggatgattctaagaggttgatggacggatggctacatggatgtgatggagatggtttactatcgggaccttccgcatcctgctgatgttttgttgcttaggatatgaatggctgagcggaggctgtaaaacctggcactctgcttgggtatgaggttcttcctgccatcctgccatcatttgttttttatgttttgtcgccaaaagtgaccttgaggaaccctgggagctcaggaaggaaggagcacccagaagcagggacagggagctggttggggaggaccagaaatcaggttatcaatactctggctgaccatcgtcatcgtgggactgactttggtggaagtccttggttacttatcattactgtgtttctgagaagttataaatttgccatctccctctgcacaagttacctttgtgtgtctttcctgaagactatcttcccgtctcaaaatggacatgatggatccacggatgtacagcagagagccaggaggtccaactgccgtagacaggaaggaattaaaattgtcctggaagacatctttactttatggagacaggtggaaaccaaagttcgagctaaaatccgtaagatgaaggtgacaacaaaagtcaaccgtcatgacaaaatcaatggaaagaggaagaccgccaaagaacatctgaggaaactaagcatgaaagaacgtgagcacggagaaaaggagaggcaggtgtcagaggcagaggaaaatgggaaattggatatgaaagaaatacacacctacatggaaatgtttcaacgtgcgcaagcgttgcggcggcgggcagaggactactacagatgcaaaatcaccccttctgcaagaaagcctctttgcaaccgggtcagaatggcggcagtggagcatcgtcattcttcaggattgccctactggccctacctcacagctgaaactttaaaaaacaggatgggccaccagccacctcctccaactcaacaacattctataattgataactccctgagcctcaagacaccttccgagtgtgtgctctatccccttccaccctcagcggatgataatctcaagacacctcccgagtgtctgctcactccccttccaccctcagctctaccctcagcggatgataatctcaagacacctgccgagtgcctgctctatccccttccaccctcagcggatgataatctcaagacacctcccgagtgtctgctcactccccttccaccctcagctccaccctcagcggatgataatctcaagacacctcctgagtgtgtctgctcactccccttccaccctcagcggatgataatctcaagaaactaaggaagaataaataaataatataaaaataaaa

SEQ ID NO: 312083 - DNA, 3240 bp, Homo sapiens
gggctgcggcagtgccatctctcacagcacacgaagcaccgggatgatcctcctagtagaagctctgcattcaggcgtcaactccggtgtcggtttccgggcagactcccaccccgacgtgccgggctcagtgcccagtgctacccaaacccagagcacccctacttcccggcaggcgtgtgacctgcgcgttctgccccaggccgctacctgtctgaggaacccgagccctacctggcagtctacctgcactcggagccccggcccaatgagcgcaactgctcggctagcaggaggatccgcccagagtccctccagggtgccgaccaccggccctacaccttcttcatttccccggggaccagagacccagtggggagttaccgtctgaacctctccagccacttccgctggtcggcgctggaggtgtccgtgggcttgtacacgtccctgtgccagtacttcagcgaggaggacgtggtgtggcggacagaggggctgctgcccctggaggagacctcgccccgccaggccgtctgcctcacccgccacctcaccgccttcggcaccagcctcttcgtgcccccaagccatatccgctttgtgtttcctgagccaacagcggatgtaaactacatcgtcatgctgacatgtgctgtgtgcctggtgacctacatggtcatggccgccatcctgcacaagctggaccagttggatgccagccggggctgcgccatccccttctgtgggcagcggggccgcttcaagtacgagatcctcgtcaagacaggctggggccggggctcaggtaccacggcccacgtgggcatcatgctgtatggggtggacagccggagcggccaccggcacctggacggcgacagagccttccaccgcaacagtctggacatcttccagatcgccaccccgcacagcctgggtagcgtgtggaagatccgagtgtggcacgacaacaaaggtctgtatggaccctgccaagctctgcccctctgcccctgcattggggcgccctgcgaacctgacctccctcccgcgcctctgcagggctcagccctgcctggttcctgcagcacatcatcgtcagggacctgcagacggcacgcagcaccttcttcctggtcaatgactggctttcggtggagacggaggccaacgggggcctggtggagaaggaggtgctggccgcgagtaaggcctcgttccgtgttcccactccgtgggaggttgggcagggtggtcctgccccgtggcctcctgcagtgcggccctccctgccttctaggtcacgcagccctgttgcgcttccggcgcctgctggtggctgagctgcagcgtggcttctttgacaagcacatctggctctccatatgggaccggccgcctcgtagctgtttcactcgcatccagagggccacctgctgcgttctcctcatctgtctcttcctgggcgccaacgccgtgtggtacggggctgttggagactctgcctacaggtggctgggagcccgagccccacacctgccgggcagcaggtgctggacgtcgacagctgcctggactcatccgtgctggacagctccttcctcacgttctcaggcctccacgctgaggtgagggctctactgggggtcctgccgccttggcgcagcttggactcaagaccctgtgcacctctcagcaggcctttgctggacagatgaagagtgacttgtttctggatgattctaagaggttgatggacggatggctacatggatgtgatggagatggtttactatcgggaccttccgcatcctgctgatgttttgttgcttaggatatgaatggctgagcggaggctgtaaaacctggcactctgcttgggtatgaggttcttcctgccatcctgccatcatttgttttttatgttttgtcgccaaaagtgaccttgaggaaccctgggagctcaggaaggaaggagcacccagaagcagggacagggagctggttggggaggaccagaaatcagtagagactgggtttcaccgtgttcgccaggatagtctccatgtcttgacctcgtgatctgcctgcctcggcctcccagtgctgggattacaggcgtgagccaccgcgcctggccaaaatatataaccttaagtgttatcaatactctggctgaccatcgtcatcgtgggactgactttggtggaagtccttggttacttatcattactgtgtttctgagaagttataaatttgccatctccctctgcacaagttacctttgtgtgtctttcctgaagactatcttcccgtctcaaaatggacatgatggatccacggatgtacagcagagagccaggaggtccaactgccgtagacaggaaggaattaaaattgtcctggaagacatctttactttatggagacaggtggaaaccaaagttcgagctaaaatccgtaagatgaaggtgacaacaaaagtcaaccgtcatgacaaaatcaatggaaagaggaagaccgccaaagaacatctgaggaaactaagcatgaaagaacgtgagcacggagaaaaggagaggcaggtgtcagaggcagaggaaaatgggaaattggatatgaaagaaatacacacctacatggaaatgtttcaacgtgcgcaagcgttgcggcggcgggcagaggactactacagatgcaaaatcaccccttctgcaagaaagcctctttgcaaccgggtcagaatggcggcagtggagcatcgtcattcttcaggattgccctactggccctacctcacagctgaaactttaaaaaacaggatgggccaccagccacctcctccaactcaacaacattctataattgataactccctgagcctcaagacaccttccgagtgtgtgctctatccccttccaccctcagcggatgataatctcaagacacctcccgagtgtctgctcactccccttccaccctcagctctaccctcagcggatgataatctcaagacacctgccgagtgcctgctctatccccttccaccctcagcggatgataatctcaagacacctcccgagtgtctgctcactccccttccaccctcagctccaccctcagcggatgataatctcaagacacctcctgagtgtgtctgctcactccccttccaccctcagcggatgataatctcaagaaactaaggaagaataaataaataatataaaaataaaa

SEQ ID NO: 312084 - DNA, 1387 bp, Homo sapiens
cagccccgtaccacacggcgttggcgcccaggaagagacagatgaggagaacgcagcaggtggccctctggtgtccagcgtggttgtctatcccgtctacctggccatcctctttctcttccggatgtcccggagcaaggtggctgggagcccgagccccacacctgccgggcagcaggtgctggacgtcgacagctgcctggactcatccgtgctggacagctccttcctcacgttctcaggcctccacgctgagcaggcctttgctggacagatgaagagtgacttgtttctggatgattctaagaggttatcaatactctggctgaccatcgtcatcgtgggactgactttggtggaagtccttggttacttatcattactgtgtttctgagaagttataaatttgccatctccctctgcacaagttacctttgtgtgtctttcctgaagactatcttcccgtctcaaaatggacatgatggatccacggatgtacagcagagagccaggaggtccaactgccgtagacaggaaggaattaaaattgtcctggaagacatctttactttatggagacaggtggaaaccaaagttcgagctaaaatccgtaagatgaaggtgacaacaaaagtcaaccgtcatgacaaaatcaatggaaagaggaagaccgccaaagaacatctgaggaaactaagcatgaaagaacgtgagcacggagaaaaggagaggcaggtgtcagaggcagaggaaaatgggaaattggatatgaaagaaatacacacctacatggaaatgtttcaacgtgcgcaagcgttgcggcggcgggcagaggactactacagatgcaaaatcaccccttctgcaagaaagcctctttgcaaccgggtcagaatggcggcagtggagcatcgtcattcttcaggattgccctactggccctacctcacagctgaaactttaaaaaacaggatgggccaccagccacctcctccaactcaacaacattctataattgataactccctgagcctcaagacaccttccgagtgtgtgctctatccccttccaccctcagcggatgataatctcaagacacctcccgagtgtctgctcactccccttccaccctcagctctaccctcagcggatgataatctcaagacacctgccgagtgcctgctctatccccttccaccctcagcggatgataatctcaagacacctcccgagtgtctgctcactccccttccaccctcagctccaccctcagcggatgataatctcaagacacctcctgagtgtgtctgctcactccccttccaccctcagcggatgataatctcaagaaactaaggaagaataaataaataatataaaaataaaa

SEQ ID NO: 312085 - DNA, 3415 bp, Homo sapiens
gggctgcggcagtgccatctctcacagcacacgaagcaccgggatgatcctcctagtagaagctctgcattcaggcgtcaactccggtgtcggtttccgggcagactcccaccccgacgtgccgggctcagtgcccagtgctacccaaacccagagcacccctacttcccggcaggcgtgtgacctgcgcgttctgccccaggccgctacctgtctgaggaacccgagccctacctggcagtctacctgcactcggagccccggcccaatgagcgcaactgctcggctagcaggaggatccgcccagagtccctccagggtgccgaccaccggccctacaccttcttcatttccccggggaccagagacccagtggggagttaccgtctgaacctctccagccacttccgctggtcggcgctggaggtgtccgtgggcttgtacacgtccctgtgccagtacttcagcgaggaggacgtggtgtggcggacagaggggctgctgcccctggaggagacctcgccccgccaggccgtctgcctcacccgccacctcaccgccttcggcaccagcctcttcgtgcccccaagccatatccgctttgtgtttcctgagccaacagcggatgtaaactacatcgtcatgctgacatgtgctgtgtgcctggtgacctacatggtcatggccgccatcctgcacaagctggaccagttggatgccagccggggctgcgccatccccttctgtgggcagcggggccgcttcaagtacgagatcctcgtcaagacaggctggggccggggctcaggtaccacggcccacgtgggcatcatgctgtatggggtggacagccggagcggccaccggcacctggacggcgacagagccttccaccgcaacagtctggacatcttccagatcgccaccccgcacagcctgggtagcgtgtggaagatccgagtgtggcacgacaacaaaggtctgtatggaccctgccaagctctgcccctctgcccctgcattggggcgccctgcgaacctgacctccctcccgcgcctctgcagggctcagccctgcctggttcctgcagcacatcatcgtcagggacctgcagacggcacgcagcaccttcttcctggtcaatgactggctttcggtggagacggaggccaacgggggcctggtggagaaggaggtgctggccgcgagtaaggcctcgttccgtgttcccactccgtgggaggttgggcagggtggtcctgccccgtggcctcctgcagtgcggccctccctgccttctaggtcacgcagccctgttgcgcttccggcgcctgctggtggctgagctgcagcgtggcttctttgacaagcacatctggctctccatatgggaccggccgcctcgtagctgtttcactcgcatccagagggccacctgctgcgttctcctcatctgtctcttcctgggcgccaacgccgtgtggtacggggctgttggagactctgcctacagcacggggcgtgtgtccaggctgaacccgctgagcgtcgacacagtcgctgttggcctggtgtccagcgtggttgtctatcccgtctacctggccatcctctttctcttccggatgtcccggagcaaggtggctgggagcccgagccccacacctgccgggcagcaggtgctggacgtcgacagctgcctggactcatccgtgctggacagctccttcctcacgttctcaggcctccacgctgaggtgagggctctactgggggtcctgccgccttggcgcagcttggactcaagaccctgtgcacctctcagcaggcctttgctggacagatgaagagtgacttgtttctggatgattctaagaggttgatggacggatggctacatggatgtgatggagatggtttactatcgggaccttccgcatcctgctgatgttttgttgcttaggatatgaatggctgagcggaggctgtaaaacctggcactctgcttgggtatgaggttcttcctgccatcctgccatcatttgttttttatgttttgtcgccaaaagtgaccttgaggaaccctgggagctcaggaaggaaggagcacccagaagcagggacagggagctggttggggaggaccagaaatcaggttatcaatactctggctgaccatcgtcatcgtgggactgactttggtggaagtccttggttacttatcattactgtgtttctgagaagttataaatttgccatctccctctgcacaagttacctttgtgtgtctttcctgaagactatcttcccgtctcaaaatggacatgatggatccacggatgtacagcagagagccaggaggtccaactgccgtagacaggaaggaattaaaattgtcctggaagacatctttactttatggagacaggtggaaaccaaagttcgagctaaaatccgtaagatgaaggtgacaacaaaagtcaaccgtcatgacaaaatcaatggaaagaggaagaccgccaaagaacatctgaggaaactaagcatgaaagaacgtgagcacggagaaaaggagaggcaggtgtcagaggcagaggaaaatgggaaattggatatgaaagaaatacacacctacatggaaatgtttcaacgtgcgcaagcgttgcggcggcgggcagaggactactacagatgcaaaatcaccccttctgcaagaaagcctctttgcaaccggctgtcggcagtactcagtggaagggtgatattatgacactgacactgctattttgaaacctggaggatggaaaggtgcaaaaatctatcaccagcaacagaaggtgcagactgtgttggtggcggtaattttgtccatcaaatgaatatgtgtgaaaacattccctcctttggccctacaggtcagaatggcggcagtggagcatcgtcattcttcaggattgccctactggccctacctcacagctgaaactttaaaaaacaggatgggccaccagccacctcctccaactcaacaacattctataattgataactccctgagcctcaagacaccttccgagtgtgtgctctatccccttccaccctcagcggatgataatctcaagacacctcccgagtgtctgctcactccccttccaccctcagctctaccctcagcggatgataatctcaagacacctgccgagtgcctgctctatccccttccaccctcagcggatgataatctcaagacacctcccgagtgtctgctcactccccttccaccctcagctccaccctcagcggatgataatctcaagacacctcctgagtgtgtctgctcactccccttccaccctcagcggatgataatctcaagaaactaaggaagaataaataaataatataaaaataaaa

SEQ ID NO: 312086 - DNA, 3126 bp, Homo sapiens
gggctgcggcagtgccatctctcacagcacacgaagcaccgggatgatcctcctagtagaagctctgcattcaggcgtcaactccggtgtcggtttccgggcagactcccaccccgacgtgccgggctcagtgcccagtgctacccaaacccagagcacccctacttcccggcaggcgtgtgacctgcgcgttctgccccaggccgctacctgtctgaggaacccgagccctacctggcagtctacctgcactcggagccccggcccaatgagcgcaactgctcggctagcaggaggatccgcccagagtccctccagggtgccgaccaccggccctacaccttcttcatttccccggggaccagagacccagtggggagttaccgtctgaacctctccagccacttccgctggtcggcgctggaggtgtccgtgggcttgtacacgtccctgtgccagtacttcagcgaggaggacgtggtgtggcggacagaggggctgctgcccctggaggagacctcgccccgccaggccgtctgcctcacccgccacctcaccgccttcggcaccagcctcttcgtgcccccaagccatatccgctttgtgtttcctgagccaacagcggatgtaaactacatcgtcatgctgacatgtgctgtgtgcctggtgacctacatggtcatggccgccatcctgcacaagctggaccagttggatgccagccggggctgcgccatccccttctgtgggcagcggggccgcttcaagtacgagatcctcgtcaagacaggctggggccggggctcaggtaccacggcccacgtgggcatcatgctgtatggggtggacagccggagcggccaccggcacctggacggcgacagagccttccaccgcaacagtctggacatcttccagatcgccaccccgcacagcctgggtagcgtgtggaagatccgagtgtggcacgacaacaaaggtctgtatggaccctgccaagctctgcccctctgcccctgcattggggcgccctgcgaacctgacctccctcccgcgcctctgcagggctcagccctgcctggttcctgcagcacatcatcgtcagggacctgcagacggcacgcagcaccttcttcctggtcaatgactggctttcggtggagacggaggccaacgggggcctggtggagaaggaggtgctggccgcgagtaaggcctcgttccgtgttcccactccgtgggaggttgggcagggtggtcctgccccgtggcctcctgcagtgcggccctccctgccttctaggtcacgcagccctgttgcgcttccggcgcctgctggtggctgagctgcagcgtggcttctttgacaagcacatctggctctccatatgggaccggccgcctcgtagctgtttcactcgcatccagagggccacctgctgcgttctcctcatctgtctcttcctgggcgccaacgccgtgtggtacggggctgttggagactctgcctacagcacggggcgtgtgtccaggctgaacccgctgagcgtcgacacagtcgctgttggcctggtgtccagcgtggttgtctatcccgtctacctggccatcctctttctcttccggatgtcccggagcaaggtggctgggagcccgagccccacacctgccgggcagcaggtgctggacgtcgacagctgcctggactcatccgtgctggacagctccttcctcacgttctcaggcctccacgctgaggtgagggctctactgggggtcctgccgccttggcgcagcttggactcaagaccctgtgcacctctcagcaggcctttgctggacagatgaagagtgacttgtttctggatgattctaagaggttgatggacggatggctacatggatgtgatggagatggtttactatcgggaccttccgcatcctgctgatgttttgttgcttaggatatgaatggctgagcggaggctgtaaaacctggcactctgcttgggtatgaggttcttcctgccatcctgccatcatttgttttttatgttttgtcgccaaaagtgaccttgaggaaccctgggagctcaggaaggaaggagcacccagaagcagggacagggagctggttggggaggaccagaaatcaggttatcaatactctggctgaccatcgtcatcgtgggactgactttggtggaagtccttggttacttatcattactgtgtttctgagaagttataaatttgccatctccctctgcacaagttacctttgtgtgtctttcctgaagactatcttcccgtctcaaaatggacatgatggatccacggatgtacagcagagagccaggaggtccaactgccgtagacaggaaggaattaaaattgtcctggaagacatctttactttatggagacaggtggaaaccaaagttcgagctaaaatccgtaagatgaaggtgacaacaaaagtcaaccgtcatgacaaaatcaatggaaagaggaagaccgccaaagaacaggaaatgtttcaacgtgcgcaagcgttgcggcggcgggcagaggactactacagatgcaaaatcaccccttctgcaagaaagcctctttgcaaccgggtcagaatggcggcagtggagcatcgtcattcttcaggattgccctactggccctacctcacagctgaaactttaaaaaacaggatgggccaccagccacctcctccaactcaacaacattctataattgataactccctgagcctcaagacaccttccgagtgtgtgctctatccccttccaccctcagcggatgataatctcaagacacctcccgagtgtctgctcactccccttccaccctcagctctaccctcagcggatgataatctcaagacacctgccgagtgcctgctctatccccttccaccctcagcggatgataatctcaagacacctcccgagtgtctgctcactccccttccaccctcagctccaccctcagcggatgataatctcaagacacctcctgagtgtgtctgctcactccccttccaccctcagcggatgataatctcaagaaactaaggaagaataaataaataatataaaaataaaa

SEQ ID NO: 312087 - DNA, 3869 bp, Homo sapiens
gggctgcggcagtgccatctctcacagcacacgaagcaccgggatgatcctcctagtagaagctctgcattcaggcgtcaactccggtgtcggtttccgggcagactcccaccccgacgtgccgggctcagtgcccagtgctacccaaacccagagcacccctacttcccggcaggcgtgtgacctgcgcgttctgccccaggccgctacctgtctgaggaacccgagccctacctggcagtctacctgcactcggagccccggcccaatgagcgcaactgctcggctagcaggaggatccgcccagagtccctccagggtgccgaccaccggccctacaccttcttcatttccccggggaccagagacccagtggggagttaccgtctgaacctctccagccacttccgctggtcggcgctggaggtgtccgtgggcttgtacacgtccctgtgccagtacttcagcgaggaggacgtggtgtggcggacagaggggctgctgcccctggaggagacctcgccccgccaggccgtctgcctcacccgccacctcaccgccttcggcaccagcctcttcgtgcccccaagccatatccgctttgtgtttcctgagccaacagcggatgtaaactacatcgtcatgctgacatgtgctgtgtgcctggtgacctacatggtcatggccgccatcctgcacaagctggaccagttggatgccagccggggctgcgccatccccttctgtgggcagcggggccgcttcaagtacgagatcctcgtcaagacaggctggggccggggctcaggtaccacggcccacgtgggcatcatgctgtatggggtggacagccggagcggccaccggcacctggacggcgacagagccttccaccgcaacagtctggacatcttccagatcgccaccccgcacagcctgggtagcgtgtggaagatccgagtgtggcacgacaacaaaggtctgtatggaccctgccaagctctgcccctctgcccctgcattggggcgccctgcgaacctgacctccctcccgcgcctctgcagggctcagccctgcctggttcctgcagcacatcatcgtcagggacctgcagacggcacgcagcaccttcttcctggtcaatgactggctttcggtggagacggaggccaacgggggcctggtggagaaggaggtgctggccgcgagtaaggcctcgttccgtgttcccactccgtgggaggttgggcagggtggtcctgccccgtggcctcctgcagtgcggccctccctgccttctaggtcacgcagccctgttgcgcttccggcgcctgctggtggctgagctgcagcgtggcttctttgacaagcacatctggctctccatatgggaccggccgcctcgtagctgtttcactcgcatccagagggccacctgctgcgttctcctcatctgtctcttcctgggcgccaacgccgtgtggtacggggctgttggagactctgcctacagcacggggcgtgtgtccaggctgaacccgctgagcgtcgacacagtcgctgttggcctggtgtccagcgtggttgtctatcccgtctacctggccatcctctttctcttccggatgtcccggagcaaggtggctgggagcccgagccccacacctgccgggcagcaggtgctggacgtcgacagctgcctggactcatccgtgctggacagctccttcctcacgttctcaggcctccacgctgaggtgagggctctactgggggtcctgccgccttggcgcagcttggactcaagaccctgtgcacctctcagcaggcctttgctggacagatgaagagtgacttgtttctggatgattctaagaggttgatggacggatggctacatggatgtgatggagatggtttactatcgggaccttccgcatcctgctgatgttttgttgcttaggatatgaatggctgagcggaggctgtaaaacctggcactctgcttgggtatgaggttcttcctgccatcctgccatcatttgttttttatgttttgtcgccaaaagtgaccttgaggaaccctgggagctcaggaaggaaggagcacccagaagcagggacagggagctggttggggaggaccagaaatcagtagagactgggtttcaccgtgttcgccaggatagtctccatgtcttgacctcgtgatctgcctgcctcggcctcccagtgctgggattacaggcgtgagccaccgcgcctggccaaaatatataaccttaagtgttatcaatactctggctgaccatcgtcatcgtgggactgactttggtggaagtccttggttacttatcattactgtgtttctgagaagttataaatttgccatctccctctgcacaagttacctttgtgtgtctttcctgaagactatcttcccgtctcaaaatggacatgatggatccacggatgtacagcagagagccaggaggtccaactgccgtagacaggaaggaattaaaattgtcctggaagacatctttactttatggagacaggtggaaaccaaagttcgagctaaaatccgtaagatgaaggtgacaacaaaagtcaaccgtcatgacaaaatcaatggaaagaggaagaccgccaaagaacatctgaggaaactaagcatgaaagaacgtgagcacggagaaaaggagaggcaggtgtcagaggcagaggaaaatgggaaattggatatgaaagaaatacacacctacatggaaatgtttcaacgtgcgcaagcgttgcggcggcgggcagaggactactacagatgcaaaatcaccccttctgcaagaaagcctctttgcaaccgggtcagaatggcggcagtggagcatcgtcattcttcaggattgccctactggccctacctcacagctgaaactttaaaaaacaggatgggccaccagccacctcctccaactcaacaacattctataattgataactccctgagcctcaagacaccttccgagtgtgtgctctatccccttccaccctcagcggatgataatctcaagacacctcccgagtgtctgctcactccccttccaccctcagctctaccctcagcggatgataatctcaagacacctgccgagtgcctgctctatccccttccaccctcagcggatgataatctcaagacacctcccgagtgtctgctcactccccttccaccctcagctccaccctcagcggatgataatctcaagacacctcctgagtgtgtctgctcactccccttccaccctcagcggatgataatctcaagaaactaaggaagaataaataaataatataaaaataaaaaaaaaataaaacataaaataaataaagaaaaaacaaaaagaaaccaagaaaacacaaaaaacaacaaataagaacagaaccaaccacacgcggaatgacagacacatacacagcaagaacacgatacaagaatcacacacataaacagcacaaagaaacgcgcggcgcggccgacaccagaagaccaaacacccgacgaggggcggggccgccgctaacaagctacgcagcagagcatgtacacaaggagaagacggagggccgacagcacgccagagaacgaggaccgccacacaaaacaccaccagaccgaagcgggccggagacgacggctcgggccctcaagaagagcacgcgggggcgcgaagccagaaacaacaagcagaaggaggcggcgacgaaactacgacggcagggcagcacaacacccaactcctacgatggagaggggacgtcagagaaaagagagactgaagagaggaaaacagacgcggaggcaaag

SEQ ID NO: 312088 - DNA, 3439 bp, Homo sapiens
gggctgcggcagtgccatctctcacagcacacgaagcaccgggatgatcctcctagtagaagctctgcattcaggcgtcaactccggtgtcggtttccgggcagactcccaccccgacgtgccgggctcagtgcccagtgctacccaaacccagagcacccctacttcccggcaggcgtgtgacctgcgcgttctgccccaggccgctacctgtctgaggaacccgagccctacctggcagtctacctgcactcggagccccggcccaatgagcgcaactgctcggctagcaggaggatccgcccagagtccctccagggtgccgaccaccggccctacaccttcttcatttccccggggaccagagacccagtggggagttaccgtctgaacctctccagccacttccgctggtcggcgctggaggtgtccgtgggcttgtacacgtccctgtgccagtacttcagcgaggaggacgtggtgtggcggacagaggggctgctgcccctggaggagacctcgccccgccaggccgtctgcctcacccgccacctcaccgccttcggcaccagcctcttcgtgcccccaagccatatccgctttgtgtttcctgagccaacagcggatgtaaactacatcgtcatgctgacatgtgctgtgtgcctggtgacctacatggtcatggccgccatcctgcacaagctggaccagttggatgccagccggggctgcgccatccccttctgtgggcagcggggccgcttcaagtacgagatcctcgtcaagacaggctggggccggggctcaggtaccacggcccacgtgggcatcatgctgtatggggtggacagccggagcggccaccggcacctggacggcgacagagccttccaccgcaacagtctggacatcttccagatcgccaccccgcacagcctgggtagcgtgtggaagatccgagtgtggcacgacaacaaaggtctgtatggaccctgccaagctctgcccctctgcccctgcattggggcgccctgcgaacctgacctccctcccgcgcctctgcagggctcagccctgcctggttcctgcagcacatcatcgtcagggacctgcagacggcacgcagcaccttcttcctggtcaatgactggctttcggtggagacggaggccaacgggggcctggtggagaaggaggtgctggccgcgagtaaggcctcgttccgtgttcccactccgtgggaggttgggcagggtggtcctgccccgtggcctcctgcagtgcggccctccctgccttctaggtcacgcagccctgttgcgcttccggcgcctgctggtggctgagctgcagcgtggcttctttgacaagcacatctggctctccatatgggaccggccgcctcgtagctgtttcactcgcatccagagggccacctgctgcgttctcctcatctgtctcttcctgggcgccaacgccgtgtggtacggggctgttggagactctgcctacagcacggggcgtgtgtccaggctgaacccgctgagcgtcgacacagtcgctgttggcctggtgtccagcgtggttgtctatcccgtctacctggccatcctctttctcttccggatgtcccggagcaaggtggctgggagcccgagccccacacctgccgggcagcaggtgctggacgtcgacagctgcctggactcatccgtgctggacagctccttcctcacgttctcaggcctccacgctgaggtgagggctctactgggggtcctgccgccttggcgcagcttggactcaagaccctgtgcacctctcagcaggcctttgctggacagatgaagagtgacttgtttctggatgattctaagaggttgatggacggatggctacatggatgtgatggagatggtttactatcgggaccttccgcatcctgctgatgttttgttgcttaggatatgaatggctgagcggaggctgtaaaacctggcactctgcttgggtatgaggttcttcctgccatcctgccatcatttgttttttatgttttgtcgccaaaagtgaccttgaggaaccctgggagctcaggaaggaaggagcacccagaagcagggacagggagctggttggggaggaccagaaatcaggttatcaatactctggctgaccatcgtcatcgtgggactgactttggtggaagtccttggttacttatcattactgtgtttctgagaagttataaatttgccatctccctctgcacaagttacctttgtgtgtctttcctgaagactatcttcccgtctcaaaatggacatgatggatccacggatgtacagcagagagccaggaggtccaactgccgtagacaggaaggaattaaaattgtcctggaagacatctttactttatggagacaggtggaaaccaaagttcgagctaaaatccgtaagatgaaggtgacaacaaaagtcaaccgtcatgacaaaatcaatggaaagaggaagaccgccaaagaacatctgaggaaactaagcatgaaagaacgtgagcacggagaaaaggagaggcaggtgtcagaggcagaggaaaatgggaaattggatatgaaagaaatacacacctacatggaaatgtttcaacgtgcgcaagcgttgcggcggcgggcagaggactactacagatgcaaaatcaccccttctgcaagaaagcctctttgcaaccggctgtcggcagtactcagtggaagggtgatattatgacactgacactgctattttgaaacctggaggatggaaaggtgcaaaaatctatcaccagcaacagaaggtgcagactgtgttggtggcggtaattttgtccatcaaatgaatatgtgtgaaaacattccctcctttggccctacaggtcagaatggcggcagtggagcatcgtcattcttcaggattgccctactggccctacctcacagctgaaactttaaaaaacaggatgggccaccagccacctcctccaactcaacaacattctataattgataactccctgagcctcaagacaccttccgagtgtgtgctctatccccttccaccctcagcggatgataatctcaagacacctcccgagtgtctgctcactccccttccaccctcagctctaccctcagcggatgataatctcaagacacctgccgagtgcctgctctatccccttccaccctcagcggatgataatctcaagacacctcccgagtgtctgctcactccccttccaccctcagctccaccctcagcggatgataatctcaagacacctcctgagtgtgtctgctcactccccttccaccctcagcggatgataatctcaagaaactaaggaagaataaataaataatataaaaataaaatgaatactgcagtccttaaaaaaa

SEQ ID NO: 312089 - DNA, 3294 bp, Homo sapiens
gggctgcggcagtgccatctctcacagcacacgaagcaccgggatgatcctcctagtagaagctctgcattcaggcgtcaactccggtgtcggtttccgggcagactcccaccccgacgtgccgggctcagtgcccagtgctacccaaacccagagcacccctacttcccggcaggcgtgtgacctgcgcgttctgccccaggccgctacctgtctgaggaacccgagccctacctggcagtctacctgcactcggagccccggcccaatgagcgcaactgctcggctagcaggaggatccgcccagagtccctccagggtgccgaccaccggccctacaccttcttcatttccccggggaccagagacccagtggggagttaccgtctgaacctctccagccacttccgctggtcggcgctggaggtgtccgtgggcttgtacacgtccctgtgccagtacttcagcgaggaggacgtggtgtggcggacagaggggctgctgcccctggaggagacctcgccccgccaggccgtctgcctcacccgccacctcaccgccttcggcaccagcctcttcgtgcccccaagccatatccgctttgtgtttcctgagccaacagcggatgtaaactacatcgtcatgctgacatgtgctgtgtgcctggtgacctacatggtcatggccgccatcctgcacaagctggaccagttggatgccagccggggctgcgccatccccttctgtgggcagcggggccgcttcaagtacgagatcctcgtcaagacaggctggggccggggctcaggtaccacggcccacgtgggcatcatgctgtatggggtggacagccggagcggccaccggcacctggacggcgacagagccttccaccgcaacagtctggacatcttccagatcgccaccccgcacagcctgggtagcgtgtggaagatccgagtgtggcacgacaacaaaggtctgtatggaccctgccaagctctgcccctctgcccctgcattggggcgccctgcgaacctgacctccctcccgcgcctctgcagggctcagccctgcctggttcctgcagcacatcatcgtcagggacctgcagacggcacgcagcaccttcttcctggtcaatgactggctttcggtggagacggaggccaacgggggcctggtggagaaggaggtgctggccgcgagtaaggcctcgttccgtgttcccactccgtgggaggttgggcagggtggtcctgccccgtggcctcctgcagtgcggccctccctgccttctaggtcacgcagccctgttgcgcttccggcgcctgctggtggctgagctgcagcgtggcttctttgacaagcacatctggctctccatatgggaccggccgcctcgtagctgtttcactcgcatccagagggccacctgctgcgttctcctcatctgtctcttcctgggcgccaacgccgtgtggtacggggctgttggagactctgcctacagcacggggcgtgtgtccaggctgaacccgctgagcgtcgacacagtcgctgttggcctggtgtccagcgtggttgtctatcccgtctacctggccatcctctttctcttccggatgtcccggagcaaggtggctgggagcccgagccccacacctgccgggcagcaggtgctggacgtcgacagctgcctggactcatccgtgctggacagctccttcctcacgttctcaggcctccacgctgaggtgagggctctactgggggtcctgccgccttggcgcagcttggactcaagaccctgtgcacctctcagcaggcctttgctggacagatgaagagtgacttgtttctggatgattctaagaggttgatggacggatggctacatggatgtgatggagatggtttactatcgggaccttccgcatcctgctgatgttttgttgcttaggatatgaatggctgagcggaggctgtaaaacctggcactctgcttgggtatgaggttcttcctgccatcctgccatcatttgttttttatgttttgtcgccaaaagtgaccttgaggaaccctgggagctcaggaaggaaggagcacccagaagcagggacagggagctggttggggaggaccagaaatcagtagagactgggtttcaccgtgttcgccaggatagtctccatgtcttgacctcgtgatctgcctgcctcggcctcccagtgctgggattacaggcgtgagccaccgcgcctggccaaaatatataaccttaagtgttatcaatactctggctgaccatcgtcatcgtgggactgactttggtggaagtccttggttacttatcattactgtgtttctgagaagttataaatttgccatctccctctgcacaagttacctttgtgtgtctttcctgaagactatcttcccgtctcaaaatggacatgatggatccacggatgtacagcagagagccaggaggtccaactgccgtagacaggaaggaattaaaattgtcctggaagacatctttactttatggagacaggtggaaaccaaagttcgagctaaaatccgtaagatgaaggtgacaacaaaagtcaaccgtcatgacaaaatcaatggaaagaggaagaccgccaaagaacatctgaggaaactaagcatgaaagaacgtgagcacggagaaaaggagaggcaggtgtcagaggcagaggaaaatgggaaattggatatgaaagaaatacacacctacatggaaatgtttcaacgtgcgcaagcgttgcggcggcgggcagaggactactacagatgcaaaatcaccccttctgcaagaaagcctctttgcaaccgggtcagaatggcggcagtggagcatcgtcattcttcaggattgccctactggccctacctcacagctgaaactttaaaaaacaggatgggccaccagccacctcctccaactcaacaacattctataattgataactccctgagcctcaagacaccttccgagtgtgtgctctatccccttccaccctcagcggatgataatctcaagacacctcccgagtgtctgctcactccccttccaccctcagctctaccctcagcggatgataatctcaagacacctgccgagtgcctgctctatccccttccaccctcagcggatgataatctcaagacactgagtgtgtctgctcactccccttccaccctcagcggatgataatctcaagaaactaaggaagaataaataaataatataaaaataaaa

SEQ ID NO: 312090 - DNA, 3358 bp, Homo sapiens
gggctgcggcagtgccatctctcacagcacacgaagcaccgggatgatcctcctagtagaagctctgcattcaggcgtcaactccggtgtcggtttccgggcagactcccaccccgacgtgccgggctcagtgcccagtgctacccaaacccagagcacccctacttcccggcaggcgtgtgacctgcgcgttctgccccaggccgctacctgtctgaggaacccgagccctacctggcagtctacctgcactcggagccccggcccaatgagcgcaactgctcggctagcaggaggatccgcccagagtccctccagggtgccgaccaccggccctacaccttcttcatttccccggggaccagagacccagtggggagttaccgtctgaacctctccagccacttccgctggtcggcgctggaggtgtccgtgggcttgtacacgtccctgtgccagtacttcagcgaggaggacgtggtgtggcggacagaggggctgctgcccctggaggagacctcgccccgccaggccgtctgcctcacccgccacctcaccgccttcggcaccagcctcttcgtgcccccaagccatatccgctttgtgtttcctgagccaacagcggatgtaaactacatcgtcatgctgacatgtgctgtgtgcctggtgacctacatggtcatggccgccatcctgcacaagctggaccagttggatgccagccggggctgcgccatccccttctgtgggcagcggggccgcttcaagtacgagatcctcgtcaagacaggctggggccggggctcaggtaccacggcccacgtgggcatcatgctgtatggggtggacagccggagcggccaccggcacctggacggcgacagagccttccaccgcaacagtctggacatcttccagatcgccaccccgcacagcctgggtagcgtgtggaagatccgagtgtggcacgacaacaaaggtctgtatggaccctgccaagctctgcccctctgcccctgcattggggcgccctgcgaacctgacctccctcccgcgcctctgcagggctcagccctgcctggttcctgcagcacatcatcgtcagggacctgcagacggcacgcagcaccttcttcctggtcaatgactggctttcggtggagacggaggccaacgggggcctggtggagaaggaggtgctggccgcgagtaaggcctcgttccgtgttcccactccgtgggaggttgggcagggtggtcctgccccgtggcctcctgcagtgcggccctccctgccttctaggtcacgcagccctgttgcgcttccggcgcctgctggtggctgagctgcagcgtggcttctttgacaagcacatctggctctccatatgggaccggccgcctcgtagctgtttcactcgcatccagagggccacctgctgcgttctcctcatctgtctcttcctgggcgccaacgccgtgtggtacggggctgttggagactctgcctacagcacggggcgtgtgtccaggctgaacccgctgagcgtcgacacagtcgctgttggcctggtgtccagcgtggttgtctatcccgtctacctggccatcctctttctcttccggatgtcccggagcaaggtggctgggagcccgagccccacacctgccgggcagcaggtgctggacgtcgacagctgcctggactcatccgtgctggacagctccttcctcacgttctcaggcctccacgctgaggtgagggctctactgggggtcctgccgccttggcgcagcttggactcaagaccctgtgcacctctcagcaggcctttgctggacagatgaagagtgacttgtttctggatgattctaagaggttgatggacggatggctacatggatgtgatggagatggtttactatcgggaccttccgcatcctgctgatgttttgttgcttaggatatgaatggctgagcggaggctgtaaaacctggcactctgcttgggtatgaggttcttcctgccatcctgccatcatttgttttttatgttttgtcgccaaaagtgaccttgaggaaccctgggagctcaggaaggaaggagcacccagaagcagggacagggagctggttggggaggaccagaaatcaggttatcaatactctggctgaccatcgtcatcgtgggactgactttggtggaagtccttggttacttatcattactgtgtttctgagaagttataaatttgccatctccctctgcacaagttacctttgtgtgtctttcctgaagactatcttcccgtctcaaaatggacatgatggatccacggatgtacagcagagagccaggaggtccaactgccgtagacaggaaggaattaaaattgtcctggaagacatctttactttatggagacaggtggaaaccaaagttcgagctaaaatccgtaagatgaaggtgacaacaaaagtcaaccgtcatgacaaaatcaatggaaagaggaagaccgccaaagaacatctgaggaaactaagcatgaaagaacgtgagcacggagaaaaggagaggcaggtgtcagaggcagaggaaaatgggaaattggatatgaaagaaatacacacctacatggaaatgtttcaacgtgcgcaagcgttgcggcggcgggcagaggactactacagatgcaaaatcaccccttctgcaagaaagcctctttgcaaccggctgtcggcagtactcagtggaagggtgatattatgacactgacactgctattttgaaacctggaggatggaaaggtgcaaaaatctatcaccagcaacagaaggtgcagactgtgttggtggcggtaattttgtccatcaaatgaatatgtgtgaaaacattccctcctttggccctacaggtcagaatggcggcagtggagcatcgtcattcttcaggattgccctactggccctacctcacagctgaaactttaaaaaacaggatgggccaccagccacctcctccaactcaacaacattctataattgataactccctgagcctcaagacaccttccgagtgtctgctcactccccttccaccctcagctctaccctcagcggatgataatctcaagacacctgccgagtgcctgctctatccccttccaccctcagcggatgataatctcaagacacctcccgagtgtctgctcactccccttccaccctcagctccaccctcagcggatgataatctcaagacacctcctgagtgtgtctgctcactccccttccaccctcagcggatgataatctcaagaaactaaggaagaataaataaataatataaaaataaaa

SEQ ID NO: 312091 - DNA, 3280 bp, Homo sapiens
gggctgcggcagtgccatctctcacagcacacgaagcaccgggatgatcctcctagtagaagctctgcattcaggcgtcaactccggtgtcggtttccgggcagactcccaccccgacgtgccgggctcagtgcccagtgctacccaaacccagagcacccctacttcccggcaggcgtgtgacctgcgcgttctgccccaggccgctacctgtctgaggaacccgagccctacctggcagtctacctgcactcggagccccggcccaatgagcgcaactgctcggctagcaggaggatccgcccagagtccctccagggtgccgaccaccggccctacaccttcttcatttccccggggaccagagacccagtggggagttaccgtctgaacctctccagccacttccgctggtcggcgctggaggtgtccgtgggcttgtacacgtccctgtgccagtacttcagcgaggaggacgtggtgtggcggacagaggggctgctgcccctggaggagacctcgccccgccaggccgtctgcctcacccgccacctcaccgccttcggcaccagcctcttcgtgcccccaagccatatccgctttgtgtttcctgagccaacagcggatgtaaactacatcgtcatgctgacatgtgctgtgtgcctggtgacctacatggtcatggccgccatcctgcacaagctggaccagttggatgccagccggggctgcgccatccccttctgtgggcagcggggccgcttcaagtacgagatcctcgtcaagacaggctggggccggggctcaggtaccacggcccacgtgggcatcatgctgtatggggtggacagccggagcggccaccggcacctggacggcgacagagccttccaccgcaacagtctggacatcttccagatcgccaccccgcacagcctgggtagcgtgtggaagatccgagtgtggcacgacaacaaaggtctgtatggaccctgccaagctctgcccctctgcccctgcattggggcgccctgcgaacctgacctccctcccgcgcctctgcagggctcagccctgcctggttcctgcagcacatcatcgtcagggacctgcagacggcacgcagcaccttcttcctggtcaatgactggctttcggtggagacggaggccaacgggggcctggtggagaaggaggtgctggccgcgagtaaggcctcgttccgtgttcccactccgtgggaggttgggcagggtggtcctgccccgtggcctcctgcagtgcggccctccctgccttctaggtcacgcagccctgttgcgcttccggcgcctgctggtggctgagctgcagcgtggcttctttgacaagcacatctggctctccatatgggaccggccgcctcgtagctgtttcactcgcatccagagggccacctgctgcgttctcctcatctgtctcttcctgggcgccaacgccgtgtggtacggggctgttggagactctgcctacagcacggggcgtgtgtccaggctgaacccgctgagcgtcgacacagtcgctgttggcctggtgtccagcgtggttgtctatcccgtctacctggccatcctctttctcttccggatgtcccggagcaaggtggctgggagcccgagccccacacctgccgggcagcaggtgctggacgtcgacagctgcctggactcatccgtgctggacagctccttcctcacgttctcaggcctccacgctgaggtgagggctctactgggggtcctgccgccttggcgcagcttggactcaagaccctgtgcacctctcagcaggcctttgctggacagatgaagagtgacttgtttctggatgattctaagaggttgatggacggatggctacatggatgtgatggagatggtttactatcgggaccttccgcatcctgctgatgttttgttgcttaggatatgaatggctgagcggaggctgtaaaacctggcactctgcttgggtatgaggttcttcctgccatcctgccatcatttgttttttatgttttgtcgccaaaagtgaccttgaggaaccctgggagctcaggaaggaaggagcacccagaagcagggacagggagctggttggggaggaccagaaatcaggttatcaatactctggctgaccatcgtcatcgtgggactgactttggtggaagtccttggttacttatcattactgtgtttctgagaagttataaatttgccatctccctctgcacaagttacctttgtgtgtctttcctgaagactatcttcccgtctcaaaatggacatgatggatccacggatgtacagcagagagccaggaggtccaactgccgtagacaggaaggaattaaaattgtcctggaagacatctttactttatggagacaggtggaaaccaaagttcgagctaaaatccgtaagatgaaggtgacaacaaaagtcaaccgtcatgacaaaatcaatggaaagaggaagaccgccaaagaacatctgaggaaactaagcatgaaagaacgtgagcacggagaaaaggagaggcaggtgtcagaggcagaggaaaatgggaaattggatatgaaagaaatacacacctacatggaaatgtttcaacgtgcgcaagcgttgcggcggcgggcagaggactactacagatgcaaaatcaccccttctgcaagaaagcctctttgcaaccggctgtcggcagtactcagtggaagggtgatattatgacactgacactgctattttgaaacctggaggatggaaaggtgcaaaaatctatcaccagcaacagaaggtcagaatggcggcagtggagcatcgtcattcttcaggattgccctactggccctacctcacagctgaaactttaaaaaacaggatgggccaccagccacctcctccaactcaacaacattctataattgataactccctgagcctcaagacaccttccgagtgtctgctcactccccttccaccctcagctctaccctcagcggatgataatctcaagacacctgccgagtgcctgctctatccccttccaccctcagcggatgataatctcaagacacctcccgagtgtctgctcactccccttccaccctcagctccaccctcagcggatgataatctcaagacacctcctgagtgtgtctgctcactccccttccaccctcagcggatgataatctcaagaaactaaggaagaataaataaataatataaaaataaaa

SEQ ID NO: 312092 - DNA, 3047 bp, Homo sapiens
gggctgcggcagtgccatctctcacagcacacgaagcaccgggatgatcctcctagtagaagctctgcattcaggcgtcaactccggtgtcggtttccgggcagactcccaccccgacgtgccgggctcagtgcccagtgctacccaaacccagagcacccctacttcccggcaggcgtgtgacctgcgcgttctgccccaggccgctacctgtctgaggaacccgagccctacctggcagtctacctgcactcggagccccggcccaatgagcgcaactgctcggctagcaggaggatccgcccagagtccctccagggtgccgaccaccggccctacaccttcttcatttccccggggaccagagacccagtggggagttaccgtctgaacctctccagccacttccgctggtcggcgctggaggtgtccgtgggcttgtacacgtccctgtgccagtacttcagcgaggaggacgtggtgtggcggacagaggggctgctgcccctggaggagacctcgccccgccaggccgtctgcctcacccgccacctcaccgccttcggcaccagcctcttcgtgcccccaagccatatccgctttgtgtttcctgagccaacagcggatgtaaactacatcgtcatgctgacatgtgctgtgtgcctggtgacctacatggtcatggccgccatcctgcacaagctggaccagttggatgccagccggggctgcgccatccccttctgtgggcagcggggccgcttcaagtacgagatcctcgtcaagacaggctggggccggggctcaggtaccacggcccacgtgggcatcatgctgtatggggtggacagccggagcggccaccggcacctggacggcgacagagccttccaccgcaacagtctggacatcttccagatcgccaccccgcacagcctgggtagcgtgtggaagatccgagtgtggcacgacaacaaaggtctgtatggaccctgccaagctctgcccctctgcccctgcattggggcgccctgcgaacctgacctccctcccgcgcctctgcagggctcagccctgcctggttcctgcagcacatcatcgtcagggacctgcagacggcacgcagcaccttcttcctggtcaatgactggctttcggtggagacggaggccaacgggggcctggtggagaaggaggtgctggccgcgagtaaggcctcgttccgtgttcccactccgtgggaggttgggcagggtggtcctgccccgtggcctcctgcagtgcggccctccctgccttctaggtcacgcagccctgttgcgcttccggcgcctgctggtggctgagctgcagcgtggcttctttgacaagcacatctggctctccatatgggaccggccgcctcgtagctgtttcactcgcatccagagggccacctgctgcgttctcctcatctgtctcttcctgggcgccaacgccgtgtggtacggggctgttggagactctgcctacagcacggggcgtgtgtccaggctgaacccgctgagcgtcgacacagtcgctgttggcctggtgtccagcgtggttgtctatcccgtctacctggccatcctctttctcttccggatgtcccggagcaaggtggctgggagcccgagccccacacctgccgggcagcaggtgctggacgtcgacagctgcctggactcatccgtgctggacagctccttcctcacgttctcaggcctccacgctgaggtgagggctctactgggggtcctgccgccttggcgcagcttggactcaagaccctgtgcacctctcagcaggcctttgctggacagatgaagagtgacttgtttctggatgattctaagaggttgatggacggatggctacatggatgtgatggagatggtttactatcgggaccttccgcatcctgctgatgttttgttgcttaggatatgaatggctgagcggaggctgtaaaacctggcactctgcttgggtatgaggttcttcctgccatcctgccatcatttgttttttatgttttgtcgccaaaagtgaccttgaggaaccctgggagctcaggaaggaaggagcacccagaagcagggacagggagctggttggggaggaccagaaatcaggttatcaatactctggctgaccatcgtcatcgtgggactgactttggtggaagtccttggttacttatcattactgtgtttctgagaagttataaatttgccatctccctctgcacaagttacctttgtgtgtctttcctgaagactatcttcccgtctcaaaatggacatgatggatccacggatgtacagcagagagccaggaggtccaactgccgtagacaggaaggaattaaaattgtcctggaagacatctttactttatggagacaggtggaaaccaaagttcgagctaaaatccgtaagatgaaggtgacaacaaaagtcaaccgtcatgacaaaatcaatggaaagaggaagaccgccaaagaacatctgaggaaactaagcatgaaagaacgtgagcacggagaaaaggagaggcaggtgtcagaggcagaggaaaatgggaaattggatatgaaagaaatacacacctacatggaaatgtttcaacgtgcgcaagcgttgcggcggcgggcagaggactactacagatgcaaaatcaccccttctgcaagaaagcctctttgcaaccggcagcggatgataatctcaagacacctcccgagtgtctgctcactccccttccaccctcagctctaccctcagcggatgataatctcaagacacctgccgagtgcctgctctatccccttccaccctcagcggatgataatctcaagacacctcccgagtgtctgctcactccccttccaccctcagctccaccctcagcggatgataatctcaagacacctcctgagtgtgtctgctcactccccttccaccctcagcggatgataatctcaagaaactaaggaagaataaataaataatataaaaataaaa

SEQ ID NO: 312093 - DNA, 3174 bp, Homo sapiens
gggctgcggcagtgccatctctcacagcacacgaagcaccgggatgatcctcctagtagaagctctgcattcaggcgtcaactccggtgtcggtttccgggcagactcccaccccgacgtgccgggctcagtgcccagtgctacccaaacccagagcacccctacttcccggcaggcgtgtgacctgcgcgttctgccccaggccgctacctgtctgaggaacccgagccctacctggcagtctacctgcactcggagccccggcccaatgagcgcaactgctcggctagcaggaggatccgcccagagtccctccagggtgccgaccaccggccctacaccttcttcatttccccggggaccagagacccagtggggagttaccgtctgaacctctccagccacttccgctggtcggcgctggaggtgtccgtgggcttgtacacgtccctgtgccagtacttcagcgaggaggacgtggtgtggcggacagaggggctgctgcccctggaggagacctcgccccgccaggccgtctgcctcacccgccacctcaccgccttcggcaccagcctcttcgtgcccccaagccatatccgctttgtgtttcctgagccaacagcggatgtaaactacatcgtcatgctgacatgtgctgtgtgcctggtgacctacatggtcatggccgccatcctgcacaagctggaccagttggatgccagccggggctgcgccatccccttctgtgggcagcggggccgcttcaagtacgagatcctcgtcaagacaggctggggccggggctcaggtaccacggcccacgtgggcatcatgctgtatggggtggacagccggagcggccaccggcacctggacggcgacagagccttccaccgcaacagtctggacatcttccagatcgccaccccgcacagcctgggtagcgtgtggaagatccgagtgtggcacgacaacaaaggtctgtatggaccctgccaagctctgcccctctgcccctgcattggggcgccctgcgaacctgacctccctcccgcgcctctgcagggctcagccctgcctggttcctgcagcacatcatcgtcagggacctgcagacggcacgcagcaccttcttcctggtcaatgactggctttcggtggagacggaggccaacgggggcctggtggagaaggaggtgctggccgcgagtaaggcctcgttccgtgttcccactccgtgggaggttgggcagggtggtcctgccccgtggcctcctgcagtgcggccctccctgccttctaggtcacgcagccctgttgcgcttccggcgcctgctggtggctgagctgcagcgtggcttctttgacaagcacatctggctctccatatgggaccggccgcctcgtagctgtttcactcgcatccagagggccacctgctgcgttctcctcatctgtctcttcctgggcgccaacgccgtgtggtacggggctgttggagactctgcctacagcacggggcgtgtgtccaggctgaacccgctgagcgtcgacacagtcgctgttggcctggtgtccagcgtggttgtctatcccgtctacctggccatcctctttctcttccggatgtcccggagcaaggtggctgggagcccgagccccacacctgccgggcagcaggtgctggacgtcgacagctgcctggactcatccgtgctggacagctccttcctcacgttctcaggcctccacgctgaggtgagggctctactgggggtcctgccgccttggcgcagcttggactcaagaccctgtgcacctctcagcaggcctttgctggacagatgaagagtgacttgtttctggatgattctaagaggttgatggacggatggctacatggatgtgatggagatggtttactatcgggaccttccgcatcctgctgatgttttgttgcttaggatatgaatggctgagcggaggctgtaaaacctggcactctgcttgggtatgaggttcttcctgccatcctgccatcatttgttttttatgttttgtcgccaaaagtgaccttgaggaaccctgggagctcaggaaggaaggagcacccagaagcagggacagggagctggttggggaggaccagaaatcagtagagactgggtttcaccgtgttcgccaggatagtctccatgtcttgacctcgtgatctgcctgcctcggcctcccagtgctgggattacaggcgtgagccaccgcgcctggccaaaatatataaccttaagtgttatcaatactctggctgaccatcgtcatcgtgggactgactttggtggaagtccttggttacttatcattactgtgtttctgagaagttataaatttgccatctccctctgcacaagttacctttgtgtgtctttcctgaagactatcttcccgtctcaaaatggacatgatggatccacggatgtacagcagagagccaggaggtccaactgccgtagacaggaaggaattaaaattgtcctggaagacatctttactttatggagacaggtggaaaccaaagttcgagctaaaatccgtaagatgaaggtgacaacaaaagtcaaccgtcatgacaaaatcaatggaaagaggaagaccgccaaagaacatctgaggaaactaagcatgaaagaacgtgagcacggagaaaaggagaggcaggtgtcagaggcagaggaaaatgggaaattggatatgaaagaaatacacacctacatggaaatgtttcaacgtgcgcaagcgttgcggcggcgggcagaggactactacagatgcaaaatcaccccttctgcaagaaagcctctttgcaaccgggtcagaatggcggcagtggagcatcgtcattcttcaggattgccctactggccctacctcacagctgaaactttaaaaaacaggatgggccaccagccacctcctccaactcaacaacattctataattgataactccctgagcctcaagacaccttccgagtgtgtgctctatccccttccaccctcagcggatgataatctcaagacacctcccgtgagtgtgtctgctcactccccttccaccctcagcggatgataatctcaagaaactaaggaagaataaataaataatataaaaataaaa

SEQ ID NO: 312094 - DNA, 3286 bp, Homo sapiens
gggctgcggcagtgccatctctcacagcacacgaagcaccgggatgatcctcctagtagaagctctgcattcaggcgtcaactccggtgtcggtttccgggcagactcccaccccgacgtgccgggctcagtgcccagtgctacccaaacccagagcacccctacttcccggcaggcgtgtgacctgcgcgttctgccccaggccgctacctgtctgaggaacccgagccctacctggcagtctacctgcactcggagccccggcccaatgagcgcaactgctcggctagcaggaggatccgcccagagtccctccagggtgccgaccaccggccctacaccttcttcatttccccggggaccagagacccagtggggagttaccgtctgaacctctccagccacttccgctggtcggcgctggaggtgtccgtgggcttgtacacgtccctgtgccagtacttcagcgaggaggacgtggtgtggcggacagaggggctgctgcccctggaggagacctcgccccgccaggccgtctgcctcacccgccacctcaccgccttcggcaccagcctcttcgtgcccccaagccatatccgctttgtgtttcctgagccaacagcggatgtaaactacatcgtcatgctgacatgtgctgtgtgcctggtgacctacatggtcatggccgccatcctgcacaagctggaccagttggatgccagccggggctgcgccatccccttctgtgggcagcggggccgcttcaagtacgagatcctcgtcaagacaggctggggccggggctcaggtaccacggcccacgtgggcatcatgctgtatggggtggacagccggagcggccaccggcacctggacggcgacagagccttccaccgcaacagtctggacatcttccagatcgccaccccgcacagcctgggtagcgtgtggaagatccgagtgtggcacgacaacaaaggtctgtatggaccctgccaagctctgcccctctgcccctgcattggggcgccctgcgaacctgacctccctcccgcgcctctgcagggctcagccctgcctggttcctgcagcacatcatcgtcagggacctgcagacggcacgcagcaccttcttcctggtcaatgactggctttcggtggagacggaggccaacgggggcctggtggagaaggaggtgctggccgcgagtaaggcctcgttccgtgttcccactccgtgggaggttgggcagggtggtcctgccccgtggcctcctgcagtgcggccctccctgccttctaggtcacgcagccctgttgcgcttccggcgcctgctggtggctgagctgcagcgtggcttctttgacaagcacatctggctctccatatgggaccggccgcctcgtagctgtttcactcgcatccagagggccacctgctgcgttctcctcatctgtctcttcctgggcgccaacgccgtgtggtacggggctgttggagactctgcctacagcacggggcgtgtgtccaggctgaacccgctgagcgtcgacacagtcgctgttggcctggtgtccagcgtggttgtctatcccgtctacctggccatcctctttctcttccggatgtcccggagcaaggtggctgggagcccgagccccacacctgccgggcagcaggtgctggacgtcgacagctgcctggactcatccgtgctggacagctccttcctcacgttctcaggcctccacgctgaggtgagggctctactgggggtcctgccgccttggcgcagcttggactcaagaccctgtgcacctctcagcaggcctttgctggacagatgaagagtgacttgtttctggatgattctaagaggttgatggacggatggctacatggatgtgatggagatggtttactatcgggaccttccgcatcctgctgatgttttgttgcttaggatatgaatggctgagcggaggctgtaaaacctggcactctgcttgggtatgaggttcttcctgccatcctgccatcatttgttttttatgttttgtcgccaaaagtgaccttgaggaaccctgggagctcaggaaggaaggagcacccagaagcagggacagggagctggttggggaggaccagaaatcaggttatcaatactctggctgaccatcgtcatcgtgggactgactttggtggaagtccttggttacttatcattactgtgtttctgagaagttataaatttgccatctccctctgcacaagttacctttgtgtgtctttcctgaagactatcttcccgtctcaaaatggacatgatggatccacggatgtacagcagagagccaggaggtccaactgccgtagacaggaaggaattaaaattgtcctggaagacatctttactttatggagacaggtggaaaccaaagttcgagctaaaatccgtaagatgaaggtgacaacaaaagtcaaccgtcatgacaaaatcaatggaaagaggaagaccgccaaagaacatctgaggaaactaagcatgaaagaacgtgagcacggagaaaaggagaggcaggtgtcagaggcagaggaaaatgggaaattggatatgaaagaaatacacacctacatggaaatgtttcaacgtgcgcaagcgttgcggcggcgggcagaggactactacagatgcaaaatcaccccttctgcaagaaagcctctttgcaaccggctgtcggcagtactcagtggaagggtgatattatgacactgacactgctattttgaaacctggaggatggaaaggtgcaaaaatctatcaccagcaacagaaggtgcagactgtgttggtggcggtaattttgtccatcaaatgaatatgtgtgaaaacattccctcctttggccctacaggtcagaatggcggcagtggagcatcgtcattcttcaggattgccctactggccctacctcacagctgaaactttaaaaaacaggatgggccaccagccacctcctccaactcaacaacattctataattgataactccctgagcctcaagacaccttccgagtgtgtgctctatccccttccaccctcagcggatgataatctcaagacacctcccgagtgtctgctcactccccttccaccctctccaccctcagcggatgataatctcaagacacctcctgagtgtgtctgctcactccccttccaccctcagcggatgataatctcaagaaactaaggaagaataaataaataatataaaaataaaa

SEQ ID NO: 312095 - DNA, 564 bp, Homo sapiens
atgcattctgggggtggcaggatgagtggtgcgaccaagtctccttttgaccctcctgagtgtccaggccgattgtctcttcttccctcagctgcagctcccacacctctgctgggaggctgtccgattcacacaccccctcagcgggggggcttgttcctctgtctcctccaactcaacaacattctataattgataactccctgagcctcaagacaccttccgagtgtgtgctctatccccttccaccctcagcggatgataatctcaagacacctcccgagtgtctgctcactccccttccaccctcagctctaccctcagcggatgataatctcaagacacctgccgagtgcctgctctatccccttccaccctcagcggatgataatctcaagacacctcccgagtgtctgctcactccccttccaccctcagctccaccctcagcggatgataatctcaagacacctcctgagtgtgtctgctcactccccttccaccctcagcggatgataatctcaagaaactaaggaagaataaataaataatataaaaataaaa

SEQ ID NO: 312096 - DNA, 2351 bp, Homo sapiens
gggctgcggcagtgccatctctcacagcacacgaagcaccgggatgatcctcctagtagaagctctgcattcaggcgtcaactccggtgtcggtttccgggcagactcccaccccgacgtgccgggctcagtgcccagtgctacccaaacccagagcacccctacttcccggcaggcgtgtgacctgcgcgttctgccccaggccgctacctgtctgaggaacccgagccctacctggcagtctacctgcactcggagccccggcccaatgagcgcaactgctcggctagcaggaggatccgcccagagtccctccagggtgccgaccaccggccctacaccttcttcatttccccggggaccagagacccagtggggagttaccgtctgaacctctccagccacttccgctggtcggcgctggaggtgtccgtgggcttgtacacgtccctgtgccagtacttcagcgaggaggacgtggtgtggcggacagaggggctgctgcccctggaggagacctcgccccgccaggccgtctgcctcacccgccacctcaccgccttcggcaccagcctcttcgtgcccccaagccatatccgctttgtgtttcctgagccaacagcggatgtaaactacatcgtcatgctgacatgtgctgtgtgcctggtgacctacatggtcatggccgccatcctgcacaagctggaccagttggatgccagccggggctgcgccatccccttctgtgggcagcggggccgcttcaagtacgagatcctcgtcaagacaggctggggccggggctcaggtaccacggcccacgtgggcatcatgctgtatggggtggacagccggagcggccaccggcacctggacggcgacagagccttccaccgcaacagtctggacatcttccagatcgccaccccgcacagcctgggtagcgtgtggaagatccgagtgtggcacgacaacaaaggtctgtatggaccctgccaagctctgcccctctgcccctgcattggggcgccctgcgaacctgacctccctcccgcgcctctgcagggctcagccctgcctggttcctgcagcacatcatcgtcagggacctgcagacggcacgcagcaccttcttcctggtcaatgactggctttcggtggagacggaggccaacgggggcctggtggagaaggaggtgctggccgcgagtaaggcctcgttccgtgttcccactccgtgggaggttgggcagggtggtcctgccccgtggcctcctgcagtgcggccctccctgccttctaggtcacgcagccctgttgcgcttccggcgcctgctggtggctgagctgcagcgtggcttctttgacaagcacatctggctctccatatgggaccggccgcctcgtagctgtttcactcgcatccagagggccacctgctgcgttctcctcatctgtctcttcctgggcgccaacgccgtgtggtacggggctgttggagactctgcctacagcacggggcgtgtgtccaggctgaacccgctgagcgtcgacacagtcgctgttggcctggtgtccagcgtggttgtctatcccgtctacctggccatcctctttctcttccggatgtcccggagcaaggtggctgggagcccgagccccacacctgccgggcagcaggtgctggacgtcgacagctgcctggactcatccgtgctggacagctccttcctcacgttctcaggcctccacgctgaggtgagggctctactgggggtcctgccgccttggcgcagcttggactcaagaccctgtgcacctctcagcaggcctttgctggacagatgaagagtgacttgtttctggatgattctaagaggttgatggacggatggctacatggatgtgatggagatggtttactatcgggaccttccgcatcctgctgatgttttgttgcttaggatatgaatggctgagcggaggctgtaaaacctggcactctgcttgggtatgaggttcttcctgccatcctgccatcatttgttttttatgttttgtcgccaaaagtgaccttgaggaaccctgggagctcaggaaggaaggagcacccagaagcagggacagggagctggttggggaggaccagaaatcaggttatcaatactctggctgaccatcgtcatcgtgggactgactttggtggaagtccttggttacttatcattactgtgtttctgagaagttataaatttgccatctccctctgcacaagttacctttgtgtgagtatactaactttctgtagaggtatacttgtaatcacaaataagaataaattatatgaaaca

SEQ ID NO: 312097 - DNA, 2324 bp, Homo sapiens
gggctgcggcagtgccatctctcacagcacacgaagcaccgggatgatcctcctagtagaagctctgcattcaggcgtcaactccggtgtcggtttccgggcagactcccaccccgacgtgccgggctcagtgcccagtgctacccaaacccagagcacccctacttcccggcaggcgtgtgacctgcgcgttctgccccaggccgctacctgtctgaggaacccgagccctacctggcagtctacctgcactcggagccccggcccaatgagcgcaactgctcggctagcaggaggatccgcccagagtccctccagggtgccgaccaccggccctacaccttcttcatttccccggggaccagagacccagtggggagttaccgtctgaacctctccagccacttccgctggtcggcgctggaggtgtccgtgggcttgtacacgtccctgtgccagtacttcagcgaggaggacgtggtgtggcggacagaggggctgctgcccctggaggagacctcgccccgccaggccgtctgcctcacccgccacctcaccgccttcggcaccagcctcttcgtgcccccaagccatatccgctttgtgtttcctgagccaacagcggatgtaaactacatcgtcatgctgacatgtgctgtgtgcctggtgacctacatggtcatggccgccatcctgcacaagctggaccagttggatgccagccggggctgcgccatccccttctgtgggcagcggggccgcttcaagtacgagatcctcgtcaagacaggctggggccggggctcaggtaccacggcccacgtgggcatcatgctgtatggggtggacagccggagcggccaccggcacctggacggcgacagagccttccaccgcaacagtctggacatcttccagatcgccaccccgcacagcctgggtagcgtgtggaagatccgagtgtggcacgacaacaaaggtctgtatggaccctgccaagctctgcccctctgcccctgcattggggcgccctgcgaacctgacctccctcccgcgcctctgcagggctcagccctgcctggttcctgcagcacatcatcgtcagggacctgcagacggcacgcagcaccttcttcctggtcaatgactggctttcggtggagacggaggccaacgggggcctggtggagaaggaggtgctggccgcgagtaaggcctcgttccgtgttcccactccgtgggaggttgggcagggtggtcctgccccgtggcctcctgcagtgcggccctccctgccttctaggtcacgcagccctgttgcgcttccggcgcctgctggtggctgagctgcagcgtggcttctttgacaagcacatctggctctccatatgggaccggccgcctcgtagctgtttcactcgcatccagagggccacctgctgcgttctcctcatctgtctcttcctgggcgccaacgccgtgtggtacggggctgttggagactctgcctacagcacggggcgtgtgtccaggctgaacccgctgagcgtcgacacagtcgctgttggcctggtgtccagcgtggttgtctatcccgtctacctggccatcctctttctcttccggatgtcccggagcaaggtggctgggagcccgagccccacacctgccgggcagcaggtgctggacgtcgacagctgcctggactcatccgtgctggacagctccttcctcacgttctcaggcctccacgctgaggtgagggctctactgggggtcctgccgccttggcgcagcttggactcaagaccctgtgcacctctcagcaggcctttgctggacagatgaagagtgacttgtttctggatgattctaagaggtgggttccctagagaaacctcgagccctggtgcaggtcactgtgtctggagtgccgggggtgtgcgggctgcgtgtccttgctgggtgtctgtggctccatgtggtcacaccacctgggagcaggtttgctcggaagcccagggtgtccgtgcgtgactggacgggggtgggctgtgtgtgtgacacatcccctggtaccttgctgacccgcgccacctgcagtctggtgtgctggccctccagcgagggaacgcccagttggccggacctgctcagtgacccgtccattgtgggtagcaatctgcggcacgacccccacttactgggtctctccttttacaaccaacacaaccgaaatctagggcttcttcttttttttttttttttttgagacagagtctcattccagcctgggtgacagagtgagaccccatctcaaaaac

SEQ ID NO: 312098 - DNA, 1988 bp, Homo sapiens
gggctgcggcagtgccatctctcacagcacacgaagcaccgggatgatcctcctagtagaagctctgcattcaggcgtcaactccggtgtcggtttccgggcagactcccaccccgacgtgccgggctcagtgcccagtgctacccaaacccagagcacccctacttcccggcaggcgtgtgacctgcgcgttctgccccaggccgctacctgtctgaggaacccgagccctacctggcagtctacctgcactcggagccccggcccaatgagcgcaactgctcggctagcaggaggatccgcccagagtccctccagggtgccgaccaccggccctacaccttcttcatttccccggggaccagagacccagtggggagttaccgtctgaacctctccagccacttccgctggtcggcgctggaggtgtccgtgggcttgtacacgtccctgtgccagtacttcagcgaggaggacgtggtgtggcggacagaggggctgctgcccctggaggagacctcgccccgccaggccgtctgcctcacccgccacctcaccgccttcggcaccagcctcttcgtgcccccaagccatatccgctttgtgtttcctgagccaacagcggatgtaaactacatcgtcatgctgacatgtgctgtgtgcctggtgacctacatggtcatggccgccatcctgcacaagctggaccagttggatgccagccggggctgcgccatccccttctgtgggcagcggggccgcttcaagtacgagatcctcgtcaagacaggctggggccggggctcaggtaccacggcccacgtgggcatcatgctgtatggggtggacagccggagcggccaccggcacctggacggcgacagagccttccaccgcaacagtctggacatcttccagatcgccaccccgcacagcctgggtagcgtgtggaagatccgagtgtggcacgacaacaaaggtctgtatggaccctgccaagctctgcccctctgcccctgcattggggcgccctgcgaacctgacctccctcccgcgcctctgcagggctcagccctgcctggttcctgcagcacatcatcgtcagggacctgcagacggcacgcagcaccttcttcctggtcaatgactggctttcggtggagacggaggccaacgggggcctggtggagaaggaggtgctggccgcgagtaaggcctcgttccgtgttcccactccgtgggaggttgggcagggtggtcctgccccgtggcctcctgcagtgcggccctccctgccttctaggtcacgcagccctgttgcgcttccggcgcctgctggtggctgagctgcagcgtggcttctttgacaagcacatctggctctccatatgggaccggccgcctcgtagctgtttcactcgcatccagagggccacctgctgcgttctcctcatctgtctcttcctgggcgccaacgccgtgtggtacggggctgttggagactctgcctacagcacggggcgtgtgtccaggctgaacccgctgagcgtcgacacagtcgctgttggcctggtgtccagcgtggttgtctatcccgtctacctggccatcctctttctcttccggatgtcccggagcaaggtgggctggggctggggacccgggagtactgggaatggagcctgggcctcggcaccatgcccagggccgccactttccagtgctgcagccagagggaaaggcgtccaccaaaggctgctcgggaagggtcaacacacttgagcagccttagctagactgaccagggagaaagagagaagactcagaagccagaatcgtgaaagaacgagggcacttcgctaagcagacgccacggacaactgcacagcagcacgccagataactcagaagaagcaagcacgcggctgtgcacgcttccgaaattgcactccagcctgggcgactgagtggagcggaactctgtctca

SEQ ID NO: 312099 - DNA, 1166 bp, Homo sapiens
cacgacggctgcggccgctggggttggagctattcgatggagttgagtgtttggtggagtccgaatcaggctctttgtcaaagtcctggtctggatcagacatacttctcagaggcacagtcacgctaggctccgatccacctgatgagggccacgagatgtagggcttgttcctggatggaggctggcgagccaggttggtgggagcggggcctggtggagaaggaggtgctgccgcgagtcacgcagccctgttgcgcttccggcgcctgctggtggctgagctgcagcgtggcttctttgacaagcacatctggctctccatatgggaccggccacctcgtagctgtttcactcgcatccagagggccacctgctgcgttctcctcatctgcctcttcctgggcgccaacgccgtgtggtacggggctgttggtgactctgcctacagcacggggcatgtgtccaggctgagcccgctgagcgtcgacacagtcgctgttggcctggtgtccagcgtggttgtctatcccgtctacctggccatcctctttctcttccggatgtcccggagcaaggtggctgggagcctgagccccacacctgccgggcagtaggtgctggacatcgacagctgcctggactcgtccgtgctggacagctccttcctcacgttctcaggcctccacgctgagcaggcctttgctggacaggtgaagagtgacttgtttctggatgattctaagagtgaccttgaggaaccctgggagctcaggaaggaaggagcgcccagaagcagggacagggagctggttggggaggaccagaaatcagtagagactgggtttcaccgtgttcgccaggatagtctccatgtcttgacctcgtgatctgcctgcctcggcctcccagtgctgggattacaggcgtgagccaccgcgcctggccaaaatatataaccttaagtgttatcaatactctggctgaccatcgtcatcgtgggactgactttggtggaagtccttggttacttatcattactgtgtttctgagaagttataaatttgccatctccctctgcacaagttacctttgtgtgagtatactaactttctgtagaggtatacttgtaatcacaaataagaataaattatatgaaacaattc

SEQ ID NO: 312100 - DNA, 487 bp, Homo sapiens
caccacctgggagcaggtttgctcggaagcccagggtgtccgtgcgtgactggacgggggtgggctgtgtgtgtgacacatcccctggtaccttgctgacccgcgccacctgcagtctggtgtgctggccctccagcgagggaacgcccagttggccggacctgctcagtgacccgtccattgtgggtagcaatctgcggcacgacccccacttactgggtctctccttttacaaccaacacaaccgaaatctagggcttcttcttttttttttttttttttgagacagagtctcattccattctgtcacccaggctggagtgcaatggtacgatctcggctcactgcaacctccgcctcccaggttcaagggattgtcctgcctcagcctcctgagtagctgggattacaggcgtgtgccaccatgcctggctaatttttgtatttttggtagagacggggtttcagcatgttggtgaggctggtc

SEQ ID NO: 312101 - DNA, 442 bp, Homo sapiens
ggagaaagagagaagactcagaagccagaatcgtgaaagaacgagggcacttcgctaagcagacgccacggacaactgcacagcagcacgccagataactcagaagaagcaagcacgcggctgtgcacgcttccgaaatgcactccagaagaaaatctcagtacatctatagcaagtgaagaggccgagttagtcccttagaaacctcccagtggccgggccgggtgtggtggctcacgcctgtaatcccaacacttcaggaggccgaggtgggcggatctgagtccaggagtttgagaccagcctgggcaacatagcaagaccccatctatataaaacattaaaaagggccaggcacggtggctcacgcctgtaatcccaacactttgggaggccgaggcgggcagatcagttgaggtcaggagttcgagaccagcctggc

SEQ ID NO: 312102 - DNA, 3367 bp, Homo sapiens
gggctgcggcagtgccatctctcacagcacacgaagcaccgggatgatcctcctagtagaagctctgcattcaggcgtcaactccggtgtcggtttccgggcagactcccaccccgacgtgccgggctcagtgcccagtgctacccaaacccagagcacccctacttcccggcaggcgtgtgacctgcgcgttctgccccaggccgctacctgtctgaggaacccgagccctacctggcagtctacctgcactcggagccccggcccaatgagcgcaactgctcggctagcaggaggatccgcccagagtccctccagggtgccgaccaccggccctacaccttcttcatttccccggggaccagagacccagtggggagttaccgtctgaacctctccagccacttccgctggtcggcgctggaggtgtccgtgggcttgtacacgtccctgtgccagtacttcagcgaggaggacgtggtgtggcggacagaggggctgctgcccctggaggagacctcgccccgccaggccgtctgcctcacccgccacctcaccgccttcggcaccagcctcttcgtgcccccaagccatatccgctttgtgtttcctgagccaacagcggatgtaaactacatcgtcatgctgacatgtgctgtgtgcctggtgacctacatggtcatggccgccatcctgcacaagctggaccagttggatgccagccggggctgcgccatccccttctgtgggcagcggggccgcttcaagtacgagatcctcgtcaagacaggctggggccggggctcaggtaccacggcccacgtgggcatcatgctgtatggggtggacagccggagcggccaccggcacctggacggcgacagagccttccaccgcaacagtctggacatcttccagatcgccaccccgcacagcctgggtagcgtgtggaagatccgagtgtggcacgacaacaaaggtctgtatggaccctgccaagctctgcccctctgcccctgcattggggcgccctgcgaacctgacctccctcccgcgcctctgcagggctcagccctgcctggttcctgcagcacatcatcgtcagggacctgcagacggcacgcagcaccttcttcctggtcaatgactggctttcggtggagacggaggccaacgggggcctggtggagaaggaggtgctggccgcgagtaaggcctcgttccgtgttcccactccgtgggaggttgggcagggtggtcctgccccgtggcctcctgcagtgcggccctccctgccttctaggtcacgcagccctgttgcgcttccggcgcctgctggtggctgagctgcagcgtggcttctttgacaagcacatctggctctccatatgggaccggccgcctcgtagctgtttcactcgcatccagagggccacctgctgcgttctcctcatctgtctcttcctgggcgccaacgccgtgtggtacggggctgttggagactctgcctacagcacggggcgtgtgtccaggctgaacccgctgagcgtcgacacagtcgctgttggcctggtgtccagcgtggttgtctatcccgtctacctggccatcctctttctcttccggatgtcccggagcaaggtggctgggagcccgagccccacacctgccgggcagcaggtgctggacgtcgacagctgcctggactcatccgtgctggacagctccttcctcacgttctcaggcctccacgctgaggtgagggctctactgggggtcctgccgccttggcgcagcttggactcaagaccctgtgcacctctcagcaggcctttgctggacagatgaagagtgacttgtttctggatgattctaagaggttgatggacggatggctacatggatgtgatggagatggtttactatcgggaccttccgcatcctgctgatgttttgttgcttaggatatgaatggctgagcggaggctgtaaaacctggcactctgcttgggtatgaggttcttcctgccatcctgccatcatttgttttttatgttttgtcgccaaaagtgaccttgaggaaccctgggagctcaggaaggaaggagcacccagaagcagggacagggagctggttggggaggaccagaaatcagtagagactgggtttcaccgtgttcgccaggatagtctccatgtcttgacctcgtgatctgcctgcctcggcctcccagtgctgggattacaggcgtgagccaccgcgcctggccaaaatatataaccttaagtgttatcaatactctggctgaccatcgtcatcgtgggactgactttggtggaagtccttggttacttatcattactgtgtttctgagaagttataaatttgccatctccctctgcacaagttacctttgtgtgtctttcctgaagactatcttcccgtctcaaaatggacatgatggatccacggatgtacagcagagagccaggaggtccaactgccgtagacaggaaggaattaaaattgtcctggaagacatctttactttatggagacaggtggaaaccaaagttcgagctaaaatccgtaagatgaaggtgacaacaaaagtcaaccgtcatgacaaaatcaatggaaagaggaagaccgccaaagaacatctgaggaaactaagcatgaaagaacgtgagcacggagaaaaggagaggcaggtgtcagaggcagaggaaaatgggaaattggatatgaaagaaatacacacctacatggaaatgtttcaacgtgcgcaagcgttgcggcggcgggcagaggactactacagatgcaaaatcaccccttctgcaagaaagcctctttgcaaccgggtcagaatggcggcagtggagcatcgtcattcttcaggattgccctactggccctacctcacagctgaaactttaaaaaacaggatgggccaccagccacctcctccaactcaacaacattctataattgataactccctgagcctcaagacaccttccgagtgtgtgctctatccccttccaccctcagcggatgataatctcaagacacctcccgagtgtctgctcactccccttccaccctcagctctaccctcagcggatgataatctcaagacacctgccgagtgcctgctctatccccttccaccctcagcggatgataatctcaagacacctcccgagtgtctgctcactccccttccaccctcagctccaccctcagcggatgataatctcaagacacctcctgagtgtgtctgctcactccccttccaccctcagcggatgataatctcaagaaactaaggaagaataaataaataatataaaaataaaa

SEQ ID NO: 312103 - DNA, 2957 bp, Homo sapiens
gggctgcggcagtgccatctctcacagcacacgaagcaccgggatgatcctcctagtagaagctctgcattcaggcgtcaactccggtgtcggtttccgggcagactcccaccccgacgtgccgggctcagtgcccagtgctacccaaacccagagcacccctacttcccggcaggcgtgtgacctgcgcgttctgccccaggccgctacctgtctgaggaacccgagccctacctggcagtctacctgcactcggagccccggcccaatgagcgcaactgctcggctagcaggaggatccgcccagagtccctccagggtgccgaccaccggccctacaccttcttcatttccccggggaccagagacccagtggggagttaccgtctgaacctctccagccacttccgctggtcggcgctggaggtgtccgtgggcttgtacacgtccctgtgccagtacttcagcgaggaggacgtggtgtggcggacagaggggctgctgcccctggaggagacctcgccccgccaggccgtctgcctcacccgccacctcaccgccttcggcaccagcctcttcgtgcccccaagccatatccgctttgtgtttcctgagccaacagcggatgtaaactacatcgtcatgctgacatgtgctgtgtgcctggtgacctacatggtcatggccgccatcctgcacaagctggaccagttggatgccagccggggctgcgccatccccttctgtgggcagcggggccgcttcaagtacgagatcctcgtcaagacaggctggggccggggctcaggtaccacggcccacgtgggcatcatgctgtatggggtggacagccggagcggccaccggcacctggacggcgacagagccttccaccgcaacagtctggacatcttccagatcgccaccccgcacagcctgggtagcgtgtggaagatccgagtgtggcacgacaacaaaggtctgtatggaccctgccaagctctgcccctctgcccctgcattggggcgccctgcgaacctgacctccctcccgcgcctctgcagggctcagccctgcctggttcctgcagcacatcatcgtcagggacctgcagacggcacgcagcaccttcttcctggtcaatgactggctttcggtggagacggaggccaacgggggcctggtggagaaggaggtgctggccgcgagtaaggcctcgttccgtgttcccactccgtgggaggttgggcagggtggtcctgccccgtggcctcctgcagtgcggccctccctgccttctaggtcacgcagccctgttgcgcttccggcgcctgctggtggctgagctgcagcgtggcttctttgacaagcacatctggctctccatatgggaccggccgcctcgtagctgtttcactcgcatccagagggccacctgctgcgttctcctcatctgtctcttcctgggcgccaacgccgtgtggtacggggctgttggagactctgcctacagcacggggcgtgtgtccaggctgaacccgctgagcgtcgacacagtcgctgttggcctggtgtccagcgtggttgtctatcccgtctacctggccatcctctttctcttccggatgtcccggagcaaggtggctgggagcccgagccccacacctgccgggcagcaggtgctggacgtcgacagctgcctggactcatccgtgctggacagctccttcctcacgttctcaggcctccacgctgaggtgagggctctactgggggtcctgccgccttggcgcagcttggactcaagaccctgtgcacctctcagcaggcctttgctggacagatgaagagtgacttgtttctggatgattctaagaggttatcaatactctggctgaccatcgtcatcgtgggactgactttggtggaagtccttggttacttatcattactgtgtttctgagaagttataaatttgccatctccctctgcacaagttacctttgtgtgtctttcctgaagactatcttcccgtctcaaaatggacatgatggatccacggatgtacagcagagagccaggaggtccaactgccgtagacaggaaggaattaaaattgtcctggaagacatctttactttatggagacaggtggaaaccaaagttcgagctaaaatccgtaagatgaaggtgacaacaaaagtcaaccgtcatgacaaaatcaatggaaagaggaagaccgccaaagaacatctgaggaaactaagcatgaaagaacgtgagcacggagaaaaggagaggcaggtgtcagaggcagaggaaaatgggaaattggatatgaaagaaatacacacctacatggaaatgtttcaacgtgcgcaagcgttgcggcggcgggcagaggactactacagatgcaaaatcaccccttctgcaagaaagcctctttgcaaccgggtcagaatggcggcagtggagcatcgtcattcttcaggattgccctactggccctacctcacagctgaaactttaaaaaacaggatgggccaccagccacctcctccaactcaacaacattctataattgataactccctgagcctcaagacaccttccgagtgtgtgctctatccccttccaccctcagcggatgataatctcaagacacctcccgagtgtctgctcactccccttccaccctcagctctaccctcagcggatgataatctcaagacacctgccgagtgcctgctctatccccttccaccctcagcggatgataatctcaagacacctcccgagtgtctgctcactccccttccaccctcagctccaccctcagcggatgataatctcaagacacctcctgagtgtgtctgctcactccccttccaccctcagcggatgataatctcaagaaactaaggaagaataaataaataatataaaaataaaa

SEQ ID NO: 312104 - DNA, 3043 bp, Homo sapiens
gggctgcggcagtgccatctctcacagcacacgaagcaccgggatgatcctcctagtagaagctctgcattcaggcgtcaactccggtgtcggtttccgggcagactcccaccccgacgtgccgggctcagtgcccagtgctacccaaacccagagcacccctacttcccggcaggcgtgtgacctgcgcgttctgccccaggccgctacctgtctgaggaacccgagccctacctggcagtctacctgcactcggagccccggcccaatgagcgcaactgctcggctagcaggaggatccgcccagagtccctccagggtgccgaccaccggccctacaccttcttcatttccccggggaccagagacccagtggggagttaccgtctgaacctctccagccacttccgctggtcggcgctggaggtgtccgtgggcttgtacacgtccctgtgccagtacttcagcgaggaggacgtggtgtggcggacagaggggctgctgcccctggaggagacctcgccccgccaggccgtctgcctcacccgccacctcaccgccttcggcaccagcctcttcgtgcccccaagccatatccgctttgtgtttcctgagccaacagcggatgtaaactacatcgtcatgctgacatgtgctgtgtgcctggtgacctacatggtcatggccgccatcctgcacaagctggaccagttggatgccagccggggctgcgccatccccttctgtgggcagcggggccgcttcaagtacgagatcctcgtcaagacaggctggggccggggctcaggtaccacggcccacgtgggcatcatgctgtatggggtggacagccggagcggccaccggcacctggacggcgacagagccttccaccgcaacagtctggacatcttccagatcgccaccccgcacagcctgggtagcgtgtggaagatccgagtgtggcacgacaacaaaggtctgtatggaccctgccaagctctgcccctctgcccctgcattggggcgccctgcgaacctgacctccctcccgcgcctctgcagggctcagccctgcctggttcctgcagcacatcatcgtcagggacctgcagacggcacgcagcaccttcttcctggtcaatgactggctttcggtggagacggaggccaacgggggcctggtggagaaggaggtgctggccgcgagtaaggcctcgttccgtgttcccactccgtgggaggttgggcagggtggtcctgccccgtggcctcctgcagtgcggccctccctgccttctaggtcacgcagccctgttgcgcttccggcgcctgctggtggctgagctgcagcgtggcttctttgacaagcacatctggctctccatatgggaccggccgcctcgtagctgtttcactcgcatccagagggccacctgctgcgttctcctcatctgtctcttcctgggcgccaacgccgtgtggtacggggctgttggagactctgcctacagcacggggcgtgtgtccaggctgaacccgctgagcgtcgacacagtcgctgttggcctggtgtccagcgtggttgtctatcccgtctacctggccatcctctttctcttccggatgtcccggagcaaggtggctgggagcccgagccccacacctgccgggcagcaggtgctggacgtcgacagctgcctggactcatccgtgctggacagctccttcctcacgttctcaggcctccacgctgaggtgagggctctactgggggtcctgccgccttggcgcagcttggactcaagaccctgtgcacctctcagcaggcctttgctggacagatgaagagtgacttgtttctggatgattctaagagtgaccttgaggaaccctgggagctcaggaaggaaggagcacccagaagcagggacagggagctggttggggaggaccagaaatcaggttatcaatactctggctgaccatcgtcatcgtgggactgactttggtggaagtccttggttacttatcattactgtgtttctgagaagttataaatttgccatctccctctgcacaagttacctttgtgtgtctttcctgaagactatcttcccgtctcaaaatggacatgatggatccacggatgtacagcagagagccaggaggtccaactgccgtagacaggaaggaattaaaattgtcctggaagacatctttactttatggagacaggtggaaaccaaagttcgagctaaaatccgtaagatgaaggtgacaacaaaagtcaaccgtcatgacaaaatcaatggaaagaggaagaccgccaaagaacatctgaggaaactaagcatgaaagaacgtgagcacggagaaaaggagaggcaggtgtcagaggcagaggaaaatgggaaattggatatgaaagaaatacacacctacatggaaatgtttcaacgtgcgcaagcgttgcggcggcgggcagaggactactacagatgcaaaatcaccccttctgcaagaaagcctctttgcaaccgggtcagaatggcggcagtggagcatcgtcattcttcaggattgccctactggccctacctcacagctgaaactttaaaaaacaggatgggccaccagccacctcctccaactcaacaacattctataattgataactccctgagcctcaagacaccttccgagtgtgtgctctatccccttccaccctcagcggatgataatctcaagacacctcccgagtgtctgctcactccccttccaccctcagctctaccctcagcggatgataatctcaagacacctgccgagtgcctgctctatccccttccaccctcagcggatgataatctcaagacacctcccgagtgtctgctcactccccttccaccctcagctccaccctcagcggatgataatctcaagacacctcctgagtgtgtctgctcactccccttccaccctcagcggatgataatctcaagaaactaaggaagaataaataaataatataaaaataaaa

SEQ ID NO: 312105 - DNA, 3391 bp, Homo sapiens
gggctgcggcagtgccatctctcacagcacacgaagcaccgggatgatcctcctagtagaagctctgcattcaggcgtcaactccggtgtcggtttccgggcagactcccaccccgacgtgccgggctcagtgcccagtgctacccaaacccagagcacccctacttcccggcaggcgtgtgacctgcgcgttctgccccaggccgctacctgtctgaggaacccgagccctacctggcagtctacctgcactcggagccccggcccaatgagcgcaactgctcggctagcaggaggatccgcccagagtccctccagggtgccgaccaccggccctacaccttcttcatttccccggggaccagagacccagtggggagttaccgtctgaacctctccagccacttccgctggtcggcgctggaggtgtccgtgggcttgtacacgtccctgtgccagtacttcagcgaggaggacgtggtgtggcggacagaggggctgctgcccctggaggagacctcgccccgccaggccgtctgcctcacccgccacctcaccgccttcggcaccagcctcttcgtgcccccaagccatatccgctttgtgtttcctgagccaacagcggatgtaaactacatcgtcatgctgacatgtgctgtgtgcctggtgacctacatggtcatggccgccatcctgcacaagctggaccagttggatgccagccggggctgcgccatccccttctgtgggcagcggggccgcttcaagtacgagatcctcgtcaagacaggctggggccggggctcaggtaccacggcccacgtgggcatcatgctgtatggggtggacagccggagcggccaccggcacctggacggcgacagagccttccaccgcaacagtctggacatcttccagatcgccaccccgcacagcctgggtagcgtgtggaagatccgagtgtggcacgacaacaaaggtctgtatggaccctgccaagctctgcccctctgcccctgcattggggcgccctgcgaacctgacctccctcccgcgcctctgcagggctcagccctgcctggttcctgcagcacatcatcgtcagggacctgcagacggcacgcagcaccttcttcctggtcaatgactggctttcggtggagacggaggccaacgggggcctggtggagaaggaggtgctggccgcgagtaaggcctcgttccgtgttcccactccgtgggaggttgggcagggtggtcctgccccgtggcctcctgcagtgcggccctccctgccttctaggtcacgcagccctgttgcgcttccggcgcctgctggtggctgagctgcagcgtggcttctttgacaagcacatctggctctccatatgggaccggccgcctcgtagctgtttcactcgcatccagagggccacctgctgcgttctcctcatctgtctcttcctgggcgccaacgccgtgtggtacggggctgttggagactctgcctacagcacggggcgtgtgtccaggctgaacccgctgagcgtcgacacagtcgctgttggcctggtgtccagcgtggttgtctatcccgtctacctggccatcctctttctcttccggatgtcccggagcaaggtggctgggagcccgagccccacacctgccgggcagcaggtgctggacgtcgacagctgcctggactcatccgtgctggacagctccttcctcacgttctcaggcctccacgctgaggtgagggctctactgggggtcctgccgccttggcgcagcttggactcaagaccctgtgcacctctcagcaggcctttgctggacagatgaagagtgacttgtttctggatgattctaagaggttgatggacggatggctacatggatgtgatggagatggtttactatcgggaccttccgcatcctgctgatgttttgttgcttaggatatgaatggctgagcggaggctgtaaaacctggcactctgcttgggtatgaggttcttcctgccatcctgccatcatttgttttttatgttttgtcgccaaaagtgaccttgaggaaccctgggagctcaggaaggaaggagcacccagaagcagggacagggagctggttggggaggaccagaaatcagtagagactgggtttcaccgtgttcgccaggatagtctccatgtcttgacctcgtgatctgcctgcctcggcctcccagtgctgggattacaggcgtgagccaccgcgcctggccaaaatatataaccttaagtgttatcaatactctggctgaccatcgtcatcgtgggactgactttggtggaagtccttggttacttatcattactgtgtttctgagaagttataaatttgccatctccctctgcacaagttacctttgtgtgtctttcctgaagactatcttcccgtctcaaaatggacatgatggatccacggatgtacagcagagagccaggaggtccaactgccgtagacaggaaggaattaaaattgtcctggaagacatctttactttatggagacaggtggaaaccaaagttcgagctaaaatccgtaagatgaaggtgacaacaaaagtcaaccgtcatgacaaaatcaatggaaagaggaagaccgccaaagaacatctgaggaaactaagcatgaaagaacgtgagcacggagaaaaggagaggcaggtgtcagaggcagaggaaaatgggaaattggatatgaaagaaatacacacctacatggaaatgtttcaacgtgcgcaagcgttgcggcggcgggcagaggactactacagatgcaaaatcaccccttctgcaagaaagcctctttgcaaccgggtcagaatggcggcagtggagcatcgtcattcttcaggattgccctactggccctacctcacagctgaaactttaaaaaacaggatgggccaccagccacctcctccaactcaacaacattctataattgataactccctgagcctcaagacaccttccgagtgtgtgctctatccccttccaccctcagcggatgataatctcaagacacctcccgagtgtctgctcactccccttccaccctcagctctaccctcagcggatgataatctcaagacacctgccgagtgcctgctctatccccttccaccctcagcggatgataatctcaagacacctcccgagtgtctgctcactccccttccaccctcagctccaccctcagcggatgataatctcaagacacctcctgagtgtgtctgctcactccccttccaccctcagcggatgataatctcaagaaactaaggaagaataaataaataatataaaaataaaatgaatactgcagtccttaaaaaaa

SEQ ID NO: 312106 - DNA, 3304 bp, Homo sapiens
gggctgcggcagtgccatctctcacagcacacgaagcaccgggatgatcctcctagtagaagctctgcattcaggcgtcaactccggtgtcggtttccgggcagactcccaccccgacgtgccgggctcagtgcccagtgctacccaaacccagagcacccctacttcccggcaggcgtgtgacctgcgcgttctgccccaggccgctacctgtctgaggaacccgagccctacctggcagtctacctgcactcggagccccggcccaatgagcgcaactgctcggctagcaggaggatccgcccagagtccctccagggtgccgaccaccggccctacaccttcttcatttccccggggaccagagacccagtggggagttaccgtctgaacctctccagccacttccgctggtcggcgctggaggtgtccgtgggcttgtacacgtccctgtgccagtacttcagcgaggaggacgtggtgtggcggacagaggggctgctgcccctggaggagacctcgccccgccaggccgtctgcctcacccgccacctcaccgccttcggcaccagcctcttcgtgcccccaagccatatccgctttgtgtttcctgagccaacagcggatgtaaactacatcgtcatgctgacatgtgctgtgtgcctggtgacctacatggtcatggccgccatcctgcacaagctggaccagttggatgccagccggggctgcgccatccccttctgtgggcagcggggccgcttcaagtacgagatcctcgtcaagacaggctggggccggggctcaggtaccacggcccacgtgggcatcatgctgtatggggtggacagccggagcggccaccggcacctggacggcgacagagccttccaccgcaacagtctggacatcttccagatcgccaccccgcacagcctgggtagcgtgtggaagatccgagtgtggcacgacaacaaaggtctgtatggaccctgccaagctctgcccctctgcccctgcattggggcgccctgcgaacctgacctccctcccgcgcctctgcagggctcagccctgcctggttcctgcagcacatcatcgtcagggacctgcagacggcacgcagcaccttcttcctggtcaatgactggctttcggtggagacggaggccaacgggggcctggtggagaaggaggtgctggccgcgagtaaggcctcgttccgtgttcccactccgtgggaggttgggcagggtggtcctgccccgtggcctcctgcagtgcggccctccctgccttctaggtcacgcagccctgttgcgcttccggcgcctgctggtggctgagctgcagcgtggcttctttgacaagcacatctggctctccatatgggaccggccgcctcgtagctgtttcactcgcatccagagggccacctgctgcgttctcctcatctgtctcttcctgggcgccaacgccgtgtggtacggggctgttggagactctgcctacagcacggggcgtgtgtccaggctgaacccgctgagcgtcgacacagtcgctgttggcctggtgtccagcgtggttgtctatcccgtctacctggccatcctctttctcttccggatgtcccggagcaaggtggctgggagcccgagccccacacctgccgggcagcaggtgctggacgtcgacagctgcctggactcatccgtgctggacagctccttcctcacgttctcaggcctccacgctgaggtgagggctctactgggggtcctgccgccttggcgcagcttggactcaagaccctgtgcacctctcagcaggcctttgctggacagatgaagagtgacttgtttctggatgattctaagaggttgatggacggatggctacatggatgtgatggagatggtttactatcgggaccttccgcatcctgctgatgttttgttgcttaggatatgaatggctgagcggaggctgtaaaacctggcactctgcttgggtatgaggttcttcctgccatcctgccatcatttgttttttatgttttgtcgccaaaagtgaccttgaggaaccctgggagctcaggaaggaaggagcacccagaagcagggacagggagctggttggggaggaccagaaatcaggttatcaatactctggctgaccatcgtcatcgtgggactgactttggtggaagtccttggttacttatcattactgtgtttctgagaagttataaatttgccatctccctctgcacaagttacctttgtgtgtctttcctgaagactatcttcccgtctcaaaatggacatgatggatccacggatgtacagcagagagccaggaggtccaactgccgtagacaggaaggaattaaaattgtcctggaagacatctttactttatggagacaggtggaaaccaaagttcgagctaaaatccgtaagatgaaggtgacaacaaaagtcaaccgtcatgacaaaatcaatggaaagaggaagaccgccaaagaacatctgaggaaactaagcatgaaagaacgtgagcacggagaaaaggagaggcaggtgtcagaggcagaggaaaatgggaaattggatatgaaagaaatacacacctacatggaaatgtttcaacgtgcgcaagcgttgcggcggcgggcagaggactactacagatgcaaaatcaccccttctgcaagaaagcctctttgcaaccggtgcacttacaatttggtattacctgggagtgaaaagaaatattacagccatgcctaactgacttcttgaggtcagaatggcggcagtggagcatcgtcattcttcaggattgccctactggccctacctcacagctgaaactttaaaaaacaggatgggccaccagccacctcctccaactcaacaacattctataattgataactccctgagcctcaagacaccttccgagtgtgtgctctatccccttccaccctcagcggatgataatctcaagacacctcccgagtgtctgctcactccccttccaccctcagctctaccctcagcggatgataatctcaagacacctgccgagtgcctgctctatccccttccaccctcagcggatgataatctcaagacacctcccgagtgtctgctcactccccttccaccctcagctccaccctcagcggatgataatctcaagacacctcctgagtgtgtctgctcactccccttccaccctcagcggatgataatctcaagaaactaaggaagaataaataaataatataaaaataaaa

SEQ ID NO: 312107 - DNA, 3065 bp, Homo sapiens
gggctgcggcagtgccatctctcacagcacacgaagcaccgggatgatcctcctagtagaagctctgcattcaggcgtcaactccggtgtcggtttccgggcagactcccaccccgacgtgccgggctcagtgcccagtgctacccaaacccagagcacccctacttcccggcaggcgtgtgacctgcgcgttctgccccaggccgctacctgtctgaggaacccgagccctacctggcagtctacctgcactcggagccccggcccaatgagcgcaactgctcggctagcaggaggatccgcccagagtccctccagggtgccgaccaccggccctacaccttcttcatttccccggggaccagagacccagtggggagttaccgtctgaacctctccagccacttccgctggtcggcgctggaggtgtccgtgggcttgtacacgtccctgtgccagtacttcagcgaggaggacgtggtgtggcggacagaggggctgctgcccctggaggagacctcgccccgccaggccgtctgcctcacccgccacctcaccgccttcggcaccagcctcttcgtgcccccaagccatatccgctttgtgtttcctgagccaacagcggatgtaaactacatcgtcatgctgacatgtgctgtgtgcctggtgacctacatggtcatggccgccatcctgcacaagctggaccagttggatgccagccggggctgcgccatccccttctgtgggcagcggggccgcttcaagtacgagatcctcgtcaagacaggctggggccggggctcaggtaccacggcccacgtgggcatcatgctgtatggggtggacagccggagcggccaccggcacctggacggcgacagagccttccaccgcaacagtctggacatcttccagatcgccaccccgcacagcctgggtagcgtgtggaagatccgagtgtggcacgacaacaaaggtctgtatggaccctgccaagctctgcccctctgcccctgcattggggcgccctgcgaacctgacctccctcccgcgcctctgcagggctcagccctgcctggttcctgcagcacatcatcgtcagggacctgcagacggcacgcagcaccttcttcctggtcaatgactggctttcggtggagacggaggccaacgggggcctggtggagaaggaggtgctggccgcgagtaaggcctcgttccgtgttcccactccgtgggaggttgggcagggtggtcctgccccgtggcctcctgcagtgcggccctccctgccttctaggtcacgcagccctgttgcgcttccggcgcctgctggtggctgagctgcagcgtggcttctttgacaagcacatctggctctccatatgggaccggccgcctcgtagctgtttcactcgcatccagagggccacctgctgcgttctcctcatctgtctcttcctgggcgccaacgccgtgtggtacggggctgttggagactctgcctacagcacggggcgtgtgtccaggctgaacccgctgagcgtcgacacagtcgctgttggcctggtgtccagcgtggttgtctatcccgtctacctggccatcctctttctcttccggatgtcccggagcaaggtggctgggagcccgagccccacacctgccgggcagcaggtgctggacgtcgacagctgcctggactcatccgtgctggacagctccttcctcacgttctcaggcctccacgctgaggtgagggctctactgggggtcctgccgccttggcgcagcttggactcaagaccctgtgcacctctcagcaggcctttgctggacagatgaagagtgacttgtttctggatgattctaagaggttgatggacggatggctacatggatgtgatggagatggtttactatcgggaccttccgcatcctgctgatgttttgttgcttaggatatgaatggctgagcggaggctgtaaaacctggcactctgcttgggtatgaggttcttcctgccatcctgccatcatttgttttttatgttttgtcgccaaaagtgaccttgaggaaccctgggagctcaggaaggaaggagcacccagaagcagggacagggagctggttggggaggaccagaaatcaggttatcaatactctggctgaccatcgtcatcgtgggactgactttggtggaagtccttggttacttatcattactgtgtttctgagaagttataaatttgccatctccctctgcacaagttacctttgtgtgtctttcctgaagactatcttcccgtctcaaaatggacatgatggatccacggatgtacagcagagagccaggaggtccaactgccgtagacaggaaggaattaaaattgtcctggaagacatctttactttatggagacaggtggaaaccaaagttcgagctaaaatccgtaagatgaaggtgacaacaaaagtcaaccgtcatgacaaaatcaatggaaagaggaagaccgccaaagaacaatcaccccttctgcaagaaagcctctttgcaaccgggtcagaatggcggcagtggagcatcgtcattcttcaggattgccctactggccctacctcacagctgaaactttaaaaaacaggatgggccaccagccacctcctccaactcaacaacattctataattgataactccctgagcctcaagacaccttccgagtgtgtgctctatccccttccaccctcagcggatgataatctcaagacacctcccgagtgtctgctcactccccttccaccctcagctctaccctcagcggatgataatctcaagacacctgccgagtgcctgctctatccccttccaccctcagcggatgataatctcaagacacctcccgagtgtctgctcactccccttccaccctcagctccaccctcagcggatgataatctcaagacacctcctgagtgtgtctgctcactccccttccaccctcagcggatgataatctcaagaaactaaggaagaataaataaataatataaaaataaaa

SEQ ID NO: 312108 - DNA, 3196 bp, Homo sapiens
gggctgcggcagtgccatctctcacagcacacgaagcaccgggatgatcctcctagtagaagctctgcattcaggcgtcaactccggtgtcggtttccgggcagactcccaccccgacgtgccgggctcagtgcccagtgctacccaaacccagagcacccctacttcccggcaggcgtgtgacctgcgcgttctgccccaggccgctacctgtctgaggaacccgagccctacctggcagtctacctgcactcggagccccggcccaatgagcgcaactgctcggctagcaggaggatccgcccagagtccctccagggtgccgaccaccggccctacaccttcttcatttccccggggaccagagacccagtggggagttaccgtctgaacctctccagccacttccgctggtcggcgctggaggtgtccgtgggcttgtacacgtccctgtgccagtacttcagcgaggaggacgtggtgtggcggacagaggggctgctgcccctggaggagacctcgccccgccaggccgtctgcctcacccgccacctcaccgccttcggcaccagcctcttcgtgcccccaagccatatccgctttgtgtttcctgagccaacagcggatgtaaactacatcgtcatgctgacatgtgctgtgtgcctggtgacctacatggtcatggccgccatcctgcacaagctggaccagttggatgccagccggggctgcgccatccccttctgtgggcagcggggccgcttcaagtacgagatcctcgtcaagacaggctggggccggggctcaggtaccacggcccacgtgggcatcatgctgtatggggtggacagccggagcggccaccggcacctggacggcgacagagccttccaccgcaacagtctggacatcttccagatcgccaccccgcacagcctgggtagcgtgtggaagatccgagtgtggcacgacaacaaaggtctgtatggaccctgccaagctctgcccctctgcccctgcattggggcgccctgcgaacctgacctccctcccgcgcctctgcagggctcagccctgcctggttcctgcagcacatcatcgtcagggacctgcagacggcacgcagcaccttcttcctggtcaatgactggctttcggtggagacggaggccaacgggggcctggtggagaaggaggtgctggccgcgagtaaggcctcgttccgtgttcccactccgtgggaggttgggcagggtggtcctgccccgtggcctcctgcagtgcggccctccctgccttctaggtcacgcagccctgttgcgcttccggcgcctgctggtggctgagctgcagcgtggcttctttgacaagcacatctggctctccatatgggaccggccgcctcgtagctgtttcactcgcatccagagggccacctgctgcgttctcctcatctgtctcttcctgggcgccaacgccgtgtggtacggggctgttggagactctgcctacagcacggggcgtgtgtccaggctgaacccgctgagcgtcgacacagtcgctgttggcctggtgtccagcgtggttgtctatcccgtctacctggccatcctctttctcttccggatgtcccggagcaaggtggctgggagcccgagccccacacctgccgggcagcaggtgctggacgtcgacagctgcctggactcatccgtgctggacagctccttcctcacgttctcaggcctccacgctgaggtgagggctctactgggggtcctgccgccttggcgcagcttggactcaagaccctgtgcacctctcagcaggcctttgctggacagatgaagagtgacttgtttctggatgattctaagaggttgatggacggatggctacatggatgtgatggagatggtttactatcgggaccttccgcatcctgctgatgttttgttgcttaggatatgaatggctgagcggaggctgtaaaacctggcactctgcttgggtatgaggttcttcctgccatcctgccatcatttgttttttatgttttgtcgccaaaagtgaccttgaggaaccctgggagctcaggaaggaaggagcacccagaagcagggacagggagctggttggggaggaccagaaatcagtagagactgggtttcaccgtgttcgccaggatagtctccatgtcttgacctcgtgatctgcctgcctcggcctcccagtgctgggattacaggcgtgagccaccgcgcctggccaaaatatataaccttaagtgttatcaatactctggctgaccatcgtcatcgtgggactgactttggtggaagtccttggttacttatcattactgtgtttctgagaagttataaatttgccatctccctctgcacaagttacctttgtgtgtctttcctgaagactatcttcccgtctcaaaatggacatgatggatccacggatgtacagcagagagccaggaggtccaactgccgtagacaggaaggaattaaaattgtcctggaagacatctttactttatggagacaggtggaaaccaaagttcgagctaaaatccgtaagatgaaggtgacaacaaaagtcaaccgtcatgacaaaatcaatggaaagaggaagaccgccaaagaacatctgaggaaactaagcatgaaagaacgtgagcacggagaaaaggagaggcaggtgtcagaggcagaggaaaatgggaaattggatatgaaagaaatacacacctacatggaaatgtttcaacgtgcgcaagcgttgcggcggcgggcagaggactactacagatgcaaaatcaccccttctgcaagaaagcctctttgcaaccgggtcagaatggcggcagtggagcatcgtcattcttcaggattgccctactggccctacctcacagctgaaactttaaaaaacaggatgggccaccagccacctcctccaactcaacaacattctataattgataactccctgagcctcaagacaccttccgagtgtgtgctctatccccttccaccctcagcggatgataatctcaagacacctcccgagtgtctgctcactccccttccaccctcagctctaccctcagcggatgataatctcaagacacctgccgagtgcctgctctatgtcattttcagggatcctctagaacacc

SEQ ID NO: 312109 - DNA, 3499 bp, Homo sapiens
gggctgcggcagtgccatctctcacagcacacgaagcaccgggatgatcctcctagtagaagctctgcattcaggcgtcaactccggtgtcggtttccgggcagactcccaccccgacgtgccgggctcagtgcccagtgctacccaaacccagagcacccctacttcccggcaggcgtgtgacctgcgcgttctgccccaggccgctacctgtctgaggaacccgagccctacctggcagtctacctgcactcggagccccggcccaatgagcgcaactgctcggctagcaggaggatccgcccagagtccctccagggtgccgaccaccggccctacaccttcttcatttccccggggaccagagacccagtggggagttaccgtctgaacctctccagccacttccgctggtcggcgctggaggtgtccgtgggcttgtacacgtccctgtgccagtacttcagcgaggaggacgtggtgtggcggacagaggggctgctgcccctggaggagacctcgccccgccaggccgtctgcctcacccgccacctcaccgccttcggcaccagcctcttcgtgcccccaagccatatccgctttgtgtttcctgagccaacagcggatgtaaactacatcgtcatgctgacatgtgctgtgtgcctggtgacctacatggtcatggccgccatcctgcacaagctggaccagttggatgccagccggggctgcgccatccccttctgtgggcagcggggccgcttcaagtacgagatcctcgtcaagacaggctggggccggggctcaggtaccacggcccacgtgggcatcatgctgtatggggtggacagccggagcggccaccggcacctggacggcgacagagccttccaccgcaacagtctggacatcttccagatcgccaccccgcacagcctgggtagcgtgtggaagatccgagtgtggcacgacaacaaaggtctgtatggaccctgccaagctctgcccctctgcccctgcattggggcgccctgcgaacctgacctccctcccgcgcctctgcagggctcagccctgcctggttcctgcagcacatcatcgtcagggacctgcagacggcacgcagcaccttcttcctggtcaatgactggctttcggtggagacggaggccaacgggggcctggtggagaaggaggtgctggccgcgagtaaggcctcgttccgtgttcccactccgtgggaggttgggcagggtggtcctgccccgtggcctcctgcagtgcggccctccctgccttctaggtcacgcagccctgttgcgcttccggcgcctgctggtggctgagctgcagcgtggcttctttgacaagcacatctggctctccatatgggaccggccgcctcgtagctgtttcactcgcatccagagggccacctgctgcgttctcctcatctgtctcttcctgggcgccaacgccgtgtggtacggggctgttggagactctgcctacagcacggggcgtgtgtccaggctgaacccgctgagcgtcgacacagtcgctgttggcctggtgtccagcgtggttgtctatcccgtctacctggccatcctctttctcttccggatgtcccggagcaaggtggctgggagcccgagccccacacctgccgggcagcaggtgctggacgtcgacagctgcctggactcatccgtgctggacagctccttcctcacgttctcaggcctccacgctgaggtgagggctctactgggggtcctgccgccttggcgcagcttggactcaagaccctgtgcacctctcagcaggcctttgctggacagatgaagagtgacttgtttctggatgattctaagaggttgatggacggatggctacatggatgtgatggagatggtttactatcgggaccttccgcatcctgctgatgttttgttgcttaggatatgaatggctgagcggaggctgtaaaacctggcactctgcttgggtatgaggttcttcctgccatcctgccatcatttgttttttatgttttgtcgccaaaagtgaccttgaggaaccctgggagctcaggaaggaaggagcacccagaagcagggacagggagctggttggggaggaccagaaatcagtagagactgggtttcaccgtgttcgccaggatagtctccatgtcttgacctcgtgatctgcctgcctcggcctcccagtgctgggattacaggcgtgagccaccgcgcctggccaaaatatataaccttaagtgttatcaatactctggctgaccatcgtcatcgtgggactgactttggtggaagtccttggttacttatcattactgtgtttctgagaagttataaatttgccatctccctctgcacaagttacctttgtgtgtctttcctgaagactatcttcccgtctcaaaatggacatgatggatccacggatgtacagcagagagccaggaggtccaactgccgtagacaggaaggaattaaaattgtcctggaagacatctttactttatggagacaggtggaaaccaaagttcgagctaaaatccgtaagatgaaggtgacaacaaaagtcaaccgtcatgacaaaatcaatggaaagaggaagaccgccaaagaacatctgaggaaactaagcatgaaagaacgtgagcacggagaaaaggagaggcaggtgtcagaggcagaggaaaatgggaaattggatatgaaagaaatacacacctacatggaaatgtttcaacgtgcgcaagcgttgcggcggcgggcagaggactactacagatgcaaaatcaccccttctgcaagaaagcctctttgcaaccgggtcagaatggcggcagtggagcatcgtcattcttcaggattgccctactggccctacctcacagctgaaactttaaaaaacaggatgggccaccagccacctcctccaactcaacaacattctataattgataactccctgagcctcaagacaccttccgagtgtgtgctctatccccttccaccctcagcggatgataatctcaagacacctcccgagtgtctgctcactccccttccaccctccccgcctaattttttgtatttttagtagagacggggtttcaccgtattagccaggatggtctcaatctcctgacctcgtgatccatccgcctcgccctcccagagtgctgggattacaggcgtcagccaccgtgaccggctcagactgtactcttctagccatctgaaatacgttttctaggtagagatagattgtgtaagggtacagttgtgaggataacagaaacatggcagattatttaaaatcatcctgaaagtggtgctttatctgatgaaagtgattgtaatccatagggaaatgtttcaacgtgcgcaagcgttgcggcggcgggcagaggactactacagatgcaaagtaaggagcttcctccccgcagttgcaggat

SEQ ID NO: 312110 - DNA, 3382 bp, Homo sapiens
gggctgcggcagtgccatctctcacagcacacgaagcaccgggatgatcctcctagtagaagctctgcattcaggcgtcaactccggtgtcggtttccgggcagactcccaccccgacgtgccgggctcagtgcccagtgctacccaaacccagagcacccctacttcccggcaggcgtgtgacctgcgcgttctgccccaggccgctacctgtctgaggaacccgagccctacctggcagtctacctgcactcggagccccggcccaatgagcgcaactgctcggctagcaggaggatccgcccagagtccctccagggtgccgaccaccggccctacaccttcttcatttccccggggaccagagacccagtggggagttaccgtctgaacctctccagccacttccgctggtcggcgctggaggtgtccgtgggcttgtacacgtccctgtgccagtacttcagcgaggaggacgtggtgtggcggacagaggggctgctgcccctggaggagacctcgccccgccaggccgtctgcctcacccgccacctcaccgccttcggcaccagcctcttcgtgcccccaagccatatccgctttgtgtttcctgagccaacagcggatgtaaactacatcgtcatgctgacatgtgctgtgtgcctggtgacctacatggtcatggccgccatcctgcacaagctggaccagttggatgccagccggggctgcgccatccccttctgtgggcagcggggccgcttcaagtacgagatcctcgtcaagacaggctggggccggggctcaggtaccacggcccacgtgggcatcatgctgtatggggtggacagccggagcggccaccggcacctggacggcgacagagccttccaccgcaacagtctggacatcttccagatcgccaccccgcacagcctgggtagcgtgtggaagatccgagtgtggcacgacaacaaaggtctgtatggaccctgccaagctctgcccctctgcccctgcattggggcgccctgcgaacctgacctccctcccgcgcctctgcagggctcagccctgcctggttcctgcagcacatcatcgtcagggacctgcagacggcacgcagcaccttcttcctggtcaatgactggctttcggtggagacggaggccaacgggggcctggtggagaaggaggtgctggccgcgagtaaggcctcgttccgtgttcccactccgtgggaggttgggcagggtggtcctgccccgtggcctcctgcagtgcggccctccctgccttctaggtcacgcagccctgttgcgcttccggcgcctgctggtggctgagctgcagcgtggcttctttgacaagcacatctggctctccatatgggaccggccgcctcgtagctgtttcactcgcatccagagggccacctgctgcgttctcctcatctgtctcttcctgggcgccaacgccgtgtggtacggggctgttggagactctgcctacagcacggggcgtgtgtccaggctgaacccgctgagcgtcgacacagtcgctgttggcctggtgtccagcgtggttgtctatcccgtctacctggccatcctctttctcttccggatgtcccggagcaaggtggctgggagcccgagccccacacctgccgggcagcaggtgctggacgtcgacagctgcctggactcatccgtgctggacagctccttcctcacgttctcaggcctccacgctgaggtgagggctctactgggggtcctgccgccttggcgcagcttggactcaagaccctgtgcacctctcagcaggcctttgctggacagatgaagagtgacttgtttctggatgattctaagaggttgatggacggatggctacatggatgtgatggagatggtttactatcgggaccttccgcatcctgctgatgttttgttgcttaggatatgaatggctgagcggaggctgtaaaacctggcactctgcttgggtatgaggttcttcctgccatcctgccatcatttgttttttatgttttgtcgccaaaagtgaccttgaggaaccctgggagctcaggaaggaaggagcacccagaagcagggacagggagctggttggggaggaccagaaatcaggttatcaatactctggctgaccatcgtcatcgtgggactgactttggtggaagtccttggttacttatcattactgtgtttctgagaagttataaatttgccatctccctctgcacaagttacctttgtgtgtctttcctgaagactatcttcccgtctcaaaatggacatgatggatccacggatgtacagcagagagccaggaggtccaactgccgtagacaggaaggaattaaaattgtcctggaagacatctttactttatggagacaggtggaaaccaaagttcgagctaaaatccgtaagatgaaggtgacaacaaaagtcaaccgtcatgacaaaatcaatggaaagaggaagaccgccaaagaacatctgaggaaactaagcatgaaagaacgtgagcacggagaaaaggagaggcaggtgtcagaggcagaggaaaatgggaaattggatatgaaagaaatacacacctacatggaaatgtttcaacgtgcgcaagcgttgcggcggcgggcagaggactactacagatgcaaaatcaccccttctgcaagaaagcctctttgcaaccggctgtcggcagtactcagtggaagggtgatattatgacactgacactgctattttgaaacctggaggatggaaaggtgcaaaaatctatcaccagcaacagaaggtgcagactgtgttggtggcggtaattttgtccatcaaatgaatatgtgtgaaaacattccctcctttggccctacaggtcagaatggcggcagtggagcatcgtcattcttcaggattgccctactggccctacctcacagctgaaactttaaaaaacaggatgggccaccagccacctcctccaactcaacaacattctataattgataactccctgagcctcaagacaccttccgagtgtctgctcactccccttccaccctcagctctaccctcagcggatgataatctcaagacacctgccgagtgcctgctctatccccttccaccctcagcggatgataatctcaagacacctcccgagtgtctgctcactccccttccaccctcagctccaccctcagcggatgataatctcaagacacctcctgagtgtgtctgctcactccccttccaccctcagcggatgataatctcaagaaactaaggaagaataaataaataatataaaaataaaatgaatactgcagtccttaaaaaaa

SEQ ID NO: 312111 - DNA, 3443 bp, Homo sapiens
gggctgcggcagtgccatctctcacagcacacgaagcaccgggatgatcctcctagtagaagctctgcattcaggcgtcaactccggtgtcggtttccgggcagactcccaccccgacgtgccgggctcagtgcccagtgctacccaaacccagagcacccctacttcccggcaggcgtgtgacctgcgcgttctgccccaggccgctacctgtctgaggaacccgagccctacctggcagtctacctgcactcggagccccggcccaatgagcgcaactgctcggctagcaggaggatccgcccagagtccctccagggtgccgaccaccggccctacaccttcttcatttccccggggaccagagacccagtggggagttaccgtctgaacctctccagccacttccgctggtcggcgctggaggtgtccgtgggcttgtacacgtccctgtgccagtacttcagcgaggaggacgtggtgtggcggacagaggggctgctgcccctggaggagacctcgccccgccaggccgtctgcctcacccgccacctcaccgccttcggcaccagcctcttcgtgcccccaagccatatccgctttgtgtttcctgagccaacagcggatgtaaactacatcgtcatgctgacatgtgctgtgtgcctggtgacctacatggtcatggccgccatcctgcacaagctggaccagttggatgccagccggggctgcgccatccccttctgtgggcagcggggccgcttcaagtacgagatcctcgtcaagacaggctggggccggggctcaggtaccacggcccacgtgggcatcatgctgtatggggtggacagccggagcggccaccggcacctggacggcgacagagccttccaccgcaacagtctggacatcttccagatcgccaccccgcacagcctgggtagcgtgtggaagatccgagtgtggcacgacaacaaaggtctgtatggaccctgccaagctctgcccctctgcccctgcattggggcgccctgcgaacctgacctccctcccgcgcctctgcagggctcagccctgcctggttcctgcagcacatcatcgtcagggacctgcagacggcacgcagcaccttcttcctggtcaatgactggctttcggtggagacggaggccaacgggggcctggtggagaaggaggtgctggccgcgagtaaggcctcgttccgtgttcccactccgtgggaggttgggcagggtggtcctgccccgtggcctcctgcagtgcggccctccctgccttctaggtcacgcagccctgttgcgcttccggcgcctgctggtggctgagctgcagcgtggcttctttgacaagcacatctggctctccatatgggaccggccgcctcgtagctgtttcactcgcatccagagggccacctgctgcgttctcctcatctgtctcttcctgggcgccaacgccgtgtggtacggggctgttggagactctgcctacagcacggggcgtgtgtccaggctgaacccgctgagcgtcgacacagtcgctgttggcctggtgtccagcgtggttgtctatcccgtctacctggccatcctctttctcttccggatgtcccggagcaaggtggctgggagcccgagccccacacctgccgggcagcaggtgctggacgtcgacagctgcctggactcatccgtgctggacagctccttcctcacgttctcaggcctccacgctgaggtgagggctctactgggggtcctgccgccttggcgcagcttggactcaagaccctgtgcacctctcagcaggcctttgctggacagatgaagagtgacttgtttctggatgattctaagaggttgatggacggatggctacatggatgtgatggagatggtttactatcgggaccttccgcatcctgctgatgttttgttgcttaggatatgaatggctgagcggaggctgtaaaacctggcactctgcttgggtatgaggttcttcctgccatcctgccatcatttgttttttatgttttgtcgccaaaagtgaccttgaggaaccctgggagctcaggaaggaaggagcacccagaagcagggacagggagctggttggggaggaccagaaatcagtagagactgggtttcaccgtgttcgccaggatagtctccatgtcttgacctcgtgatctgcctgcctcggcctcccagtgctgggattacaggcgtgagccaccgcgcctggccaaaatatataaccttaagtgttatcaatactctggctgaccatcgtcatcgtgggactgactttggtggaagtccttggttacttatcattactgtgtttctgagaagttataaatttgccatctccctctgcacaagttacctttgtgtgtctttcctgaagactatcttcccgtctcaaaatggacatgatggatccacggatgtacagcagagagccaggaggtccaactgccgtagacaggaaggaattaaaattgtcctggaagacatctttactttatggagacaggtggaaaccaaagttcgagctaaaatccgtaagatgaaggtgacaacaaaagtcaaccgtcatgacaaaatcaatggaaagaggaagaccgccaaagaacatctgaggaaactaagcatgaaagaacgtgagcacggagaaaaggagaggcaggtgtcagaggcagaggaaaatgggaaattggatatgaaagaaatacacacctacatggaaatgtttcaacgtgcgcaagcgttgcggcggcgggcagaggactactacagatgcaaaatcaccccttctgcaagaaagcctctttgcaaccgggtcagaatggcggcagtggagcatcgtcattcttcaggattgccctactggccctacctcacagctgaaactttaaaaaacaggatgggccaccagccacctcctccaactcaacaacattctataattgataactccctgagcctcaagacaccttccgagtgtctgctcactccccttccaccctcagctctaccctcagcggatgataatctcaagacacctgccgagtgcctgctctatccccttccaccctcagcggatgataatctcaagacacctcccgagtgtctgctcactccccttccaccctcagctccaccctcagcggatgataatctcaagacacctcctgagtgtgtctgctcactccccttccaccctcagcggatgataatctcaagaaactaaggaagaataaataaataatataaaaataaaaaaaaaaaaaaaaaactcgaggggggggcccggggccccaatttcgccctttttggggaggcggttattacaaattcacttggcccggcgtttttaacaaccttctgggaatggggaaaaaaccctgggcggtt

SEQ ID NO: 312112 - DNA, 2441 bp, Homo sapiens
gggctgcggcagtgccatctctcacagcacacgaagcaccgggatgatcctcctagtagaagctctgcattcaggcgtcaactccggtgtcggtttccgggcagactcccaccccgacgtgccgggctcagtgcccagtgctacccaaacccagagcacccctacttcccggcaggcgtgtgacctgcgcgttctgccccaggccgctacctgtctgaggaacccgagccctacctggcagtctacctgcactcggagccccggcccaatgagcgcaactgctcggctagcaggaggatccgcccagagtccctccagggtgccgaccaccggccctacaccttcttcatttccccggggaccagagacccagtggggagttaccgtctgaacctctccagccacttccgctggtcggcgctggaggtgtccgtgggcttgtacacgtccctgtgccagtacttcagcgaggaggacgtggtgtggcggacagaggggctgctgcccctggaggagacctcgccccgccaggccgtctgcctcacccgccacctcaccgccttcggcaccagcctcttcgtgcccccaagccatatccgctttgtgtttcctgagccaacagcggatgtaaactacatcgtcatgctgacatgtgctgtgtgcctggtgacctacatggtcatggccgccatcctgcacaagctggaccagttggatgccagccggggctgcgccatccccttctgtgggcagcggggccgcttcaagtacgagatcctcgtcaagacaggctggggccggggctcaggtaccacggcccacgtgggcatcatgctgtatggggtggacagccggagcggccaccggcacctggacggcgacagagccttccaccgcaacagtctggacatcttccagatcgccaccccgcacagcctgggtagcgtgtggaagatccgagtgtggcacgacaacaaaggtctgtatggaccctgccaagctctgcccctctgcccctgcattggggcgccctgcgaacctgacctccctcccgcgcctctgcagggctcagccctgcctggttcctgcagcacatcatcgtcagggacctgcagacggcacgcagcaccttcttcctggtcaatgactggctttcggtggagacggaggccaacgggggcctggtggagaaggaggtgctggccgcgagtaaggcctcgttccgtgttcccactccgtgggaggttgggcagggtggtcctgccccgtggcctcctgcagtgcggccctccctgccttctaggtcacgcagccctgttgcgcttccggcgcctgctggtggctgagctgcagcgtggcttctttgacaagcacatctggctctccatatgggaccggccgcctcgtagctgtttcactcgcatccagagggccacctgctgcgttctcctcatctgtctcttcctgggcgccaacgccgtgtggtacggggctgttggagactctgcctacagcacggggcgtgtgtccaggctgaacccgctgagcgtcgacacagtcgctgttggcctggtgtccagcgtggttgtctatcccgtctacctggccatcctctttctcttccggatgtcccggagcaaggtggctgggagcccgagccccacacctgccgggcagcaggtgctggacgtcgacagctgcctggactcatccgtgctggacagctccttcctcacgttctcaggcctccacgctgaggtgagggctctactgggggtcctgccgccttggcgcagcttggactcaagaccctgtgcacctctcagcaggcctttgctggacagatgaagagtgacttgtttctggatgattctaagaggttgatggacggatggctacatggatgtgatggagatggtttactatcgggaccttccgcatcctgctgatgttttgttgcttaggatatgaatggctgagcggaggctgtaaaacctggcactctgcttgggtatgaggttcttcctgccatcctgccatcatttgttttttatgttttgtcgccaaaagtgaccttgaggaaccctgggagctcaggaaggaaggagcacccagaagcagggacagggagctggttggggaggaccagaaatcaggttatcaatactctggctgaccatcgtcatcgtgggactgactttggtggaagtccttggttacttatcattactgtgtttctgagaagttataaatttgccatctccctctgcacaagttacctttgtgttatcaatactctggctgaccatcgtcatcgtgggactgactttggtggaagtccttggttacttatcattactgtgtttctgagaagttataaatttgccatctccctctgcacaagttacctttgtgtgtctttcctgaagactatcttcccg

SEQ ID NO: 312113 - DNA, 2160 bp, Homo sapiens
gggctgcggcagtgccatctctcacagcacacgaagcaccgggatgatcctcctagtagaagctctgcattcaggcgtcaactccggtgtcggtttccgggcagactcccaccccgacgtgccgggctcagtgcccagtgctacccaaacccagagcacccctacttcccggcaggcgtgtgacctgcgcgttctgccccaggccgctacctgtctgaggaacccgagccctacctggcagtctacctgcactcggagccccggcccaatgagcgcaactgctcggctagcaggaggatccgcccagagtccctccagggtgccgaccaccggccctacaccttcttcatttccccggggaccagagacccagtggggagttaccgtctgaacctctccagccacttccgctggtcggcgctggaggtgtccgtgggcttgtacacgtccctgtgccagtacttcagcgaggaggacgtggtgtggcggacagaggggctgctgcccctggaggagacctcgccccgccaggccgtctgcctcacccgccacctcaccgccttcggcaccagcctcttcgtgcccccaagccatatccgctttgtgtttcctgagccaacagcggatgtaaactacatcgtcatgctgacatgtgctgtgtgcctggtgacctacatggtcatggccgccatcctgcacaagctggaccagttggatgccagccggggctgcgccatccccttctgtgggcagcggggccgcttcaagtacgagatcctcgtcaagacaggctggggccggggctcaggtaccacggcccacgtgggcatcatgctgtatggggtggacagccggagcggccaccggcacctggacggcgacagagccttccaccgcaacagtctggacatcttccagatcgccaccccgcacagcctgggtagcgtgtggaagatccgagtgtggcacgacaacaaaggtctgtatggaccctgccaagctctgcccctctgcccctgcattggggcgccctgcgaacctgacctccctcccgcgcctctgcagggctcagccctgcctggttcctgcagcacatcatcgtcagggacctgcagacggcacgcagcaccttcttcctggtcaatgactggctttcggtggagacggaggccaacgggggcctggtggagaaggaggtgctggccgcgagtaaggcctcgttccgtgttcccactccgtgggaggttgggcagggtggtcctgccccgtggcctcctgcagtgcggccctccctgccttctaggtcacgcagccctgttgcgcttccggcgcctgctggtggctgagctgcagcgtggcttctttgacaagcacatctggctctccatatgggaccggccgcctcgtagctgtttcactcgcatccagagggccacctgctgcgttctcctcatctgtctcttcctgggcgccaacgccgtgtggtacggggctgttggagactctgcctacagcacggggcgtgtgtccaggctgaacccgctgagcgtcgacacagtcgctgttggcctggtgtccagcgtggttgtctatcccgtctacctggccatcctctttctcttccggatgtcccggagcaaggtggctgggagcccgagccccacacctgccgggcagcaggtgctggacgtcgacagctgcctggactcatccgtgctggacagctccttcctcacgttctcaggcctccacgctgaggtgagggctctactgggggtcctgccgccttggcgcagcttggactcaagaccctgtgcacctctcagcaggcctttgctggacagatgaagagtgacttgtttctggatgattctaagagtgaccttgaggaaccctgggagctcaggaaggaaggagcacccagaagcagggacagggagctggttggggaggaccagaaatcaggttatcaatactctggctgaccatcgtcatcgtgggactgactttggtggaagtccttggttacttatcattactgtgtttctgagaagttataaatttgccatctccctctgcacaagttacctttgtgtgagtatactaactttctgtagaggtatacttgtaatcacaaataagaataaattatatgaaaca

SEQ ID NO: 312114 - DNA, 894 bp, Homo sapiens
cacgacggctgcggccgctggggttggagctattcgatggagttgagtgtttggtggagtccgaatcaggctctttgtcaaagtcctggtctggatcagacatacttctcagaggcacagtcacgctaggctccgatccacctgatgagggccacgagatgtagggcttgttcctggatggaggctggcgagccaggttggtgggagcggggcctggtggagaaggaggtgctgccgcgagtcacgcagccctgttgcgcttccggcgcctgctggtggctgagctgcagcgtggcttctttgacaagcacatctggctctccatatgggaccggccacctcgtagctgtttcactcgcatccagagggccacctgctgcgttctcctcatctgcctcttcctgggcgccaacgccgtgtggtacggggctgttggtgactctgcctacagcacggggcatgtgtccaggctgagcccgctgagcgtcgacacagtcgctgttggcctggtgtccagcgtggttgtctatcccgtctacctggccatcctctttctcttccggatgtcccggagcaaggtggctgggagcctgagccccacacctgccgggcagtaggtgctggacatcgacagctgcctggactcgtccgtgctggacagctccttcctcacgttctcaggcctccacgctgaggttatcaatactctggctgaccatcgtcatcgtgggactgactttggtggaagtccttggttacttatcattactgtgtttctgagaagttataaatttgccatctccctctgcacaagttacctttgtgtgagtatactaactttctgtagaggtatacttgtaatcacaaataagaataaattatatgaaacaattc

SEQ ID NO: 312115 - DNA, 297 bp, Homo sapiens
acatcacacagcatctagcacgtaactgcaccccgggagtcgtgggcatctgctggcctcctgccggcctcctgccctgctgacagcttgctgtgccccctgcctgccccagtacgagcgggccctggacgtggcggcagagcccaagcacgagcggcagcgccgagcccagatacgcaagaacatcacggagactctggtgtccctgagggtccacactgtggatgacatccagcagatcgctgctgcgctggcccagtgcatggtaggatggccccacatgctctccccgccccg

SEQ ID NO: 312116 - DNA, 169 bp, Homo sapiens
  misc_feature (10)..(10): n is a, c, g, or t
  misc_feature (24)..(24): n is a, c, g, or t
ttgggcgggngcctttgttgaaanaaaccccattttcacaaatagagtgtaacgaagtctggatttctgataccttgtcatttgggggattttattttactttgttgctttaaaattcaatgcagagaagttgttgactgtaggggaaataaagttaattcaaattttg

SEQ ID NO: 312117 - DNA, 3262 bp, Homo sapiens
  misc_feature (120)..(120): n is a, c, g, or t
tctcccaacaagagtccagacccttttcttttggggtgtatcactagctgcaggtgctgtgttccttagtgtcatctatttgacttatacaggttacattgcaccatggagtggcaggtntattcattgtgggatactgggtatgcaaaaatacacattccaattattgcatcagtgtctgagcatcaacctacgacttgggtgtctttcttctttgatctacatattcttgtatgtaccttcccagcaggcctttggttctgcatcaaaaatatcaacgatgaaagagtatttgttgctctatatgcaatcagtgctgtctactttgctggagtgatggtgcgactgatgttgactttgactccagtcgtgtgtatgctgtctgcaattgccttttcaaatgtttttgagcactatttgggggatgacatgaaaagggaaaatccacctgtggaggacagcagtgatgaggatgacaaaagaaaccaaggaaatttgtatgataaggcaggtaaagtgaggaaacatgcaactgaacaggaaaaaactgaagagggattaggccctaatataaaaagcattgtcaccatgttgatgctgatgctattgatgatgtttgctgtccactgtacctgggtcacaagcaatgcctactctagtccaagtgtagtcctggcctcatacaatcatgatggcaccaggaatatcttagatgattttagagaagcttacttttggctaaggcaaaatacagatgaacatgcacgagtaatgtcttggtgggattatggctatcagatagctggaatggctaatagaactacgttggtggataataacacctggaataacagccacatagcactggtgggaaaagctatgtcttctaatgaaacagcagcctataaaatcatgaggactctagatgtagattatgttttggttatttttggaggggttattggctattctggtgatgatatcaacaaatttctctggatggttaggatagctgaaggagaacatcccaaagacattcgggaaagtgactattttaccccacagggagaattccgtgtagacaaagcaggatcccctactttgttgaattgccttatgtataaaatgtcatactacagatttggagaaatgcagctggattttcgtacacccccaggttttgaccgaacacgtaatgctgagattggaaataaggacattaaattcaaacatttggaagaagcctttacatcagaacactggcttgttaggatatataaagtaaaagcacctgataacagggagacattagatcacaaacctcgagtcaccaacattttcccaaaacagaagtatttgtcaaagaagactaccaaaaggaagcgtggctacattaaaaataagctggtttttaagaaaggcaagaaaatatctaagaagactgtttaaatgcactgttctggttcctaacttgaagcagttgtccttgtgagaaccggtctttgcctttagctcatgtcgtgtttcacagcaaagagggtacagaaccatcactggtccaggttaatgtacaaaattttctggcaatgcctgattaaaaaaataaaattggcttgttgagaacagctgttttcgatttctaatgtgaagcaagacagagcactgctgtaaatgtctagcagcagattttttttttattggtacatattatccttcaaatctgagaatttggactaactgcaccaaagaaccctctaatttggtccctggcacatgcatacttgtcaatgtttttattcttttacaagacctgcattttatttgaattacccgaatagcaatatgtaaaatacaagtgacaaaatgtgatgagagcttcttgaaccggtaaactagtacaggtctgagaaagacatattagaagaatcattatacttccttgaattatatttattttcatgtttctctaatgcaaagaatgtttcatcaaatgtatattttctgttgcttactgtttgctctgagaagaagctgctgtttcaaagatggacctctgagtagctaattgattcaagtagtttttttatgttgacacattattactgctgttagcagtcgttttcaccaggtacttacagagcagatttcatacatcattcattcaagggctaaatttatattttttggaaatcatggcaactacacaggatgttgcttaccaggacggagttttggtatcttagtactgaagttagcactatgtttacatgcaaaagattaaggaaaaaacccttaaagtggacaggtatccaaagttcattttctgtgactcatcaaagtgacaaaagacttgtaacaactttgcctggacttttttcattttacaacagttcatccattcacaatgattttgttctctgctccatattttttaatcccttaagcatttgatgaaacactctttagtgctatatgcattttcttacttttgttaaaaatgtgacaattgtcaaaaaatgcactaaaatgtaaatggagattgaacaagttcactttccagcttataggcaactttatacagacttgaacattttctccagttgtttagtaaaagtgaaagagaaagggtttttcctgccacaggatataacttttttttatataacaagcataacacaccactgcttttggtggaaaagtgcagaatagtatgtaccttttatgaagaaaaatgtaatttacaatattcagtgagaatgttactgctgattttcttttccaaggtgtagaatattctttgatttatagaattcatttttgacccagatgatggttcctttacagaacaataaaatggctgaacattttcacaaatagagtgtaacgaagtctggatttctgataccttgtcatttgggggattttattttactttgttgctttaaaattcaatgcagagaagttgttgactgtaggggaaataaagttaattcaaattttgaaaaaaaaaaaaatacacaaacaaaaacacaacactttgtgcgcggccgcgctcggcgccccagaaaagtttctaaaacccatccgtgtgggcgccgcgggcccagtaggtcacgtgagactggccaacaggggggcccaagagaaaccgggggctgcaaaggggtgcgtgcctccataaaaaaccgccgcgggaaccggcctgttgaacacccaaggtgtgcgacgccacgggccacacagggccaaggagcagtaatag

SEQ ID NO: 312118 - DNA, 3009 bp, Homo sapiens
  misc_feature (120)..(120): n is a, c, g, or t
tctcccaacaagagtccagacccttttcttttggggtgtatcactagctgcaggtgctgtgttccttagtgtcatctatttgacttatacaggttacattgcaccatggagtggcaggtntattcattgtgggatactgggtatgcaaaaatacacattccaattattgcatcagtgtctgagcatcaacctacgacttgggtgtctttcttctttgatctacatattcttgtatgtaccttcccagcaggcctttggttctgcatcaaaaatatcaacgatgaaagagtatttgttgctctatatgcaatcagtgctgtctactttgctggagtgatggtgcgactgatgttgactttgactccagtcgtgtgtatgctgtctgcaattgccttttcaaatgtttttgagcactatttgggggatgacatgaaaagggaaaatccacctgtggaggacagcagtgatgaggatgacaaaagaaaccaaggaaatttgtatgataaggcaggtaaagtgaggaaacatgcaactgaacaggaaaaaactgaagagggattaggccctaatataaaaagcattgtcaccatgttgatgctgatgctattgatgatgtttgctgtccactgtacctgggtcacaagcaatgcctactctagtccaagtgtagtcctggcctcatacaatcatgatggcaccaggaatatcttagatgattttagagaagcttacttttggctaaggcaaaatacagatgaacatgcacgagtaatgtcttggtgggattatggctatcagatagctggaatggctaatagaactacgttggtggataataacacctggaataacagccacatagcactggtgggaaaagctatgtcttctaatgaaacagcagcctataaaatcatgaggactctagatgtagattatgttttggttatttttggaggggttattggctattctggtgatgatatcaacaaatttctctggatggttaggatagctgaaggagaacatcccaaagacattcgggaaagtgactattttaccccacagggagaattccgtgtagacaaagcaggatcccctactttgttgaattgccttatgtataaaatgtcatactacagatttggagaaatgcagctggattttcgtacacccccaggttttgaccgaacacgtaatgctgagattggaaataaggacattaaattcaaacatttggaagaagcctttacatcagaacactggcttgttaggatatataaagtaaaagcacctgataacagggagacattagatcacaaacctcgagtcaccaacattttcccaaaacagaagtatttgtcaaagaagactaccaaaaggaagcgtggctacattaaaaataagctggtttttaagaaaggcaagaaaatatctaagaagactgtttaaatgcactgttctggttcctaacttgaagcagttgtccttgtgagaaccggtctttgcctttagctcatgtcgtgtttcacagcaaagagggtacagaaccatcactggtccaggttaatgtacaaaattttctggcaatgcctgattaaaaaaataaaattggcttgttgagaacagctgttttcgatttctaatgtgaagcaagacagagcactgctgtaaatgtctagcagcagattttttttttattggtacatattatccttcaaatctgagaatttggactaactgcaccaaagaaccctctaatttggtccctggcacatgcatacttgtcaatgtttttattcttttacaagacctgcattttatttgaattacccgaatagcaatatgtaaaatacaagtgacaaaatgtgatgagagcttcttgaaccggtaaactagtacaggtctgagaaagacatattagaagaatcattatacttccttgaattatatttattttcatgtttctctaatgcaaagaatgtttcatcaaatgtatattttctgttgcttactgtttgctctgagaagaagctgctgtttcaaagatggacctctgagtagctaattgattcaagtagtttttttatgttgacacattattactgctgttagcagtcgttttcaccaggtacttacagagcagatttcatacatcattcattcaagggctaaatttatattttttggaaatcatggcaactacacaggatgttgcttaccaggacggagttttggtatcttagtactgaagttagcactatgtttacatgcaaaagattaaggaaaaaacccttaaagtggacaggtatccaaagttcattttctgtgactcatcaaagtgacaaaagacttgtaacaactttgcctggacttttttcattttacaacagttcatccattcacaatgattttgttctctgctccatattttttaatcccttaagcatttgatgaaacactctttagtgctatatgcattttcttacttttgttaaaaatgtgacaattgtcaaaaaatgcactaaaatgtaaatggagattgaacaagttcactttccagcttataggcaactttatacagacttgaacattttctccagttgtttagtaaaagtgaaagagaaagggtttttcctgccacaggatataacttttttttatataacaagcataacacaccactgcttttggtggaaaagtgcagaatagtatgtaccttttatgaagaaaaatgtaatttacaatattcagtgagaatgttactgctgattttcttttccaaggtgtagaatattctttgatttatagaattcatttttgacccagatgatggttcctttacagaacaataaaatggctgaacattttcacaaatagagtgtaacgaagtctggatttctgataccttgtcatttgggggattttattttaacctgccactcccaaaccatcacccctcctgtttccttttgtaaagcaaaaccccactattgggattcgggtcgtcct

SEQ ID NO: 312119 - DNA, 1800 bp, Homo sapiens
catagtcgattatcgaggtcatatcagtcactggggaagaagcctttacatcagaacactggcttgttaggatatataaagtaaaagcacctgataacagggagacattagatcacaaacctcgagtcaccaacattttcccaaaacagaagtatttgtcaaagaagactaccaaaaggaagcgtggctacattaaaaataagctggtttttaagaaaggcaagaaaatatctaagaagactgtttaaatgcactgttctggttcctaacttgaagcagttgtccttgtgagaaccggtctttgcctttagctcatgtcgtgtttcacagcaaagagggtacagaaccatcactggtccaggttaatgtacaaaattttctggcaatgcctgattaaaaaaataaaattggcttgttgagaacagctgttttcgatttctaatgtgaagcaagacagagcactgctgtaaatgtctagcagcagattttttttttattggtacatattatccttcaaatctgagaatttggactaactgcaccaaagaaccctctaatttggtccctggcacatgcatacttgtcaatgtttttattcttttacaagacctgcattttatttgaattacccgaatagcaatatgtaaaatacaagtgacaaaatgtgatgagagcttcttgaaccggtaaactagtacaggtctgagaaagacatattagaagaatcattatacttccttgaattatatttattttcatgtttctctaatgcaaagaatgtttcatcaaatgtatattttctgttgcttactgtttgctctgagaagaagctgctgtttcaaagatggacctctgagtagctaattgattcaagtagtttttttatgttgacacattattactgctgttagcagtcgttttcaccaggtacttacagagcagatttcatacatcattcattcaagggctaaatttatattttttggaaatcatggcaactacacaggatgttgcttaccaggacggagttttggtatcttagtactgaagttagcactatgtttacatgcaaaagattaaggaaaaaacccttaaagtggacaggtatccaaagttcattttctgtgactcatcaaagtgacaaaagacttgtaacaactttgcctggacttttttcattttacaacagttcatccattcacaatgattttgttctctgctccatattttttaatcccttaagcatttgatgaaacactctttagtgctatatgcattttcttacttttgttaaaaatgtgacaattgtcaaaaaatgcactaaaatgtaaatggagattgaacaagttcactttccagcttataggcaactttatacagacttgaacattttctccagttgtttagtaaaagtgaaagagaaagggtttttcctgccacaggatataacttttttttatataacaagcataacacaccactgcttttggtggaaaagtgcagaatagtatgtaccttttatgaagaaaaatgtaatttacaatattcagtgagaatgttactgctgattttcttttccaaggtgtagaatattctttgatttatagaattcatttttgacccagatgatggttcctttacagaacaataaaatggctgaacattttcacaaatagagtgtaacgaagtctggatttctgataccttgtcatttgggggattttattttactttgttgctttaaaattcaatgcagagaagttgttgactgtaggggaaataaagttaattcaaattttg

SEQ ID NO: 312120 - DNA, 1621 bp, Homo sapiens
ggatccccgatcctacatagtgttctggtttttaagaaaggcaagaaaatatctaagaagactgtttaaatgcactgttctggttcctaacttgaagcagttgtccttgtgagaaccggtctttgcctttagctcatgtcgtgtttcacagcaaagagggtacagaaccatcactggtccaggttaatgtacaaaattttctggcaatgcctgattaaaaaaataaaattggcttgttgagaacagctgttttcgatttctaatgtgaagcaagacagagcactgctgtaaatgtctagcagcagattttttttttattggtacatattatccttcaaatctgagaatttggactaactgcaccaaagaaccctctaatttggtccctggcacatgcatacttgtcaatgtttttattcttttacaagacctgcattttatttgaattacccgaatagcaatatgtaaaatacaagtgacaaaatgtgatgagagcttcttgaaccggtaaactagtacaggtctgagaaagacatattagaagaatcattatacttccttgaattatatttattttcatgtttctctaatgcaaagaatgtttcatcaaatgtatattttctgttgcttactgtttgctctgagaagaagctgctgtttcaaagatggacctctgagtagctaattgattcaagtagtttttttatgttgacacattattactgctgttagcagtcgttttcaccaggtacttacagagcagatttcatacatcattcattcaagggctaaatttatattttttggaaatcatggcaactacacaggatgttgcttaccaggacggagttttggtatcttagtactgaagttagcactatgtttacatgcaaaagattaaggaaaaaacccttaaagtggacaggtatccaaagttcattttctgtgactcatcaaagtgacaaaagacttgtaacaactttgcctggacttttttcattttacaacagttcatccattcacaatgattttgttctctgctccatattttttaatcccttaagcatttgatgaaacactctttagtgctatatgcattttcttacttttgttaaaaatgtgacaattgtcaaaaaatgcactaaaatgtaaatggagattgaacaagttcactttccagcttataggcaactttatacagacttgaacattttctccagttgtttagtaaaagtgaaagagaaagggtttttcctgccacaggatataacttttttttatataacaagcataacacaccactgcttttggtggaaaagtgcagaatagtatgtaccttttatgaagaaaaatgtaatttacaatattcagtgagaatgttactgctgattttcttttccaaggtgtagaatattctttgatttatagaattcatttttgacccagatgatggttcctttacagaacaataaaatggctgaacattttcacaaatagagtgtaacgaagtctggatttctgataccttgtcatttgggggattttattttactttgttgctttaaaattcaatgcagagaagttgttgactgtaggggaaataaagttaattcaaattttg

SEQ ID NO: 312121 - DNA, 1533 bp, Homo sapiens
agaaccatcactggtccaggttaatgtaccctctttgctgtgaaacacgacatgagctaaaggcaaagagggtacagaaccatcactggtccaggttaatgtacaaaattttctggcaatgcctgattaaaaaaataaaattggcttgttgagaacagctgttttcgatttctaatgtgaagcaagacagagcactgctgtaaatgtctagcagcagattttttttttattggtacatattatccttcaaatctgagaatttggactaactgcaccaaagaaccctctaatttggtccctggcacatgcatacttgtcaatgtttttattcttttacaagacctgcattttatttgaattacccgaatagcaatatgtaaaatacaagtgacaaaatgtgatgagagcttcttgaaccggtaaactagtacaggtctgagaaagacatattagaagaatcattatacttccttgaattatatttattttcatgtttctctaatgcaaagaatgtttcatcaaatgtatattttctgttgcttactgtttgctctgagaagaagctgctgtttcaaagatggacctctgagtagctaattgattcaagtagtttttttatgttgacacattattactgctgttagcagtcgttttcaccaggtacttacagagcagatttcatacatcattcattcaagggctaaatttatattttttggaaatcatggcaactacacaggatgttgcttaccaggacggagttttggtatcttagtactgaagttagcactatgtttacatgcaaaagattaaggaaaaaacccttaaagtggacaggtatccaaagttcattttctgtgactcatcaaagtgacaaaagacttgtaacaactttgcctggacttttttcattttacaacagttcatccattcacaatgattttgttctctgctccatattttttaatcccttaagcatttgatgaaacactctttagtgctatatgcattttcttacttttgttaaaaatgtgacaattgtcaaaaaatgcactaaaatgtaaatggagattgaacaagttcactttccagcttataggcaactttatacagacttgaacattttctccagttgtttagtaaaagtgaaagagaaagggtttttcctgccacaggatataacttttttttatataacaagcataacacaccactgcttttggtggaaaagtgcagaatagtatgtaccttttatgaagaaaaatgtaatttacaatattcagtgagaatgttactgctgattttcttttccaaggtgtagaatattctttgatttatagaattcatttttgacccagatgatggttcctttacagaacaataaaatggctgaacattttcacaaatagagtgtaacgaagtctggatttctgataccttgtcatttgggggattttattttactttgttgctttaaaattcaatgcagagaagttgttgactgtaggggaaataaagttaattcaaattttg

SEQ ID NO: 312122 - DNA, 2819 bp, Homo sapiens
  misc_feature (120)..(120): n is a, c, g, or t
tctcccaacaagagtccagacccttttcttttggggtgtatcactagctgcaggtgctgtgttccttagtgtcatctatttgacttatacaggttacattgcaccatggagtggcaggtntattcattgtgggatactgggtatgcaaaaatacacattccaattattgcatcagtgtctgagcatcaacctacgacttgggtgtctttcttctttgatctacatattcttgtatgtaccttcccagcaggcctttggttctgcatcaaaaatatcaacgatgaaagagtatttgttgctctatatgcaatcagtgctgtctactttgctggagtgatggtgcgactgatgttgactttgactccagtcgtgtgtatgctgtctgcaattgccttttcaaatgtttttgagcactatttgggggatgacatgaaaagggaaaatccacctgtggaggacagcagtgatgaggatgacaaaagaaaccaaggaaatttgtatgataaggcaggtaaagtgaggaaacatgcaactgaacaggaaaaaactgaagagggattaggccctaatataaaaagcattgtcaccatgttgatgctgatgctattgatgatgtttgctgtccactgtacctgggtcacaagcaatgcctactctagtccaagtgtagtcctggcctcatacaatcatgatggcaccaggaatatcttagatgattttagagaagcttacttttggctaaggcaaaatacagatgaacatgcacgagtaatgtcttggtgggattatggctatcagatagctggaatggctaatagaactacgttggtggataataacacctggaataacagccacatagcactggtgggaaaagctatgtcttctaatgaaacagcagcctataaaatcatgaggactctagatgtagattatgttttggttatttttggaggggttattggctattctggtgatgatatcaacaaatttctctggatggttaggatagctgaaggagaacatcccaaagacattcgggaaagtgactattttaccccacagggagaattccgtgtagacaaagcaggatcccctactttgttgaattgccttatgtataaaatgtcatactacagatttggagaaatgcagctggattttcgtacacccccaggttttgaccgaacacgtaatgctgagattggaaataaggacattaaattcaaacatttggaagaagcctttacatcagaacactggcttgttaggatatataaagtaaaagcacctgataacagggagacattagatcacaaacctcgagtcaccaacattttcccaaaacagaagtatttgtcaaagaagactaccaaaaggaagcgtggctacattaaaaataagctggtttttaagaaaggcaagaaaatatctaagaagactgtttaaatgcactgttctggttcctaacttgaagcagttgtccttgtgagaaccggtctttgcctttagctcatgtcgtgtttcacagcaaagagggtacagaaccatcactggtccaggttaatgtacaaaattttctggcaatgcctgattaaaaaaataaaattggcttgttgagaacagctgttttcgatttctaatgtgaagcaagacagagcactgctgtaaatgtctagcagcagattttttttttattggtacatattatccttcaaatctgagaatttggactaactgcaccaaagaaccctctaatttggtccctggcacatgcatacttgtcaatgtttttattcttttacaagacctgcattttatttgaattacccgaatagcaatatgtaaaatacaagtgacaaaatgtgatgagagcttcttgaaccggtaaactagtacaggtctgagaaagacatattagaagaatcattatacttccttgaattatatttattttcatgtttctctaatgcaaagaatgtttcatcaaatgtatattttctgttgcttactgtttgctctgagaagaagctgctgtttcaaagatggacctctgagtagctaattgattcaagtagtttttttatgttgacacattattactgctgttagcagtcgttttcaccaggtacttacagagcagatttcatacatcattcattcaagggctaaatttatattttttggaaatcatggcaactacacaggatgttgcttaccaggacggagttttggtatcttagtactgaagttagcactatgtttacatgcaaaagattaaggaaaaaacccttaaagtggacaggtatccaaagttcattttctgtgactcatcaaagtgacaaaagacttgtaacaactttgcctggacttttttcattttacaacagttcatccattcacaatgattttgttctctgctccatattttttaatcccttaagcatttgatgaaacactctttagtgctatatgcattttcttacttttgttaaaaatgtgacaattgtcaaaaaatgcactaaaatgtaaatggagattgaacaagttcactttccagcttataggcaactttatacagacttgaacattttctccagttgtttagtaaaagtgaaagagaaagggtttttcctgccacaggatataacttttattacagctaccacctgttgtgggaggcgatggtttcttttggaaacggttccctcccggaggcgggtcttccggggatctggtttagcttggccgggcttacaggggttccggggcggcgccggggttgccacgggggggtaaagccgcgggtgggtcgcgtg

SEQ ID NO: 312123 - DNA, 911 bp, Homo sapiens
cgtcgacactagcaggatcccccgtttatagcaccgtggtacttacagagcagatttcatacatcattcattcaagggctaaatttatattttttggaaatcatggcaactacacaggatgttgcttaccaggacggagttttggtatcttagtactgaagttagcactatgtttacatgcaaaagattaaggaaaaaacccttaaagtggacaggtatccaaagttcattttctgtgactcatcaaagtgacaaaagacttgtaacaactttgcctggacttttttcattttacaacagttcatccattcacaatgattttgttctctgctccatattttttaatcccttaagcatttgatgaaacactctttagtgctatatgcattttcttacttttgttaaaaatgtgacaattgtcaaaaaatgcactaaaatgtaaatggagattgaacaagttcactttccagcttataggcaactttatacagacttgaacattttctccagttgtttagtaaaagtgaaagagaaagggtttttcctgccacaggatataacttttttttatataacaagcataacacaccactgcttttggtggaaaagtgcagaatagtatgtaccttttatgaagaaaaatgtaatttacaatattcagtgagaatgttactgctgattttcttttccaaggtgtagaatattctttgatttatagaattcatttttgacccagatgatggttcctttacagaacaataaaatggctgaacattttcacaaatagagtgtaacgaagtctggatttctgataccttgtcatttgggggattttattttactttgttgctttaaaattcaatgcagagaagttgttgactgtaggggaaataaagttaattcaaattttg

SEQ ID NO: 312124 - DNA, 1193 bp, Homo sapiens
  misc_feature (120)..(120): n is a, c, g, or t
tctcccaacaagagtccagacccttttcttttggggtgtatcactagctgcaggtgctgtgttccttagtgtcatctatttgacttatacaggttacattgcaccatggagtggcaggtntattcattgtgggatactgggtatgcaaaaatacacattccaattattgcatcagtgtctgagcatcaacctacgacttgggtgtctttcttctttgatctacatattcttgtatgtaccttcccagcaggcctttggttctgcatcaaaaatatcaacgatgaaagagtatttgttgctctatatgcaatcagtgctgtctactttgctggagtgatggtgcgactgatgttgactttgactccagtcgtgtgtatgctgtctgcaattgccttttcaaatgtttttgagcactatttgggggatgacatgaaaagggaaaatccacctgtggaggacagcagtgatgaggatgacaaaagaaaccaaggaaatttgtatgataaggcaggtaaagtgaggaaacatgcaactgaacaggaaaaaactgaagagggattaggccctaatataaaaagcattgtcaccatgttgatgctgatgctattgatgatgtttgctgtccactgtacctgggtcacaagcaatgcctactctagtccaagtgtagtcctggcctcatacaatcatgatggcaccaggaatatcttagatgattttagagaagcttacttttggctaaggcaaaatacagatgaacatgcacgagtaatgtcttggtgggattatggctatcagatagctggaatggctaatagaactacgttggtggataataacacctggaataacagccacatagcactgacaccactgcttttggtggaaaagtgcagaatagtatgtaccttttatgaagaaaaatgtaatttacaatattcagtgagaatgttactgctgattttcttttccaaggtgtagaatattctttgatttatagaattcatttttgacccagatgatggttcctttacagaacaataaaatggctgaacattttcacaaatagagtgtaacgaagtctggatttctgataccttgtcatttgggggattttattttactttgttgctttaaaattcaatgcagagaagttgttgactgtaggggaaataaagttaattcaaattttg

SEQ ID NO: 312125 - DNA, 528 bp, Homo sapiens
caagaagagcagagagcttactaagtcatcatagtgcagtaaaccatgtgtgtgtttatagattttttaatcagtaagaaacctgcattaatactatgtgttttgtttttttatagactaccaaaaggaagcgtggctacattaaaaataagctggtttttaagaaaggcaagaaaatatctaagaagactgtttaaatgcactgttctggttcctaacttgaagcagttgtccttgtgagaaccggtctttgcctttagctcatgtcgtgtttcacagcaaagagggtacagaaccatcactggtccaggttaatgtacaaaattttctggcaatgcctgattaaaaaaataaaattggcttgttgagaacagctgttttcgatttctaatgtgaagcaagacagagcactgctgtaaatgtctagcagcagattttttttttattggtacatattatccttcaaatctgagaatttggactaactgcaccaaagaaccctctaatttggtccctggcacatgcata

SEQ ID NO: 312126 - DNA, 3001 bp, Homo sapiens
  misc_feature (120)..(120): n is a, c, g, or t
tctcccaacaagagtccagacccttttcttttggggtgtatcactagctgcaggtgctgtgttccttagtgtcatctatttgacttatacaggttacattgcaccatggagtggcaggtntattcattgtgggatactgggtatgcaaaaatacacattccaattattgcatcagtgtctgagcatcaacctacgacttgggtgtctttcttctttgatctacatattcttgtatgtaccttcccagcaggcctttggttctgcatcaaaaatatcaacgatgaaagagtatttgttgctctatatgcaatcagtgctgtctactttgctggagtgatggtgcgactgatgttgactttgactccagtcgtgtgtatgctgtctgcaattgccttttcaaatgtttttgagcactatttgggggatgacatgaaaagggaaaatccacctgtggaggacagcagtgatgaggatgacaaaagaaaccaaggaaatttgtatgataaggcaggtaaagtgaggaaacatgcaactgaacaggaaaaaactgaagagggattaggccctaatataaaaagcattgtcaccatgttgatgctgatgctattgatgatgtttgctgtccactgtacctgggtcacaagcaatgcctactctagtccaagtgtagtcctggcctcatacaatcatgatggcaccaggaatatcttagatgattttagagaagcttacttttggctaaggcaaaatacagatgaacatgcacgagtaatgtcttggtgggattatggctatcagatagctggaatggctaatagaactacgttggtggataataacacctggaataacagccacatagcactggtgggaaaagctatgtcttctaatgaaacagcagcctataaaatcatgaggactctagatgtagattatgttttggttatttttggaggggttattggctattctggtgatgatatcaacaaatttctctggatggttaggatagctgaaggagaacatcccaaagacattcgggaaagtgactattttaccccacagggagaattccgtgtagacaaagcaggatcccctactttgttgaattgccttatgtataaaatgtcatactacagatttggagaaatgcagctggattttcgtacacccccaggttttgaccgaacacgtaatgctgagattggaaataaggacattaaattcaaacatttggaagaagcctttacatcagaacactggcttgttaggatatataaagtaaaagcacctgataacagggagacattagatcacaaacctcgagtcaccaacattttcccaaaacagaagtatttgtcaaagaagactaccaaaaggaagcgtggctacattaaaaataagctggtttttaagaaaggcaagaaaatatctaagaagactgtttaaatgcactgttctggttcctaacttgaagcagttgtccttgtgagaaccggtctttgcctttagctcatgtcgtgtttcacagcaaagagggtacagaaccatcactggtccaggttaatgtacaaaattttctggcaatgcctgattaaaaaaataaaattggcttgttgagaacagctgttttcgatttctaatgtgaagcaagacagagcactgctgtaaatgtctagcagcagattttttttttattggtacatattatccttcaaatctgagaatttggactaactgcaccaaagaaccctctaatttggtccctggcacatgcatacttgtcaatgtttttattcttttacaagacctgcattttatttgaattacccgaatagcaatatgtaaaatacaagtgacaaaatgtgatgagagcttcttgaaccggtaaactagtacaggtctgagaaagacatattagaagaatcattatacttccttgaattatatttattttcatgtttctctaatgcaaagaatgtttcatcaaatgtatattttctgttgcttactgtttgctctgagaagaagctgctgtttcaaagatggacctctgagtagctaattgattcaagtagtttttttatgttgacacattattactgctgttagcagtcgttttcaccaggtacttacagagcagatttcatacatcattcattcaagggctaaatttatattttttggaaatcatggcaactacacaggatgttgcttaccaggacggagttttggtatcttagtactgaagttagcactatgtttacatgcaaaagattaaggaaaaaacccttaaagtggacaggtatccaaagttcattttctgtgactcatcaaagtgacaaaagacttgtaacaactttgcctggacttttttcattttacaacagttcatccattcacaatgattttgttctctgctccatattttttaatcccttaagcatttgatgaaacactctttagtgctatatgcattttcttacttttgttaaaaatgtgacaattgtcaaaaaatgcactaaaatgtaaatggagattgaacaagttcactttccagcttataggcaactttatacagacttgaacattttctccagttgtttagtaaaagtgaaagagaaagggtttttcctgccacaggatataacttttttttatataacaagcataacacaccactgcttttggtggaaaagtgcagaatagtatgtaccttttatgaagaaaaatgtaatttacaatattcagtgagaatgttactgctgattttcttttccaaggtgtagaatattctttgatttatagaattcatttttgacccagatgatggttcctttacagaacaataaaatggctgaacattttcacaaatagagtgtaacgaagtctggatttctgataccttgtcatttgggggattttattttactttgttgctttaaaattcaatgcagagaagttgttgactgtaggggaaataaagttaattcaaattttg

SEQ ID NO: 312127 - DNA, 3038 bp, Homo sapiens
  misc_feature (120)..(120): n is a, c, g, or t
tctcccaacaagagtccagacccttttcttttggggtgtatcactagctgcaggtgctgtgttccttagtgtcatctatttgacttatacaggttacattgcaccatggagtggcaggtntattcattgtgggatactgggtatgcaaaaatacacattccaattattgcatcagtgtctgagcatcaacctacgacttgggtgtctttcttctttgatctacatattcttgtatgtaccttcccagcaggcctttggttctgcatcaaaaatatcaacgatgaaagagtatttgttgctctatatgcaatcagtgctgtctactttgctggagtgatggtgcgactgatgttgactttgactccagtcgtgtgtatgctgtctgcaattgccttttcaaatgtttttgagcactatttgggggatgacatgaaaagggaaaatccacctgtggaggacagcagtgatgaggatgacaaaagaaaccaaggaaatttgtatgataaggcaggtaaagtgaggaaacatgcaactgaacaggaaaaaactgaagagggattaggccctaatataaaaagcattgtcaccatgttgatgctgatgctattgatgatgtttgctgtccactgtacctgggtcacaagcaatgcctactctagtccaagtgtagtcctggcctcatacaatcatgatggcaccaggaatatcttagatgattttagagaagcttacttttggctaaggcaaaatacagatgaacatgcacgagtaatgtcttggtgggattatggctatcagatagctggaatggctaatagaactacgttggtggataataacacctggaataacagccacatagcactggtgggaaaagctatgtcttctaatgaaacagcagcctataaaatcatgaggactctagatgtagattatgttttggttatttttggaggggttattggctattctggtgatgatatcaacaaatttctctggatggttaggatagctgaaggagaacatcccaaagacattcgggaaagtgactattttaccccacagggagaattccgtgtagacaaagcaggatcccctactttgttgaattgccttatgtataaaatgtcatactacagatttggagaaatgcagctggattttcgtacacccccaggttttgaccgaacacgtaatgctgagattggaaataaggacattaaattcaaacatttggaagaagcctttacatcagaacactggcttgttaggatatataaagtaaaagcacctgataacagggagacattagatcacaaacctcgagtcaccaacattttcccaaaacagaagtatttgtcaaagaaggtgggtgccaagtgaaggcattaaagggtaacttaagactaccaaaaggaagcgtggctacattaaaaataagctggtttttaagaaaggcaagaaaatatctaagaagactgtttaaatgcactgttctggttcctaacttgaagcagttgtccttgtgagaaccggtctttgcctttagctcatgtcgtgtttcacagcaaagagggtacagaaccatcactggtccaggttaatgtacaaaattttctggcaatgcctgattaaaaaaataaaattggcttgttgagaacagctgttttcgatttctaatgtgaagcaagacagagcactgctgtaaatgtctagcagcagattttttttttattggtacatattatccttcaaatctgagaatttggactaactgcaccaaagaaccctctaatttggtccctggcacatgcatacttgtcaatgtttttattcttttacaagacctgcattttatttgaattacccgaatagcaatatgtaaaatacaagtgacaaaatgtgatgagagcttcttgaaccggtaaactagtacaggtctgagaaagacatattagaagaatcattatacttccttgaattatatttattttcatgtttctctaatgcaaagaatgtttcatcaaatgtatattttctgttgcttactgtttgctctgagaagaagctgctgtttcaaagatggacctctgagtagctaattgattcaagtagtttttttatgttgacacattattactgctgttagcagtcgttttcaccaggtacttacagagcagatttcatacatcattcattcaagggctaaatttatattttttggaaatcatggcaactacacaggatgttgcttaccaggacggagttttggtatcttagtactgaagttagcactatgtttacatgcaaaagattaaggaaaaaacccttaaagtggacaggtatccaaagttcattttctgtgactcatcaaagtgacaaaagacttgtaacaactttgcctggacttttttcattttacaacagttcatccattcacaatgattttgttctctgctccatattttttaatcccttaagcatttgatgaaacactctttagtgctatatgcattttcttacttttgttaaaaatgtgacaattgtcaaaaaatgcactaaaatgtaaatggagattgaacaagttcactttccagcttataggcaactttatacagacttgaacattttctccagttgtttagtaaaagtgaaagagaaagggtttttcctgccacaggatataacttttttttatataacaagcataacacaccactgcttttggtggaaaagtgcagaatagtatgtaccttttatgaagaaaaatgtaatttacaatattcagtgagaatgttactgctgattttcttttccaaggtgtagaatattctttgatttatagaattcatttttgacccagatgatggttcctttacagaacaataaaatggctgaacattttcacaaatagagtgtaacgaagtctggatttctgataccttgtcatttgggggattttattttactttgttgctttaaaattcaatgcagagaagttgttgactgtaggggaaataaagttaattcaaattttg

SEQ ID NO: 312128 - DNA, 1622 bp, Homo sapiens
  misc_feature (120)..(120): n is a, c, g, or t
tctcccaacaagagtccagacccttttcttttggggtgtatcactagctgcaggtgctgtgttccttagtgtcatctatttgacttatacaggttacattgcaccatggagtggcaggtntattcattgtgggatactgggtatgcaaaaatacacattccaattattgcatcagtgtctgagcatcaacctacgacttgggtgtctttcttctttgatctacatattcttgtatgtaccttcccagcaggcctttggttctgcatcaaaaatatcaacgatgaaagagtatttgttgctctatatgcaatcagtgctgtctactttgctggagtgatggtgcgactgatgttgactttgactccagtcgtgtgtatgctgtctgcaattgccttttcaaatgtttttgagcactatttgggggatgacatgaaaagggaaaatccacctgtggaggacagcagtgatgaggatgacaaaagaaaccaaggaaatttgtatgataaggcaggtaaagtgaggaaacatgcaactgaacaggaaaaaactgaagagggattaggccctaatataaaaagcattgtcaccatgttgatgctgatgctattgatgatgtttgctgtccactgtacctgggtcacaagcaatgcctactctagtccaagtgtagtcctggcctcatacaatcatgatggcaccaggaatatcttagatgattttagagaagcttacttttggctaaggcaaaatacagatgaacatgcacgagtaatgtcttggtgggattatggctatcagatagctggaatggctaatagaactacgttggtggataataacacctggaataacagccacatagcactggtgggaaaagctatgtcttctaatgaaacagcagcctataaaatcatgaggactctagatgtagattatgttttggttatttttggaggggttattggctattctggtgatgatatcaacaaatttctctggatggttaggatagctgaaggagaacatcccaaagacattcgggaaagtgactattttaccccacagggagaattccgtgtagacaaagcaggatcccctactttgttgaattgccttatgtataaaatgtcatactacagatttggagaaatgcagctggattttcgtacacccccaggttttgaccgaacacgtaatgctgagattggaaataaggacattaaattcaaacatttggaagaagcctttacatcagaacactggcttgttaggatatataaagtaaaagcacctgataacagggagacattagatcacaaacctcgagtcaccaacattttcccaaaacagaagtatttgtcaaagaagactaccaaaaggaagcgtggctacattaaaaataagctggtttttaagaaaggcaagaaaatatctaagaagactgtttaaatgcactgttctggttcctaacttgaagcagttgtccttgtgagaaccggtctttgcctttagctcatgtcgtgtttcacagcaaagagggtacagaaccatcactggtccaggttaatgtacaaaattttctggcaatgcctgattaaaaaaataaaattggcttgttgaga

SEQ ID NO: 312129 - DNA, 835 bp, Homo sapiens
gaaggctccgatgggcagctcacctcaaagagatagttttgttggtgccagagtccgcgccaggggaatcgggatggctgggctgtagctttcggcaacctgtcgctttctggactacacttcccagaagcctctaggcccagggcactctcccgcgataactagattgtctcttgaggagtgggcgggatcttcccgcggatttgggcaagcggccttggggctttgtgagatagctagggtcgacttgtgtggattctagtagaacggagctgaccctatccgaacaggcccctgccctgcttggatagaggcctccgaacaggagtaaagaatggctgttgaacatccacaaggcacctgcaagatcccccacaggcgctgcctgagacccagctctgtgtctcctcgtcgtacagcttgtggagctccgactgcaaggccatcagcatgcccaggcaggggttaagctggagggccatggaggaggacaggccagcaggatgccgcttctgctccagggcatgcaccatgctggctcatgcctgtaatcccagcactttgggaggccgagatgggcagatcacctgaggttgggagttcaagaccagcctgaccagcatggagaaacaccgtctctactaaaaatacaaaaattagccgggcgtagtggcgcatgcctgtaatcccagctactcgggaggctgaggcaggagaatcgcttgaacccaggaggtggaggttgtggtgagccgagatcatgccattgtgctccagcctgggaaacaagagtgaaactctgtcccaaaaaaaataaaaatttattgtctactac

SEQ ID NO: 312130 - DNA, 2151 bp, Homo sapiens
cggggtgaaagaaagcttgccccagaggacttaaacaggcaagaaggacttggttaaagactattgcaatagtcaacttccaatacaacagcagctggagatttatagctaacgggctgggtgaaggagttaaaggatgctaaattactaagaggaagtgatgggcagtaggggctgagcaaagataacttctgacatagtcaaaccaactccctctcagaagaacctgatgtttcctgactgctttctccttcctcagccctgccctgcttggatagaggcctccgaacaggagtaaagaatggctgttgaacatccacaaggcacctgcaagactatgaatcaaagttgagaccaagaaattatttctgaaaaaggatatggaaaaccttacaaaacacagcattgagtgttcaagtttcagaggtgattgggaatgtaaaaaccagtttgagagaaaacagggatctcaggaaggacatttcagtgaaatgatatttactcctgaagacatgcccactttcagtatccagcatcagagaattcatactgatgagaaactccttgaatgtaaggaatgtgggaaggattttagttttgtatcagtccttgttcgacatcagcgaattcatactggtgagaaaccttatgaatgcaaagaatgtggcaaggcctttggtagtggtgcaaaccttgcttaccatcaaagaattcatactggtgagaagccttttgaatgtaaagaatgtgggaaggcctttggtagtggctcaaaccttactcaccatcagagaattcatactggtgagaaaccctatgagtgtaaggaatgtgggaaagcctttagttttggatcaggccttattcgacatcagatcattcacagtggtgagaagccttatgagtgtaaggaatgtgggaagtcctttagttttgaatcagcccttattcggcatcacagaattcacacaggtgagaaaccttatgaatgtatagattgtggtaaagcctttggcagtggttcaaaccttactcaacatcggcggattcatactggtgagaaaccttatgaatgcaaagcatgtggaatggcctttagcagtggttcggctcttactcggcatcagagaattcataccggtgagaaaccatatatatgtaatgaatgtggtaaggcctttagttttggatcagcccttactcgacatcaaagaattcatactggtgagaaaccttatgtatgtaaggaatgtgggaaggcttttaatagtggctcagatctcactcagcatcagagaattcacactggtgagaaaccctatgagtgtaaggagtgtgagaaagcctttagaagtggttcaaaacttattcagcatcaaagaatgcatactggagagaaaccttatgaatgtaaggaatgtgggaagacctttagtagtggttcagaccttactcaacatcacagaattcatactggtgagaaaccctatgaatgtaaggaatgtgggaaggcctttggtagtggctcaaaacttatccaacaccagctaatccatactggtgaaagaccctatgaatgtaaagaatgtggaaagtcctttagtagtggttcagctcttaatcggcaccagagaatacacactggtgagaaaccctatgaatgtaaggagtgtgggaaggctttttatagtggctcaagccttactcagcatcagagaattcatacaggtgagaaactttatgaatgtaagaactgtgggaaggcttatgggagggattcagagtttcagcaacataagaaaagtcataatggtaagaaactctgcgaattggaaactataaattgaaattatgtgctgaaggaaggactctaaacatatgacttaagaaaattcatagtggtgaaaatctctacaaatagaactaaggtacaaatgccttacttatgcttcacaggttagtcagtctaagaatatttatacaggaaaaaaatcaccccaaataaaataaatatttgaagatccttatctatattcattccttcattacttttggaaaattcttacttgtgaatgttaaaaatgaaaaaaaaatcatttattatattttgcctcaactttaaacattggaaaactcatttctgggttaatc

SEQ ID NO: 312131 - DNA, 689 bp, Homo sapiens
gaaggctccgatgggcagctcacctcaaagagatagttttgttggtgccagagtccgcgccaggggaatcgggatggctgggctgtagctttcggcaacctgtcgctttctggactacacttcccagaagcctctaggcccagggcactctcccgcgataactagattgtctcttgaggagtgggcgggatcttcccgcggatttgggcaagcggccttggggctttgtgagatagctagggtcgacttgtgtggattctagtagaacggagctgaccctatccgaacaggcccctgccctgcttggatagaggcctccgaacaggagtaaagaatggctgttgaacatccacaaggcacctgcaagactatgaatcaaagttgagaccaagaaattatttctgaaaaaggatatggaaaaccttacaaaacacagcattgagtgttcaagtttcagagatcccccacaggcgctgcctgagacccagctctgtgtctcctcgtcgtacagcttgtggagctccgactgcaaggccatcagcatgcccaggcaggggttaagctggagggccatggaggaggacaggccagcaggatgccgcttctgctccagggcatgcaccatgcgtgagatattctaattatatacacgttcataaacatatgctcacatgcacagagtatgatac

SEQ ID NO: 312132 - DNA, 597 bp, Homo sapiens
gaaggctccgatgggcagctcacctcaaagagatagttttgttggtgccagagtccgcgccaggggaatcgggatggctgggctgtagctttcggcaacctgtcgctttctggactacacttcccagaagcctctaggcccagggcactctcccgcgataactagattgtctcttgaggagtgggcgggatcttcccgcggatttgggcaagcggccttggggctttgtgagatagctagggtcgacttgtgtggattctagtagaacggagctgaccctatccgaacaggcccctgccctgcttggatagaggcctccgaacaggagtaaagaatggctgttgaacatccacaaggcacctgcaagatcccccacaggcgctgcctgagacccagctctgtgtctcctcgtcgtacagcttgtggagctccgactgcaaggccatcagcatgcccaggcaggggttaagctggagggccatggaggaggacaggccagcaggatgccgcttctgctccagggcatgcaccatgcgtgagatattctaattatatacacgttcataaacatatgctcacatgcacagagtatgatac

SEQ ID NO: 312133 - DNA, 1550 bp, Homo sapiens
gaaggctccgatgggcagctcacctcaaagagatagttttgttggtgccagagtccgcgccaggggaatcgggatggctgggctgtagctttcggcaacctgtcgctttctggactacacttcccagaagcctctaggcccagggcactctcccgcgataactagattgtctcttgaggagtgggcgggatcttcccgcggatttgggcaagcggccttggggctttgtgagatagctagggtcgacttgtgtggattctagtagaacggagctgaccctatccgaacaggcgtaagtgaggcggctcggagcctggcgcgacaggaactcccgacctgtgtgggctgcgtggggaacaggctaaggagcgattgtgaggagtgtgtacggttgtgactgggggcgtgtgtctgtgcgaccgtgtatggaactgtgagggcggggaggaggactttttgtttatgtttgtgcgggtgtgagtagagtttaattgtgaccgggttgggcactgtgtttgcgagtgtgaggttcctggaccgcggttgtgactgtatgtccccttggggtgtgtgtgtgtgtgtttactaccatttgccgaactgtgtgtagtatgccttaattttgaggtttgtggctgcttccgtgtgtgtgtgtgcgcgcgcgttggtgatattgttgatggagggtgcgtgtgaatttgttgtcattgtgaccccaaggtgtatgtcactgggaatttgagagatgcccacggactctgtggttgtgtccgtgtctacccccgtggtgtgtatgagtgtgtgattgtgtgttgtgtttaggtttggggtgcctgtgacgtttatgtccctgcggtgtgagtgagtttgtgtgactatgtgtccgtatagccaatgtaggtatggggagtctttgtctttgtgacttcagccattggagacccctgtgagctcagggacaggttctgcccagaacggcattgaccctaccgttgtctgtgatgcccggattaagcaggatgccctagacttctctgaccttcctctgtaggtgatgggcagtaggggctgagcaaagataacttctgacatagtcaaaccaactccctctcagaagaacctgatgtttcctgactgctttctccttcctcagccctgccctgcttggatagaggcctccgaacaggagtaaagaatggctgttgaacatccacaaggcacctgcaagactatgaatcaaagttgagaccaagaaattatttctgaaaaaggatatggaaaaccttacaaaacacagcattgagtgttcaagtttcagagatcccccacaggcgctgcctgagacccagctctgtgtctcctcgtcgtacagcttgtggagctccgactgcaaggccatcagcatgcccaggcaggggttaagctggagggccatggaggaggacaggccagcaggatgccgcttctgctccagggcatgcaccatgcgtgagatattctaattatatacacgttcataaacatatgctcacatgcacagagtatgatac

SEQ ID NO: 312134 - DNA, 1458 bp, Homo sapiens
gaaggctccgatgggcagctcacctcaaagagatagttttgttggtgccagagtccgcgccaggggaatcgggatggctgggctgtagctttcggcaacctgtcgctttctggactacacttcccagaagcctctaggcccagggcactctcccgcgataactagattgtctcttgaggagtgggcgggatcttcccgcggatttgggcaagcggccttggggctttgtgagatagctagggtcgacttgtgtggattctagtagaacggagctgaccctatccgaacaggcgtaagtgaggcggctcggagcctggcgcgacaggaactcccgacctgtgtgggctgcgtggggaacaggctaaggagcgattgtgaggagtgtgtacggttgtgactgggggcgtgtgtctgtgcgaccgtgtatggaactgtgagggcggggaggaggactttttgtttatgtttgtgcgggtgtgagtagagtttaattgtgaccgggttgggcactgtgtttgcgagtgtgaggttcctggaccgcggttgtgactgtatgtccccttggggtgtgtgtgtgtgtgtttactaccatttgccgaactgtgtgtagtatgccttaattttgaggtttgtggctgcttccgtgtgtgtgtgtgcgcgcgcgttggtgatattgttgatggagggtgcgtgtgaatttgttgtcattgtgaccccaaggtgtatgtcactgggaatttgagagatgcccacggactctgtggttgtgtccgtgtctacccccgtggtgtgtatgagtgtgtgattgtgtgttgtgtttaggtttggggtgcctgtgacgtttatgtccctgcggtgtgagtgagtttgtgtgactatgtgtccgtatagccaatgtaggtatggggagtctttgtctttgtgacttcagccattggagacccctgtgagctcagggacaggttctgcccagaacggcattgaccctaccgttgtctgtgatgcccggattaagcaggatgccctagacttctctgaccttcctctgtaggtgatgggcagtaggggctgagcaaagataacttctgacatagtcaaaccaactccctctcagaagaacctgatgtttcctgactgctttctccttcctcagccctgccctgcttggatagaggcctccgaacaggagtaaagaatggctgttgaacatccacaaggcacctgcaagatcccccacaggcgctgcctgagacccagctctgtgtctcctcgtcgtacagcttgtggagctccgactgcaaggccatcagcatgcccaggcaggggttaagctggagggccatggaggaggacaggccagcaggatgccgcttctgctccagggcatgcaccatgcgtgagatattctaattatatacacgttcataaacatatgctcacatgcacagagtatgatac

SEQ ID NO: 312135 - DNA, 1603 bp, Homo sapiens
gaaggctccgatgggcagctcacctcaaagagatagttttgttggtgccagagtccgcgccaggggaatcgggatggctgggctgtagctttcggcaacctgtcgctttctggactacacttcccagaagcctctaggcccagggcactctcccgcgataactagattgtctcttgaggagtgggcgggatcttcccgcggatttgggcaagcggccttggggctttgtgagatagctagggtcgacttgtgtggattctagtagaacggagctgaccctatccgaacaggcgtaagtgaggcggctcggagcctggcgcgacaggaactcccgacctgtgtgggctgcgtggggaacaggctaaggagcgattgtgaggagtgtgtacggttgtgactgggggcgtgtgtctgtgcgaccgtgtatggaactgtgagggcggggaggaggactttttgtttatgtttgtgcgggtgtgagtagagtttaattgtgaccgggttgggcactgtgtttgcgagtgtgaggttcctggaccgcggttgtgactgtatgtccccttggggtgtgtgtgtgtgtgtttactaccatttgccgaactgtgtgtagtatgccttaattttgaggtttgtggctgcttccgtgtgtgtgtgtgcgcgcgcgttggtgatattgttgatggagggtgcgtgtgaatttgttgtcattgtgaccccaaggtgtatgtcactgggaatttgagagatgcccacggactctgtggttgtgtccgtgtctacccccgtggtgtgtatgagtgtgtgattgtgtgttgtgtttaggtttggggtgcctgtgacgtttatgtccctgcggtgtgagtgagtttgtgtgactatgtgtccgtatagccaatgtaggtatggggagtctttgtctttgtgacttcagccattggagacccctgtgagctcagggacaggttctgcccagaacggcattgaccctaccgttgtctgtgatgcccggattaagcaggatgccctagacttctctgaccttcctctgtaggtgatgggcagtaggggctgagcaaagataacttctgacatagtcaaaccaactccctctcagaagaacctgatgtttcctgactgctttctccttcctcagccctgccctgcttggatagaggcctccgaacaggagtaaagaatggctgttgaacatccacaaggcacctgcaagacctctaacttcaccctggagttgagcagaaacatggcttgccttttccctcagatcagtcttggactccagacaaagggttggaactttgagccaataagcaggttactggtaacagtgcctgaggaaagacaaagctatgggtatcccccacaggcgctgcctgagacccagctctgtgtctcctcgtcgtacagcttgtggagctccgactgcaaggccatcagcatgcccaggcaggggttaagctggagggccatggaggaggacaggccagcaggatgccgcttctgctccagggcatgcaccatgcgtgagatattctaattatatacacgttcataaacatatgctcacatgcacagagtatgatac

SEQ ID NO: 312136 - DNA, 771 bp, Homo sapiens
gaaggctccgatgggcagctcacctcaaagagatagttttgttggtgccagagtccgcgccaggggaatcgggatggctgggctgtagctttcggcaacctgtcgctttctggactacacttcccagaagcctctaggcccagggcactctcccgcgataactagattgtctcttgaggagtgggcgggatcttcccgcggatttgggcaagcggccttggggctttgtgagatagctagggtcgacttgtgtggattctagtagaacggagctgaccctatccgaacaggcgtaagtgaggcggctcggagcctggcgcgacaggaactcccgacctgtgtgggctgcgtggggaacaggctaaggagcgattccctgccctgcttggatagaggcctccgaacaggagtaaagaatggctgttgaacatccacaaggcacctgcaagactatgaatcaaagttgagaccaagaaattatttctgaaaaaggatatggaaaaccttacaaaacacagcattgagtgttcaagtttcagagatcccccacaggcgctgcctgagacccagctctgtgtctcctcgtcgtacagcttgtggagctccgactgcaaggccatcagcatgcccaggcaggggttaagctggagggccatggaggaggacaggccagcaggatgccgcttctgctccagggcatgcaccatgcgtgagatattctaattatatacacgttcataaacatatgctcacatgcacagagtatgatac

SEQ ID NO: 312137 - DNA, 420 bp, Homo sapiens
tatctattataaacgtttaatctctcccagaacacaaaaaagtgaatgtttgcttttatattttctttcagactatgaatcaaagttgagaccaagaaattatttctgaaaaaggatatggaaaaccttacaaaacacagcattgagtgttcaagtttcagaggtgattgggaatgtaaaaaccagtttgagagaaaacagggatctcaggaaggacatttcagtgaaatgatatttactcctgaagacatgcccactttcagtatccagcatcagagaattcatactgatgagaaactccttgaatgtaaggaatgtgggaaggattttagttttgtatcagtccttgttcgacatcagcgaattcatactggtgagaaaccttatgaatgcaaagaatgtggcaaggcctttggtagt

SEQ ID NO: 312138 - DNA, 2184 bp, Homo sapiens
gaaggctccgatgggcagctcacctcaaagagatagttttgttggtgccagagtccgcgccaggggaatcgggatggctgggctgtagctttcggcaacctgtcgctttctggactacacttcccagaagcctctaggcccagggcactctcccgcgataactagattgtctcttgaggagtgggcgggatcttcccgcggatttgggcaagcggccttggggctttgtgagatagctagggtcgacttgtgtggattctagtagaacggagctgaccctatccgaacaggcccctgccctgcttggatagaggcctccgaacaggagtaaagaatggctgttgaacatccacaaggcacctgcaagactatgaatcaaagttgagaccaagaaattatttctgaaaaaggatatggaaaaccttacaaaacacagcattgagtgttcaagtttcagaggtgattgggaatgtaaaaaccagtttgagagaaaacagggatctcaggaaggacatttcagtgaaatgatatttactcctgaagacatgcccactttcagtatccagcatcagagaattcatactgatgagaaactccttgaatgtaaggaatgtgggaaggattttagttttgtatcagtccttgttcgacatcagcgaattcatactggtgagaaaccttatgaatgcaaagaatgtggcaaggcctttggtagtggtgcaaaccttgcttaccatcaaagaattcatactggtgagaagccttttgaatgtaaagaatgtgggaaggcctttggtagtggctcaaaccttactcaccatcagagaattcatactggtgagaaaccctatgagtgtaaggaatgtgggaaagcctttagttttggatcaggccttattcgacatcagatcattcacagtggtgagaagccttatgagtgtaaggaatgtgggaagtcctttagttttgaatcagcccttattcggcatcacagaattcacacaggtgagaaaccttatgaatgtatagattgtggtaaagcctttggcagtggttcaaaccttactcaacatcggcggattcatactggtgagaaaccttatgaatgcaaagcatgtggaatggcctttagcagtggttcggctcttactcggcatcagagaattcataccggtgagaaaccatatatatgtaatgaatgtggtaaggcctttagttttggatcagcccttactcgacatcaaagaattcatactggtgagaaaccttatgtatgtaaggaatgtgggaaggcttttaatagtggctcagatctcactcagcatcagagaattcacactggtgagaaaccctatgagtgtaaggagtgtgagaaagcctttagaagtggttcaaaacttattcagcatcaaagaatgcatactggagagaaaccttatgaatgtaaggaatgtgggaagacctttagtagtggttcagaccttactcaacatcacagaattcatactggtgagaaaccctatgaatgtaaggaatgtgggaaggcctttggtagtggctcaaaacttatccaacaccagctaatccatactggtgaaagaccctatgaatgtaaagaatgtggaaagtcctttagtagtggttcagctcttaatcggcaccagagaatacacactggtgagaaaccctatgaatgtaaggagtgtgggaaggctttttatagtggctcaagccttactcagcatcagagaattcatacaggtgagaaactttatgaatgtaagaactgtgggaaggcttatgggagggattcagagtttcagcaacataagaaaagtcataatggtaagaaactctgcgaattggaaactataaattgaaattatgtgctgaaggaaggactctaaacatatgacttaagaaaattcatagtggtgaaaatctctacaaatagaactaaggtacaaatgccttacttatgcttcacaggttagtcagtctaagaatatttatacaggaaaaaaatcaccccaaataaaataaatatttgaagatccttatctatattcattccttcattacttttggaaaattcttacttgtgaatgttaaaaatgaaaaaaaaatcatttattatattttgcctcaactttaaacattggaaaactcatttctgggttaatc

SEQ ID NO: 312139 - DNA, 1868 bp, Homo sapiens
agcaacacaagtagactaaggcatcaagttttaccacttaagattaaggtgactatgaatcaaagttgagaccaagaaattatttctgaaaaaggatatggaaaaccttacaaaacacagcattgagtgttcaagtttcagaggtgattgggaatgtaaaaaccagtttgagagaaaacagggatctcaggaaggacatttcagtgaaatgatatttactcctgaagacatgcccactttcagtatccagcatcagagaattcatactgatgagaaactccttgaatgtaaggaatgtgggaaggattttagttttgtatcagtccttgttcgacatcagcgaattcatactggtgagaaaccttatgaatgcaaagaatgtggcaaggcctttggtagtggtgcaaaccttgcttaccatcaaagaattcatactggtgagaagccttttgaatgtaaagaatgtgggaaggcctttggtagtggctcaaaccttactcaccatcagagaattcatactggtgagaaaccctatgagtgtaaggaatgtgggaaagcctttagttttggatcaggccttattcgacatcagatcattcacagtggtgagaagccttatgagtgtaaggaatgtgggaagtcctttagttttgaatcagcccttattcggcatcacagaattcacacaggtgagaaaccttatgaatgtatagattgtggtaaagcctttggcagtggttcaaaccttactcaacatcggcggattcatactggtgagaaaccttatgaatgcaaagcatgtggaatggcctttagcagtggttcggctcttactcggcatcagagaattcataccggtgagaaaccatatatatgtaatgaatgtggtaaggcctttagttttggatcagcccttactcgacatcaaagaattcatactggtgagaaaccttatgtatgtaaggaatgtgggaaggcttttaatagtggctcagatctcactcagcatcagagaattcacactggtgagaaaccctatgagtgtaaggagtgtgagaaagcctttagaagtggttcaaaacttattcagcatcaaagaatgcatactggagagaaaccttatgaatgtaaggaatgtgggaagacctttagtagtggttcagaccttactcaacatcacagaattcatactggtgagaaaccctatgaatgtaaggaatgtgggaaggcctttggtagtggctcaaaacttatccaacaccagctaatccatactggtgaaagaccctatgaatgtaaagaatgtggaaagtcctttagtagtggttcagctcttaatcggcaccagagaatacacactggtgagaaaccctatgaatgtaaggagtgtgggaaggctttttatagtggctcaagccttactcagcatcagagaattcatacaggtgagaaactttatgaatgtaagaactgtgggaaggcttatgggagggattcagagtttcagcaacataagaaaagtcataatggtaagaaactctgcgaattggaaactataaattgaaattatgtgctgaaggaaggactctaaacatatgacttaagaaaattcatagtggtgaaaatctctacaaatagaactaaggtacaaatgccttacttatgcttcacaggttagtcagtctaagaatatttatacaggaaaaaaatcaccccaaataaaataaatatttgaagatccttatctatattcattccttcattacttttggaaaattcttacttgtgaatgttaaaaatgaaaaaaaaatcatttattatattttgcctcaactttaaacattggaaaactcatttctgggttaatc

SEQ ID NO: 312140 - DNA, 3045 bp, Homo sapiens
gaaggctccgatgggcagctcacctcaaagagatagttttgttggtgccagagtccgcgccaggggaatcgggatggctgggctgtagctttcggcaacctgtcgctttctggactacacttcccagaagcctctaggcccagggcactctcccgcgataactagattgtctcttgaggagtgggcgggatcttcccgcggatttgggcaagcggccttggggctttgtgagatagctagggtcgacttgtgtggattctagtagaacggagctgaccctatccgaacaggcgtaagtgaggcggctcggagcctggcgcgacaggaactcccgacctgtgtgggctgcgtggggaacaggctaaggagcgattgtgaggagtgtgtacggttgtgactgggggcgtgtgtctgtgcgaccgtgtatggaactgtgagggcggggaggaggactttttgtttatgtttgtgcgggtgtgagtagagtttaattgtgaccgggttgggcactgtgtttgcgagtgtgaggttcctggaccgcggttgtgactgtatgtccccttggggtgtgtgtgtgtgtgtttactaccatttgccgaactgtgtgtagtatgccttaattttgaggtttgtggctgcttccgtgtgtgtgtgtgcgcgcgcgttggtgatattgttgatggagggtgcgtgtgaatttgttgtcattgtgaccccaaggtgtatgtcactgggaatttgagagatgcccacggactctgtggttgtgtccgtgtctacccccgtggtgtgtatgagtgtgtgattgtgtgttgtgtttaggtttggggtgcctgtgacgtttatgtccctgcggtgtgagtgagtttgtgtgactatgtgtccgtatagccaatgtaggtatggggagtctttgtctttgtgacttcagccattggagacccctgtgagctcagggacaggttctgcccagaacggcattgaccctaccgttgtctgtgatgcccggattaagcaggatgccctagacttctctgaccttcctctgtaggtgatgggcagtaggggctgagcaaagataacttctgacatagtcaaaccaactccctctcagaagaacctgatgtttcctgactgctttctccttcctcagccctgccctgcttggatagaggcctccgaacaggagtaaagaatggctgttgaacatccacaaggcacctgcaagactatgaatcaaagttgagaccaagaaattatttctgaaaaaggatatggaaaaccttacaaaacacagcattgagtgttcaagtttcagaggtgattgggaatgtaaaaaccagtttgagagaaaacagggatctcaggaaggacatttcagtgaaatgatatttactcctgaagacatgcccactttcagtatccagcatcagagaattcatactgatgagaaactccttgaatgtaaggaatgtgggaaggattttagttttgtatcagtccttgttcgacatcagcgaattcatactggtgagaaaccttatgaatgcaaagaatgtggcaaggcctttggtagtggtgcaaaccttgcttaccatcaaagaattcatactggtgagaagccttttgaatgtaaagaatgtgggaaggcctttggtagtggctcaaaccttactcaccatcagagaattcatactggtgagaaaccctatgagtgtaaggaatgtgggaaagcctttagttttggatcaggccttattcgacatcagatcattcacagtggtgagaagccttatgagtgtaaggaatgtgggaagtcctttagttttgaatcagcccttattcggcatcacagaattcacacaggtgagaaaccttatgaatgtatagattgtggtaaagcctttggcagtggttcaaaccttactcaacatcggcggattcatactggtgagaaaccttatgaatgcaaagcatgtggaatggcctttagcagtggttcggctcttactcggcatcagagaattcataccggtgagaaaccatatatatgtaatgaatgtggtaaggcctttagttttggatcagcccttactcgacatcaaagaattcatactggtgagaaaccttatgtatgtaaggaatgtgggaaggcttttaatagtggctcagatctcactcagcatcagagaattcacactggtgagaaaccctatgagtgtaaggagtgtgagaaagcctttagaagtggttcaaaacttattcagcatcaaagaatgcatactggagagaaaccttatgaatgtaaggaatgtgggaagacctttagtagtggttcagaccttactcaacatcacagaattcatactggtgagaaaccctatgaatgtaaggaatgtgggaaggcctttggtagtggctcaaaacttatccaacaccagctaatccatactggtgaaagaccctatgaatgtaaagaatgtggaaagtcctttagtagtggttcagctcttaatcggcaccagagaatacacactggtgagaaaccctatgaatgtaaggagtgtgggaaggctttttatagtggctcaagccttactcagcatcagagaattcatacaggtgagaaactttatgaatgtaagaactgtgggaaggcttatgggagggattcagagtttcagcaacataagaaaagtcataatggtaagaaactctgcgaattggaaactataaattgaaattatgtgctgaaggaaggactctaaacatatgacttaagaaaattcatagtggtgaaaatctctacaaatagaactaaggtacaaatgccttacttatgcttcacaggttagtcagtctaagaatatttatacaggaaaaaaatcaccccaaataaaataaatatttgaagatccttatctatattcattccttcattacttttggaaaattcttacttgtgaatgttaaaaatgaaaaaaaaatcatttattatattttgcctcaactttaaacattggaaaactcatttctgggttaatc

SEQ ID NO: 312141 - DNA, 2198 bp, Homo sapiens
cggggtgaaagaaagcttgccccagaggacttaaacaggcaagaaggacttggttaaagactattgcaatagtcaacttccaatacaacagcagctggagatttatagctaacgggctgggtgaaggagttaaaggatgctaaattactaagaggaagttaagtatcaagagtggggggattgttactaaactggcttagctggattcttgctgaagtgctgttcgcaggctatggaggaggcctggccaagcaaaaagggctcagaggagcctgactaaagcttggtctagggactccttgtcagccctgccctgcttggatagaggcctccgaacaggagtaaagaatggctgttgaacatccacaaggcacctgcaagactatgaatcaaagttgagaccaagaaattatttctgaaaaaggatatggaaaaccttacaaaacacagcattgagtgttcaagtttcagaggtgattgggaatgtaaaaaccagtttgagagaaaacagggatctcaggaaggacatttcagtgaaatgatatttactcctgaagacatgcccactttcagtatccagcatcagagaattcatactgatgagaaactccttgaatgtaaggaatgtgggaaggattttagttttgtatcagtccttgttcgacatcagcgaattcatactggtgagaaaccttatgaatgcaaagaatgtggcaaggcctttggtagtggtgcaaaccttgcttaccatcaaagaattcatactggtgagaagccttttgaatgtaaagaatgtgggaaggcctttggtagtggctcaaaccttactcaccatcagagaattcatactggtgagaaaccctatgagtgtaaggaatgtgggaaagcctttagttttggatcaggccttattcgacatcagatcattcacagtggtgagaagccttatgagtgtaaggaatgtgggaagtcctttagttttgaatcagcccttattcggcatcacagaattcacacaggtgagaaaccttatgaatgtatagattgtggtaaagcctttggcagtggttcaaaccttactcaacatcggcggattcatactggtgagaaaccttatgaatgcaaagcatgtggaatggcctttagcagtggttcggctcttactcggcatcagagaattcataccggtgagaaaccatatatatgtaatgaatgtggtaaggcctttagttttggatcagcccttactcgacatcaaagaattcatactggtgagaaaccttatgtatgtaaggaatgtgggaaggcttttaatagtggctcagatctcactcagcatcagagaattcacactggtgagaaaccctatgagtgtaaggagtgtgagaaagcctttagaagtggttcaaaacttattcagcatcaaagaatgcatactggagagaaaccttatgaatgtaaggaatgtgggaagacctttagtagtggttcagaccttactcaacatcacagaattcatactggtgagaaaccctatgaatgtaaggaatgtgggaaggcctttggtagtggctcaaaacttatccaacaccagctaatccatactggtgaaagaccctatgaatgtaaagaatgtggaaagtcctttagtagtggttcagctcttaatcggcaccagagaatacacactggtgagaaaccctatgaatgtaaggagtgtgggaaggctttttatagtggctcaagccttactcagcatcagagaattcatacaggtgagaaactttatgaatgtaagaactgtgggaaggcttatgggagggattcagagtttcagcaacataagaaaagtcataatggtaagaaactctgcgaattggaaactataaattgaaattatgtgctgaaggaaggactctaaacatatgacttaagaaaattcatagtggtgaaaatctctacaaatagaactaaggtacaaatgccttacttatgcttcacaggttagtcagtctaagaatatttatacaggaaaaaaatcaccccaaataaaataaatatttgaagatccttatctatattcattccttcattacttttggaaaattcttacttgtgaatgttaaaaatgaaaaaaaaatcatttattatattttgcctcaactttaaacattggaaaactcatttctgggttaatc

SEQ ID NO: 312142 - DNA, 300 bp, Homo sapiens
ggaggttgcagtgagccgagattgcgccattgcactccagcctgggcaacagagcaagactctgtctcaaaaagaaaaaaaaaaaaaaaaaaaccacacactttgtacttcattttctgacctgaaagcagctctgtaattttagttatcatgcctcagacctcctctagaaactgaaagattatcccacaatgccagccatttctctccgccacctggtgcttggtctgcctaacactgtgtttctagagaggtgaatttgcaggctctttaccatgtatagaaggtgaggtttttttt

SEQ ID NO: 312143 - DNA, 2713 bp, Homo sapiens
  misc_feature (1)..(1): n is a, c, g, or t
  misc_feature (3)..(3): n is a, c, g, or t
  misc_feature (5)..(6): n is a, c, g, or t
ngncnngagctggttgccggggcaggggcggaggcggaggcagaggtggaggcgctttgaaagccgtcattgtgtggcactggacggggaatcaagagacccggtttctaatccctgctctgtcactaacaagctgcgtgatcttcggaaaaaagtaatcctcttggaaagctggaaacatagtccgaagcttaagtgaaaatgatacatgttagaagacatgaaacaaggagaaattctaagagtcacgtgcctgagcagaaatctcgagttgattggaggcgaactaaaagaagtagtatctcacaattacttgatagtgatgaagagcttgatagtgaagaatttgatagtgatgaagagcttgatagtgatgaaagttttgaaaatgatgaagagcttgatagtaacaagggacctgattgtaataaaacaccaggaagtgaaagagagctcaacttaagtaaaattcaaagtgaaggaaatgacagtaagtgtctcattaactctggcaacggttcaacatatgaagaagaaacgaacaaaatcaaacataggaatattgacttacaagatcaggaaaaacatttaagtcaagaggataatgatctcaacaaacaaactggacaaataatagaggatgatcaggaaaaacatttaagtcaagaggataatgatctcaacaaacaaactggacaaataatagaggatgatttagaagaagaagacatcaagcgaggaaaaagaaaaaggctatcctctgtgatgtgtgacagtgatgagagtgatgacagcgatatcctagttagaaaagtaggtgttaaacgtccccgtagagtggttgaagatgaaggttcttcagtggaaatggagcaaaagactcctgaaaaaacattagctgcacaaaagcgagaaaaacttcagaagctcaaagaactctcaaaacaaagatctcgtcagagacgcagtagtggtagagattttgaggactctgaaaaggaatcttgcccaagcagtgatgaagttgatgaggaggaagaagaggataattatgaatctgatgaagatggagatgattatattatcgatgactttgtagtgcaagatgaggagggtgatgaagagaataaaaaccaacaaggagaaaaattgactacatcacaactgaaattagtaaaacagaattctctttattcttttagtgaccactatactcattttgaaagagttgtgaaggctcttctgatcaacgctttagatgaatcttttctgggaacattatatgatggcacaaggcaaaaatcatatgcaaaagatatgctaacatctcttcattatttggataaccgctttgttcagcctcgtctagagagcttggtatctagaagtcgttggaaagagcaatataaggagcgagtagaaaattattctaatgtaagtattcatttgaagaatcctgaaaactgttcctgccaggcttgtggactgcatcgctactgtaaatattcagtgcatttatcaggagagttgtataacaccaggaccatgcaaatagataatttcatgtcacatgataaacaggtgttcactgttggcagaatttgtgccagccgtaccagaatttatcataaactgaaacattttaaattcaaactataccaggaatgttgcaccattgcaatgacagaagaagttgaagatgaacaagttaaagaaacagtggaaagaattttcaggcggtcaaaagaaaatggctggattaaggagaaatatggtcaacttgaagaatatctcaattttgcggattactttcaagaagagaagtttgagttgtaacacatttccatcagagaagattttttaaattcctgtaaatgtgaagatcatgattcttgtttttctgtatcatgtgacatgtttgtacattttatctatatcttcatggcaaaatattttgtttaaaacatgattatcttaattcctgtgaagtggcactctacactctaattaaacttttatctgatgtacataaaagcattatcttaatttttaagtctgtaaatatattttaaagttatataataatggctttataacagatgactgtcaagtgaatgagctgttgatatcctgtcagtttagtcaaaatatattgtatcttaaaaatgtatttagactaacgtctacatgtatttttacggaattcctgtccagatctgtttattcttttacagtattaaatgattttcactaatatattttttactgctatcatctaaatcagtgggccatggaagaaacctcatatatcattcagttcaatcccattgcttcagaatcagatcatagcatatctattctaagtagaggaatgcttttttccttttcttgaaagtttctctttcaaatagatttcaggcctctagagtctttcaaccctcacattcaggaataattttatgtaaattttcatgctttataatgttcttacttttttctattcaattttgtctatatattgatgattaagatgtattttatttatttttatccatagctttttccatataagtatgtatcttagggtcagaactgctgaaagagacaaactcagccaaaaacacttggaaagcatattttggtatctgcattgctttgcatatctaaattttcccataaagtaataaagtaaaatggttgcagagtgaacaaa

SEQ ID NO: 312144 - DNA, 861 bp, Homo sapiens
  misc_feature (1)..(1): n is a, c, g, or t
  misc_feature (3)..(3): n is a, c, g, or t
  misc_feature (5)..(6): n is a, c, g, or t
ngncnngagctggttgccggggcaggggcggaggcggaggcagaggtggaggcgctttgaaagccgtcattgtgtggcactggacggggaatcaagagacccggtttctaatccctgctctgtcactaacaagctgcgtgatcttcggaaaaaagtaatcctcttggaaagctggaaacatagtccggtaagattcccattgctcaaaaaatttttggcattgaatttttgtaattaccttcagaattcgcagcacattttttgaagatttttaatggtagttaattctcatcttcttaagttggatttcatttctgcaagctgctaacaggtccttataaccgagacaagtgaatgaagtgggtgttaaagtcactgtttgggataaaaaatgaagtgtgattattttcatatttttagattttttatagtgtgtggtttatagaaagactccaggaatattctgtgctgtggtggaaatattggaataatcagcctcataaggtgatttctttggtggggatagctgtcagttcaatatatacctctaacatgtagtttgaggtcggtctcattacattgtcatatttctattccctaacaaccacagaactacatatgttattttttctagttatcttacgtgtcactaattgttcttttaatatatacttgtgataattttaatggaattcattcttttctaaatgataaactgacagcttttgttttccttcccaatactatgctctgctttgccgtggaacttacttgttttattcacttaactacattattggattgttagttaagttttctattggttatattgtgtatttaactttgaggggaaagccactc

SEQ ID NO: 312145 - DNA, 3191 bp, Homo sapiens
  misc_feature (1)..(1): n is a, c, g, or t
  misc_feature (3)..(3): n is a, c, g, or t
  misc_feature (5)..(6): n is a, c, g, or t
ngncnngagctggttgccggggcaggggcggaggcggaggcagaggtggaggcgctttgaaaggtgagagcgcgagggcggtgcggggctgtctcccggctgggactcgctcgcgctcccggtgctaatggtttatgagagggcgggggaagccgtgcctcctcgcggactaagagaaaaattcccgcgggcgctctttgggtgggccggagaacgcccctcagccctttgcgcctctaaccctcctcagctgagctgcagtgggcgcggtgcccgttatttccgccttggggaggtgcttggaactgatgtagggagctcggttggtgatttctcgggtttctggcctttccagacccttgtaattgttttctcggtgcagagctcttttggggtctgggggtttccgtcgtcctgcgcgcgtcatcgcgaagcttggcctgagggtccggtttcctagctactgtgcccctccctcctggaggcagagtgacggactagtgggctagcgggcgctgggttcctgcgtcccgccaaagagccgtcattgtgtggcactggacggggaatcaagagacccggtttctaatccctgctctgtcactaacaagctgcgtgatcttcggaaaaaagtaatcctcttggaaagctggaaacatagtccgaagcttaagtgaaaatgatacatgttagaagacatgaaacaaggagaaattctaagagtcacgtgcctgagcagaaatctcgagttgattggaggcgaactaaaagaagtagtatctcacaattacttgatagtgatgaagagcttgatagtgaagaatttgatagtgatgaagagcttgatagtgatgaaagttttgaaaatgatgaagagcttgatagtaacaagggacctgattgtaataaaacaccaggaagtgaaagagagctcaacttaagtaaaattcaaagtgaaggaaatgacagtaagtgtctcattaactctggcaacggttcaacatatgaagaagaaacgaacaaaatcaaacataggaatattgacttacaagatcaggaaaaacatttaagtcaagaggataatgatctcaacaaacaaactggacaaataatagaggatgatcaggaaaaacatttaagtcaagaggataatgatctcaacaaacaaactggacaaataatagaggatgatttagaagaagaagacatcaagcgaggaaaaagaaaaaggctatcctctgtgatgtgtgacagtgatgagagtgatgacagcgatatcctagttagaaaagtaggtgttaaacgtccccgtagagtggttgaagatgaaggttcttcagtggaaatggagcaaaagactcctgaaaaaacattagctgcacaaaagcgagaaaaacttcagaagctcaaagaactctcaaaacaaagatctcgtcagagacgcagtagtggtagagattttgaggactctgaaaaggaatcttgcccaagcagtgatgaagttgatgaggaggaagaagaggataattatgaatctgatgaagatggagatgattatattatcgatgactttgtagtgcaagatgaggagggtgatgaagagaataaaaaccaacaaggagaaaaattgactacatcacaactgaaattagtaaaacagaattctctttattcttttagtgaccactatactcattttgaaagagttgtgaaggctcttctgatcaacgctttagatgaatcttttctgggaacattatatgatggcacaaggcaaaaatcatatgcaaaagatatgctaacatctcttcattatttggataaccgctttgttcagcctcgtctagagagcttggtatctagaagtcgttggaaagagcaatataaggagcgagtagaaaattattctaatgtaagtattcatttgaagaatcctgaaaactgttcctgccaggcttgtggactgcatcgctactgtaaatattcagtgcatttatcaggagagttgtataacaccaggaccatgcaaatagataatttcatgtcacatgataaacaggtgttcactgttggcagaatttgtgccagccgtaccagaatttatcataaactgaaacattttaaattcaaactataccaggaatgttgcaccattgcaatgacagaagaagttgaagatgaacaagttaaagaaacagtggaaagaattttcaggcggtcaaaagaaaatggctggattaaggagaaatatggtcaacttgaagaatatctcaattttgcggattactttcaagaagagaagtttgagttgtaacacatttccatcagagaagattttttaaattcctgtaaatgtgaagatcatgattcttgtttttctgtatcatgtgacatgtttgtacattttatctatatcttcatggcaaaatattttgtttaaaacatgattatcttaattcctgtgaagtggcactctacactctaattaaacttttatctgatgtacataaaagcattatcttaatttttaagtctgtaaatatattttaaagttatataataatggctttataacagatgactgtcaagtgaatgagctgttgatatcctgtcagtttagtcaaaatatattgtatcttaaaaatgtatttagactaacgtctacatgtatttttacggaattcctgtccagatctgtttattcttttacagtattaaatgattttcactaatatattttttactgctatcatctaaatcagtgggccatggaagaaacctcatatatcattcagttcaatcccattgcttcagaatcagatcatagcatatctattctaagtagaggaatgcttttttccttttcttgaaagtttctctttcaaatagatttcaggcctctagagtctttcaaccctcacattcaggaataattttatgtaaattttcatgctttataatgttcttacttttttctattcaattttgtctatatattgatgattaagatgtattttatttatttttatccatagctttttccatataagtatgtatcttagggtcagaactgctgaaagagacaaactcagccaaaaacacttggaaagcatattttggtatctgcattgctttgcatatctaaattttcccataaagtaataaagtaaaatggttgcagagtgaacaaa

SEQ ID NO: 312146 - DNA, 2941 bp, Homo sapiens
ggctcactggggactcctttaaattttgcaattggtgttattaataagatgataagagggaagtctgcaaatactcttttcttgcctggtggataataatttacagaagtttctggcctaactcgtgcagtaaaattcggttacataattttttaaaaaagcatatttgtaaactctaaaccattttaatcgttatttttctgaaactaaaatacagcatgaatgagagataaaaataatgatttttaaaggcttaatttttactatcttgtacaaatgtgatattggcagccgtcattgtgtggcactggacggggaatcaagagacccggtttctaatccctgctctgtcactaacaagctgcgtgatcttcggaaaaaagtaatcctcttggaaagctggaaacatagtccgaagcttaagtgaaaatgatacatgttagaagacatgaaacaaggagaaattctaagagtcacgtgcctgagcagaaatctcgagttgattggaggcgaactaaaagaagtagtatctcacaattacttgatagtgatgaagagcttgatagtgaagaatttgatagtgatgaagagcttgatagtgatgaaagttttgaaaatgatgaagagcttgatagtaacaagggacctgattgtaataaaacaccaggaagtgaaagagagctcaacttaagtaaaattcaaagtgaaggaaatgacagtaagtgtctcattaactctggcaacggttcaacatatgaagaagaaacgaacaaaatcaaacataggaatattgacttacaagatcaggaaaaacatttaagtcaagaggataatgatctcaacaaacaaactggacaaataatagaggatgatcaggaaaaacatttaagtcaagaggataatgatctcaacaaacaaactggacaaataatagaggatgatttagaagaagaagacatcaagcgaggaaaaagaaaaaggctatcctctgtgatgtgtgacagtgatgagagtgatgacagcgatatcctagttagaaaagtaggtgttaaacgtccccgtagagtggttgaagatgaaggttcttcagtggaaatggagcaaaagactcctgaaaaaacattagctgcacaaaagcgagaaaaacttcagaagctcaaagaactctcaaaacaaagatctcgtcagagacgcagtagtggtagagattttgaggactctgaaaaggaatcttgcccaagcagtgatgaagttgatgaggaggaagaagaggataattatgaatctgatgaagatggagatgattatattatcgatgactttgtagtgcaagatgaggagggtgatgaagagaataaaaaccaacaaggagaaaaattgactacatcacaactgaaattagtaaaacagaattctctttattcttttagtgaccactatactcattttgaaagagttgtgaaggctcttctgatcaacgctttagatgaatcttttctgggaacattatatgatggcacaaggcaaaaatcatatgcaaaagatatgctaacatctcttcattatttggataaccgctttgttcagcctcgtctagagagcttggtatctagaagtcgttggaaagagcaatataaggagcgagtagaaaattattctaatgtaagtattcatttgaagaatcctgaaaactgttcctgccaggcttgtggactgcatcgctactgtaaatattcagtgcatttatcaggagagttgtataacaccaggaccatgcaaatagataatttcatgtcacatgataaacaggtgttcactgttggcagaatttgtgccagccgtaccagaatttatcataaactgaaacattttaaattcaaactataccaggaatgttgcaccattgcaatgacagaagaagttgaagatgaacaagttaaagaaacagtggaaagaattttcaggcggtcaaaagaaaatggctggattaaggagaaatatggtcaacttgaagaatatctcaattttgcggattactttcaagaagagaagtttgagttgtaacacatttccatcagagaagattttttaaattcctgtaaatgtgaagatcatgattcttgtttttctgtatcatgtgacatgtttgtacattttatctatatcttcatggcaaaatattttgtttaaaacatgattatcttaattcctgtgaagtggcactctacactctaattaaacttttatctgatgtacataaaagcattatcttaatttttaagtctgtaaatatattttaaagttatataataatggctttataacagatgactgtcaagtgaatgagctgttgatatcctgtcagtttagtcaaaatatattgtatcttaaaaatgtatttagactaacgtctacatgtatttttacggaattcctgtccagatctgtttattcttttacagtattaaatgattttcactaatatattttttactgctatcatctaaatcagtgggccatggaagaaacctcatatatcattcagttcaatcccattgcttcagaatcagatcatagcatatctattctaagtagaggaatgcttttttccttttcttgaaagtttctctttcaaatagatttcaggcctctagagtctttcaaccctcacattcaggaataattttatgtaaattttcatgctttataatgttcttacttttttctattcaattttgtctatatattgatgattaagatgtattttatttatttttatccatagctttttccatataagtatgtatcttagggtcagaactgctgaaagagacaaactcagccaaaaacacttggaaagcatattttggtatctgcattgctttgcatatctaaattttcccataaagtaataaagtaaaatggttgcagagtgaacaaa

SEQ ID NO: 312147 - DNA, 3275 bp, Homo sapiens
  misc_feature (1)..(1): n is a, c, g, or t
  misc_feature (3)..(3): n is a, c, g, or t
  misc_feature (5)..(6): n is a, c, g, or t
ngncnngagctggttgccggggcaggggcggaggcggaggcagaggtggaggcgctttgaaaggtgagagcgcgagggcggtgcggggctgtctcccggctgggactcgctcgcgctcccggtgctaatggtttatgagagggcgggggaagccgtgcctcctcgcggactaagagaaaaattcccgcgggcgctctttgggtgggccggagaacgcccctcagccctttgcgcctctaaccctcctcagctgagctgcagtgggcgcggtgcccgttatttccgccttggggaggtgcttggaactgatgtagggagctcggttggtgatttctcgggtttctggcctttccagacccttgtaattgttttctcggtgcagagctcttttggggtctgggggtttccgtcgtcctgcgcgcgtcatcgcgaagcttggcctgagggtccggtttcctagctactgtgcccctccctcctggaggcagagtgacggactagtgggctagcgggcgctgggttcctgcgtcccgccaaagagccgtcattgtgtggcactggacggggaatcaagagacccggtttctaatccctgctctgtcactaacaagctgcgtgatcttcggaaaaaagtaatcctcttggaaagctggaaacatagtccgattttttatagtgtgtggtttatagaaagactccaggaatattctgtgctgtggtggaaatattggaataatcagcctcataagaagcttaagtgaaaatgatacatgttagaagacatgaaacaaggagaaattctaagagtcacgtgcctgagcagaaatctcgagttgattggaggcgaactaaaagaagtagtatctcacaattacttgatagtgatgaagagcttgatagtgaagaatttgatagtgatgaagagcttgatagtgatgaaagttttgaaaatgatgaagagcttgatagtaacaagggacctgattgtaataaaacaccaggaagtgaaagagagctcaacttaagtaaaattcaaagtgaaggaaatgacagtaagtgtctcattaactctggcaacggttcaacatatgaagaagaaacgaacaaaatcaaacataggaatattgacttacaagatcaggaaaaacatttaagtcaagaggataatgatctcaacaaacaaactggacaaataatagaggatgatcaggaaaaacatttaagtcaagaggataatgatctcaacaaacaaactggacaaataatagaggatgatttagaagaagaagacatcaagcgaggaaaaagaaaaaggctatcctctgtgatgtgtgacagtgatgagagtgatgacagcgatatcctagttagaaaagtaggtgttaaacgtccccgtagagtggttgaagatgaaggttcttcagtggaaatggagcaaaagactcctgaaaaaacattagctgcacaaaagcgagaaaaacttcagaagctcaaagaactctcaaaacaaagatctcgtcagagacgcagtagtggtagagattttgaggactctgaaaaggaatcttgcccaagcagtgatgaagttgatgaggaggaagaagaggataattatgaatctgatgaagatggagatgattatattatcgatgactttgtagtgcaagatgaggagggtgatgaagagaataaaaaccaacaaggagaaaaattgactacatcacaactgaaattagtaaaacagaattctctttattcttttagtgaccactatactcattttgaaagagttgtgaaggctcttctgatcaacgctttagatgaatcttttctgggaacattatatgatggcacaaggcaaaaatcatatgcaaaagatatgctaacatctcttcattatttggataaccgctttgttcagcctcgtctagagagcttggtatctagaagtcgttggaaagagcaatataaggagcgagtagaaaattattctaatgtaagtattcatttgaagaatcctgaaaactgttcctgccaggcttgtggactgcatcgctactgtaaatattcagtgcatttatcaggagagttgtataacaccaggaccatgcaaatagataatttcatgtcacatgataaacaggtgttcactgttggcagaatttgtgccagccgtaccagaatttatcataaactgaaacattttaaattcaaactataccaggaatgttgcaccattgcaatgacagaagaagttgaagatgaacaagttaaagaaacagtggaaagaattttcaggcggtcaaaagaaaatggctggattaaggagaaatatggtcaacttgaagaatatctcaattttgcggattactttcaagaagagaagtttgagttgtaacacatttccatcagagaagattttttaaattcctgtaaatgtgaagatcatgattcttgtttttctgtatcatgtgacatgtttgtacattttatctatatcttcatggcaaaatattttgtttaaaacatgattatcttaattcctgtgaagtggcactctacactctaattaaacttttatctgatgtacataaaagcattatcttaatttttaagtctgtaaatatattttaaagttatataataatggctttataacagatgactgtcaagtgaatgagctgttgatatcctgtcagtttagtcaaaatatattgtatcttaaaaatgtatttagactaacgtctacatgtatttttacggaattcctgtccagatctgtttattcttttacagtattaaatgattttcactaatatattttttactgctatcatctaaatcagtgggccatggaagaaacctcatatatcattcagttcaatcccattgcttcagaatcagatcatagcatatctattctaagtagaggaatgcttttttccttttcttgaaagtttctctttcaaatagatttcaggcctctagagtctttcaaccctcacattcaggaataattttatgtaaattttcatgctttataatgttcttacttttttctattcaattttgtctatatattgatgattaagatgtattttatttatttttatccatagctttttccatataagtatgtatcttagggtcagaactgctgaaagagacaaactcagccaaaaacacttggaaagcatattttggtatctgcattgctttgcatatctaaattttcccataaagtaataaagtaaaatggttgcagagtgaacaaa

SEQ ID NO: 312148 - DNA, 1789 bp, Homo sapiens
  misc_feature (1)..(1): n is a, c, g, or t
  misc_feature (3)..(3): n is a, c, g, or t
  misc_feature (5)..(6): n is a, c, g, or t
ngncnngagctggttgccggggcaggggcggaggcggaggcagaggtggaggcgctttgaaaggactctgaaaaggaatcttgcccaagcagtgatgaagttgatgaggaggaagaagaggataattatgaatctgatgaagatggagatgattatattatcgatgactttgtagtgcaagatgaggagggtgatgaagagaataaaaaccaacaaggagaaaaattgactacatcacaactgaaattagtaaaacagaattctctttattcttttagtgaccactatactcattttgaaagagttgtgaaggctcttctgatcaacgctttagatgaatcttttctgggaacattatatgatggcacaaggcaaaaatcatatgcaaaagatatgctaacatctcttcattatttggataaccgctttgttcagcctcgtctagagagcttggtatctagaagtcgttggaaagagcaatataaggagcgagtagaaaattattctaatgtaagtattcatttgaagaatcctgaaaactgttcctgccaggcttgtggactgcatcgctactgtaaatattcagtgcatttatcaggagagttgtataacaccaggaccatgcaaatagataatttcatgtcacatgataaacaggtgttcactgttggcagaatttgtgccagccgtaccagaatttatcataaactgaaacattttaaattcaaactataccaggaatgttgcaccattgcaatgacagaagaagttgaagatgaacaagttaaagaaacagtggaaagaattttcaggcggtcaaaagaaaatggctggattaaggagaaatatggtcaacttgaagaatatctcaattttgcggattactttcaagaagagaagtttgagttgtaacacatttccatcagagaagattttttaaattcctgtaaatgtgaagatcatgattcttgtttttctgtatcatgtgacatgtttgtacattttatctatatcttcatggcaaaatattttgtttaaaacatgattatcttaattcctgtgaagtggcactctacactctaattaaacttttatctgatgtacataaaagcattatcttaatttttaagtctgtaaatatattttaaagttatataataatggctttataacagatgactgtcaagtgaatgagctgttgatatcctgtcagtttagtcaaaatatattgtatcttaaaaatgtatttagactaacgtctacatgtatttttacggaattcctgtccagatctgtttattcttttacagtattaaatgattttcactaatatattttttactgctatcatctaaatcagtgggccatggaagaaacctcatatatcattcagttcaatcccattgcttcagaatcagatcatagcatatctattctaagtagaggaatgcttttttccttttcttgaaagtttctctttcaaatagatttcaggcctctagagtctttcaaccctcacattcaggaataattttatgtaaattttcatgctttataatgttcttacttttttctattcaattttgtctatatattgatgattaagatgtattttatttatttttatccatagctttttccatataagtatgtatcttagggtcagaactgctgaaagagacaaactcagccaaaaacacttggaaagcatattttggtatctgcattgctttgcatatctaaattttcccataaagtaataaagtaaaatggttgcagagtgaacaaa

SEQ ID NO: 312149 - DNA, 2857 bp, Homo sapiens
  misc_feature (1)..(1): n is a, c, g, or t
  misc_feature (3)..(3): n is a, c, g, or t
  misc_feature (5)..(6): n is a, c, g, or t
  misc_feature (2725)..(2725): n is a, c, g, or t
  misc_feature (2727)..(2727): n is a, c, g, or t
  misc_feature (2734)..(2734): n is a, c, g, or t
  misc_feature (2744)..(2744): n is a, c, g, or t
  misc_feature (2752)..(2754): n is a, c, g, or t
  misc_feature (2766)..(2766): n is a, c, g, or t
  misc_feature (2768)..(2768): n is a, c, g, or t
  misc_feature (2776)..(2777): n is a, c, g, or t
  misc_feature (2779)..(2779): n is a, c, g, or t
  misc_feature (2791)..(2791): n is a, c, g, or t
ngncnngagctggttgccggggcaggggcggaggcggaggcagaggtggaggcgctttgaaagccgtcattgtgtggcactggacggggaatcaagagacccggtttctaatccctgctctgtcactaacaagctgcgtgatcttcggaaaaaagtaatcctcttggaaagctggaaacatagtccgaagcttaagtgaaaatgatacatgttagaagacatgaaacaaggagaaattctaagagtcacgtgcctgagcagaaatctcgagttgattggaggcgaactaaaagaagtagtatctcacaattacttgatagtgatgaagagcttgatagtgaagaatttgatagtgatgaagagcttgatagtgatgaaagttttgaaaatgatgaagagcttgatagtaacaagggacctgattgtaataaaacaccaggaagtgaaagagagctcaacttaagtaaaattcaaagtgaaggaaatgacagtaagtgtctcattaactctggcaacggttcaacatatgaagaagaaacgaacaaaatcaaacataggaatattgacttacaagatcaggaaaaacatttaagtcaagaggataatgatctcaacaaacaaactggacaaataatagaggatgatcaggaaaaacatttaagtcaagaggataatgatctcaacaaacaaactggacaaataatagaggatgatttagaagaagaagacatcaagcgaggaaaaagaaaaaggctatcctctgtgatgtgtgacagtgatgagagtgatgacagcgatatcctagttagaaaagtaggtgttaaacgtccccgtagagtggttgaagatgaaggttcttcagtggaaatggagcaaaagactcctgaaaaaacattagctgcacaaaagcgagaaaaacttcagaagctcaaagaactctcaaaacaaagatctcgtcagagacgcagtagtggtagagattttgaggactctgaaaaggaatcttgcccaagcagtgatgaagttgatgaggaggaagaagaggataattatgaatctgatgaagatggagatgattatattatcgatgactttgtagtgcaagatgaggagggtgatgaagagaataaaaaccaacaaggagaaaaattgactacatcacaactgaaattagtaaaacagaattctctttattcttttagtgaccactatactcattttgaaagagttgtgaaggctcttctgatcaacgctttagatgaatcttttctgggaacattatatgatggcacaaggcaaaaatcatatgcaaaagatatgctaacatctcttcattatttggataaccgctttgttcagcctcgtctagagagcttggtatctagaagtcgttggaaagagcaatataaggagcgagtagaaaattattctaatgtaagtattcatttgaagaatcctgaaaactgttcctgccaggcttgtggactgcatcgctactgtaaatattcagtgcatttatcaggagagttgtataacaccaggaccatgcaaatagataatttcatgtcacatgataaacaggtgttcactgttggcagaatttgtgccagccgtaccagaatttatcataaactgaaacattttaaattcaaactataccaggaatgttgcaccattgcaatgacagaagaagttgaagatgaacaagttaaagaaacagtggaaagaattttcaggcggtcaaaagaaaatggctggattaaggagaaatatggtcaacttgaagaatatctcaattttgcggattactttcaagaagagaagtttgagttgtaacacatttccatcagagaagattttttaaattcctgtaaatgtgaagatcatgattcttgtttttctgtatcatgtgacatgtttgtacattttatctatatcttcatggcaaaatattttgtttaaaacatgattatcttaattcctgtgaagtggcactctacactctaattaaacttttatctgatgtacataaaagcattatcttaatttttaagtctgtaaatatattttaaagttatataataatggctttataacagatgactgtcaagtgaatgagctgttgatatcctgtcagtttagtcaaaatatattgtatcttaaaaatgtatttagactaacgtctacatgtatttttacggaattcctgtccagatctgtttattcttttacagtattaaatgattttcactaatatattttttactgctatcatctaaatcagtgggccatggaagaaacctcatatatcattcagttcaatcccattgcttcagaatcagatcatagcatatctattctaagtagaggaatgcttttttccttttcttgaaagtttctctttcaaatagatttcaggcctctagagtctttcaaccctcacattcaggaataattttatgtaaattttcatgctttataatgttcttacttttttctattcaattttgtctatatattgatgattaagatgtattttatttatttttatccatagctttttccatataagtatgtatcttagggtcagaactgctgaaagagacaaactcagccaaaaacacttggaaagcatattttggtatctgcattgctttgcatatctaaattttcccataaagtaataaagtaaaatggttgcagagtgaacaaaaaaaaaaaaaananacaaaanaaaaactttntgggggcnnngggcccggaaanantttttaanncnctttgtttgggngcgggggccccatgtttgtaactcttggcaaaggggtccccaggagaacccgggcgaacaaggggg

SEQ ID NO: 312150 - DNA, 1442 bp, Homo sapiens
  misc_feature (1)..(1): n is a, c, g, or t
  misc_feature (3)..(3): n is a, c, g, or t
  misc_feature (5)..(6): n is a, c, g, or t
ngncnngagctggttgccggggcaggggcggaggcggaggcagaggtggaggcgctttgaaagccgtcattgtgtggcactggacggggaatcaagagacccggtttctaatccctgctctgtcactaacaagctgcgtgatcttcggaaaaaagtaatcctcttggaaagctggaaacatagtccgaagcttaagtgaaaatgatacatgttagaagacatgaaacaaggagaaattctaagagtcacgtgcctgagcagaaatctcgagttgattggaggcgaactaaaagaagtagtatctcacaattacttgatagtgatgaagagcttgatagtgaagaatttgatagtgatgaagagcttgatagtgatgaaagttttgaaaatgatgaagagcttgatagtaacaagggacctgattgtaataaaacaccaggaagtgaaagagagctcaacttaagtaaaattcaaagtgaaggaaatgacagtaagtgtctcattaactctggcaacggttcaacatatgaagaagaaacgaacaaaatcaaacataggaatattgacttacaagatcaggaaaaacatttaagtcaagaggataatgatctcaacaaacaaactggacaaataatagaggatgatcaggaaaaacatttaagtcaagaggataatgatctcaacaaacaaactggacaaataatagaggatgatttagaagaagaagacatcaagcgaggaaaaagaaaaaggctatcctctgtgatgtgtgacagtgatgagagtgatgacagcgatatcctagttagaaaagtaggtgttaaacgtccccgtagagtggttgaagatgaaggttcttcagtggaaatggagcaaaagactcctgaaaaaacattagctgcacaaaagcgagaaaaacttcagaagctcaaagaactctcaaaacaaagatctcgtcagagacgcagtagtggtagagattttgaggactctgaaaaggaatcttgcccaagcagtgatgaagttgatgaggaggaagaagaggataattatgaatctgatgaagatggagatgattatattatcgatgactttgtagtgcaagatgaggagggtgatgaagagaataaaaaccaacaaggagaaaaattgactacatcacaactgaaattagtaaaacagaattctctttgtaagttcaatattaagaaaatgtttcatgaattgttctcatgatattttatcaagtatcaaattagccttttaatatcatgttctaaatcattgactagaaactgtggtttcattttcagataaccttgtcagtttaatagtttattccagtggtctcaggaaccatttacatttttcaaaattattaaccccaacacgcctttacttcaatgagttatgcctgtcaatatttaccattgtagaaatca

SEQ ID NO: 312151 - DNA, 1285 bp, Homo sapiens
  misc_feature (1)..(1): n is a, c, g, or t
  misc_feature (3)..(3): n is a, c, g, or t
  misc_feature (5)..(6): n is a, c, g, or t
ngncnngagctggttgccggggcaggggcggaggcggaggcagaggtggaggcgctttgaaaggtgagagcgcgagggcggtgcggggctgtctcccggctgggactcgctcgcgctcccggtgctaatggtttatgagagggcgggggaagccgtgcctcctcgcggactaagagaaaaattcccgcgggcgctctttgggtgggccggagaacgcccctcagccctttgcgcctctaaccctcctcagctgagctgcagtgggcgcggtgcccgttatttccgccttggggaggtgcttggaactgatgtagggagctcggttggtgatttctcgggtttctggcctttccagacccttgtaattgttttctcggtgcagagctcttttggggtctgggggtttccgtcgtcctgcgcgcgtcatcgcgaagcttggcctgagggtccggtttcctagctactgtgcccctccctcctggaggcagagtgacggactagtgggctagcgggcgctgggttcctgcgtcccgccaaagagccgtcattgtgtggcactggacggggaatcaagagacccggtttctaatccctgctctgtcactaacaagctgcgtgatcttcggaaaaaagtaatcctcttggaaagctggaaacatagtccggtaagattcccattgctcaaaaaatttttggcattgaatttttgtaattaccttcagaattcgcagcacattttttgaagatttttaatggtagttaattctcatcttcttaagttggatttcatttctgcaagctgctaacaggtccttataaccgagacaagtgaatgaagtgggtgttaaagtcactgtttgggataatagaaagactccaggaatattctgtgctgtggtggaaatattggaataatcagcctcataaggtgatttctttggtggggatagctgtcagttcaatatatacctctaacatgtagtttgaggtcggtctcattacattgtcatatttctattccctaacaaccacagaactacatatgttattttttctagttatcttacgtgtcactaattgttcttttaatatatacttgtgataattttaatggaattcattcttttctaaatgataaactgacagcttttgttttccttcccaatactatgctctgctttgccgtggaacttacttgttttattcacttaactacattattggattgttagttaagttttctattggttatattgtgtatttaactttgaggggaaagccactc

SEQ ID NO: 312152 - DNA, 750 bp, Homo sapiens
  misc_feature (1)..(1): n is a, c, g, or t
  misc_feature (3)..(3): n is a, c, g, or t
  misc_feature (5)..(6): n is a, c, g, or t
ngncnngagctggttgccggggcaggggcggaggcggaggcagaggtggaggcgctttgaaaggtgagagcgcgagggcggtgcggggctgtctcccggctgggactcgctcgcgctcccggtgctaatggtttatgagagggcgggggaagccgtgcctcctcgcggactaagagaaaaattcccgcgggcgctctttgggtgggccggagaacgcccctcagccctttgcgcctctaaccctcctcagctgagctgcagtgggcgcggtgcccgttatttccgccttggggaggtgcttggaactgatgtagggagctcggttggtgatttctcgggtttctggcctttccagacccttgtaattgttttctcggtgcagagctcttttggggtctgggggtttccgtcgtcctgcgcgcgtcatcgcgaagcttggcctgagggtccggtttcctagctactgtgcccctccctcctggaggcagagtgacggactagtgggctagcgggcgctgggttcctgcgtcccgccaaagaggtttgtaatcatgaaagttcacccttccgggtgttaattcctgagaggatctactccactgtctaccactcattcctgctgcattaaccttcattgttaacggattttaatgaataatatagttatcccggataccatgctggcaggatccactttgcgaaattgtggactgttggactgtgattctaagtgggggaaataggctttag

SEQ ID NO: 312153 - DNA, 2705 bp, Homo sapiens
gaagcaggcgcaagttcgcagcgacgctttgagttgcccgttatgtgtcgtggatctgggcatgtgcaatccccgagagccgcgagctactaataccgcatgcatctgtaaactaactgatactgagtgatctttcggaaaataagtactcctcttggaaagctggaaacactagtccgaagcttaagtgaaaatgatacatgttagaagacatgaaacaaggagaaattctaagagtcacgtgcctgagcagaaatctcgagttgattggaggcgaactaaaagaagtagtatctcacaattacttgatagtgatgaagagcttgatagtgaagaatttgatagtgatgaagagcttgatagtgatgaaagttttgaaaatgatgaagagcttgatagtaacaagggacctgattgtaataaaacaccaggaagtgaaagagagctcaacttaagtaaaattcaaagtgaaggaaatgacagtaagtgtctcattaactctggcaacggttcaacatatgaagaagaaacgaacaaaatcaaacataggaatattgacttacaagatcaggaaaaacatttaagtcaagaggataatgatctcaacaaacaaactggacaaataatagaggatgatcaggaaaaacatttaagtcaagaggataatgatctcaacaaacaaactggacaaataatagaggatgatttagaagaagaagacatcaagcgaggaaaaagaaaaaggctatcctctgtgatgtgtgacagtgatgagagtgatgacagcgatatcctagttagaaaagtaggtgttaaacgtccccgtagagtggttgaagatgaaggttcttcagtggaaatggagcaaaagactcctgaaaaaacattagctgcacaaaagcgagaaaaacttcagaagctcaaagaactctcaaaacaaagatctcgtcagagacgcagtagtggtagagattttgaggactctgaaaaggaatcttgcccaagcagtgatgaagttgatgaggaggaagaagaggataattatgaatctgatgaagatggagatgattatattatcgatgactttgtagtgcaagatgaggagggtgatgaagagaataaaaaccaacaaggagaaaaattgactacatcacaactgaaattagtaaaacagaattctctttattcttttagtgaccactatactcattttgaaagagttgtgaaggctcttctgatcaacgctttagatgaatcttttctgggaacattatatgatggcacaaggcaaaaatcatatgcaaaagatatgctaacatctcttcattatttggataaccgctttgttcagcctcgtctagagagcttggtatctagaagtcgttggaaagagcaatataaggagcgagtagaaaattattctaatgtaagtattcatttgaagaatcctgaaaactgttcctgccaggcttgtggactgcatcgctactgtaaatattcagtgcatttatcaggagagttgtataacaccaggaccatgcaaatagataatttcatgtcacatgataaacaggtgttcactgttggcagaatttgtgccagccgtaccagaatttatcataaactgaaacattttaaattcaaactataccaggaatgttgcaccattgcaatgacagaagaagttgaagatgaacaagttaaagaaacagtggaaagaattttcaggcggtcaaaagaaaatggctggattaaggagaaatatggtcaacttgaagaatatctcaattttgcggattactttcaagaagagaagtttgagttgtaacacatttccatcagagaagattttttaaattcctgtaaatgtgaagatcatgattcttgtttttctgtatcatgtgacatgtttgtacattttatctatatcttcatggcaaaatattttgtttaaaacatgattatcttaattcctgtgaagtggcactctacactctaattaaacttttatctgatgtacataaaagcattatcttaatttttaagtctgtaaatatattttaaagttatataataatggctttataacagatgactgtcaagtgaatgagctgttgatatcctgtcagtttagtcaaaatatattgtatcttaaaaatgtatttagactaacgtctacatgtatttttacggaattcctgtccagatctgtttattcttttacagtattaaatgattttcactaatatattttttactgctatcatctaaatcagtgggccatggaagaaacctcatatatcattcagttcaatcccattgcttcagaatcagatcatagcatatctattctaagtagaggaatgcttttttccttttcttgaaagtttctctttcaaatagatttcaggcctctagagtctttcaaccctcacattcaggaataattttatgtaaattttcatgctttataatgttcttacttttttctattcaattttgtctatatattgatgattaagatgtattttatttatttttatccatagctttttccatataagtatgtatcttagggtcagaactgctgaaagagacaaactcagccaaaaacacttggaaagcatattttggtatctgcattgctttgcatatctaaattttcccataaagtaataaagtaaaatggttgcagagtgaacaaa

SEQ ID NO: 312154 - DNA, 2589 bp, Homo sapiens
  misc_feature (1)..(1): n is a, c, g, or t
  misc_feature (3)..(3): n is a, c, g, or t
  misc_feature (5)..(6): n is a, c, g, or t
ngncnngagctggttgccggggcaggggcggaggcggaggcagaggtggaggcgctttgaaagaagcttaagtgaaaatgatacatgttagaagacatgaaacaaggagaaattctaagagtcacgtgcctgagcagaaatctcgagttgattggaggcgaactaaaagaagtagtatctcacaattacttgatagtgatgaagagcttgatagtgaagaatttgatagtgatgaagagcttgatagtgatgaaagttttgaaaatgatgaagagcttgatagtaacaagggacctgattgtaataaaacaccaggaagtgaaagagagctcaacttaagtaaaattcaaagtgaaggaaatgacagtaagtgtctcattaactctggcaacggttcaacatatgaagaagaaacgaacaaaatcaaacataggaatattgacttacaagatcaggaaaaacatttaagtcaagaggataatgatctcaacaaacaaactggacaaataatagaggatgatcaggaaaaacatttaagtcaagaggataatgatctcaacaaacaaactggacaaataatagaggatgatttagaagaagaagacatcaagcgaggaaaaagaaaaaggctatcctctgtgatgtgtgacagtgatgagagtgatgacagcgatatcctagttagaaaagtaggtgttaaacgtccccgtagagtggttgaagatgaaggttcttcagtggaaatggagcaaaagactcctgaaaaaacattagctgcacaaaagcgagaaaaacttcagaagctcaaagaactctcaaaacaaagatctcgtcagagacgcagtagtggtagagattttgaggactctgaaaaggaatcttgcccaagcagtgatgaagttgatgaggaggaagaagaggataattatgaatctgatgaagatggagatgattatattatcgatgactttgtagtgcaagatgaggagggtgatgaagagaataaaaaccaacaaggagaaaaattgactacatcacaactgaaattagtaaaacagaattctctttattcttttagtgaccactatactcattttgaaagagttgtgaaggctcttctgatcaacgctttagatgaatcttttctgggaacattatatgatggcacaaggcaaaaatcatatgcaaaagatatgctaacatctcttcattatttggataaccgctttgttcagcctcgtctagagagcttggtatctagaagtcgttggaaagagcaatataaggagcgagtagaaaattattctaatgtaagtattcatttgaagaatcctgaaaactgttcctgccaggcttgtggactgcatcgctactgtaaatattcagtgcatttatcaggagagttgtataacaccaggaccatgcaaatagataatttcatgtcacatgataaacaggtgttcactgttggcagaatttgtgccagccgtaccagaatttatcataaactgaaacattttaaattcaaactataccaggaatgttgcaccattgcaatgacagaagaagttgaagatgaacaagttaaagaaacagtggaaagaattttcaggcggtcaaaagaaaatggctggattaaggagaaatatggtcaacttgaagaatatctcaattttgcggattactttcaagaagagaagtttgagttgtaacacatttccatcagagaagattttttaaattcctgtaaatgtgaagatcatgattcttgtttttctgtatcatgtgacatgtttgtacattttatctatatcttcatggcaaaatattttgtttaaaacatgattatcttaattcctgtgaagtggcactctacactctaattaaacttttatctgatgtacataaaagcattatcttaatttttaagtctgtaaatatattttaaagttatataataatggctttataacagatgactgtcaagtgaatgagctgttgatatcctgtcagtttagtcaaaatatattgtatcttaaaaatgtatttagactaacgtctacatgtatttttacggaattcctgtccagatctgtttattcttttacagtattaaatgattttcactaatatattttttactgctatcatctaaatcagtgggccatggaagaaacctcatatatcattcagttcaatcccattgcttcagaatcagatcatagcatatctattctaagtagaggaatgcttttttccttttcttgaaagtttctctttcaaatagatttcaggcctctagagtctttcaaccctcacattcaggaataattttatgtaaattttcatgctttataatgttcttacttttttctattcaattttgtctatatattgatgattaagatgtattttatttatttttatccatagctttttccatataagtatgtatcttagggtcagaactgctgaaagagacaaactcagccaaaaacacttggaaagcatattttggtatctgcattgctttgcatatctaaattttcccataaagtaataaagtaaaatggttgcagagtgaacaaa

SEQ ID NO: 312155 - DNA, 1584 bp, Homo sapiens
  misc_feature (1)..(1): n is a, c, g, or t
  misc_feature (3)..(3): n is a, c, g, or t
  misc_feature (5)..(6): n is a, c, g, or t
ngncnngagctggttgccggggcaggggcggaggcggaggcagaggtggaggcgctttgaaagattcttttagtgaccactatactcattttgaaagagttgtgaaggctcttctgatcaacgctttagatgaatcttttctgggaacattatatgatggcacaaggcaaaaatcatatgcaaaagatatgctaacatctcttcattatttggataaccgctttgttcagcctcgtctagagagcttggtatctagaagtcgttggaaagagcaatataaggagcgagtagaaaattattctaatgtaagtattcatttgaagaatcctgaaaactgttcctgccaggcttgtggactgcatcgctactgtaaatattcagtgcatttatcaggagagttgtataacaccaggaccatgcaaatagataatttcatgtcacatgataaacaggtgttcactgttggcagaatttgtgccagccgtaccagaatttatcataaactgaaacattttaaattcaaactataccaggaatgttgcaccattgcaatgacagaagaagttgaagatgaacaagttaaagaaacagtggaaagaattttcaggcggtcaaaagaaaatggctggattaaggagaaatatggtcaacttgaagaatatctcaattttgcggattactttcaagaagagaagtttgagttgtaacacatttccatcagagaagattttttaaattcctgtaaatgtgaagatcatgattcttgtttttctgtatcatgtgacatgtttgtacattttatctatatcttcatggcaaaatattttgtttaaaacatgattatcttaattcctgtgaagtggcactctacactctaattaaacttttatctgatgtacataaaagcattatcttaatttttaagtctgtaaatatattttaaagttatataataatggctttataacagatgactgtcaagtgaatgagctgttgatatcctgtcagtttagtcaaaatatattgtatcttaaaaatgtatttagactaacgtctacatgtatttttacggaattcctgtccagatctgtttattcttttacagtattaaatgattttcactaatatattttttactgctatcatctaaatcagtgggccatggaagaaacctcatatatcattcagttcaatcccattgcttcagaatcagatcatagcatatctattctaagtagaggaatgcttttttccttttcttgaaagtttctctttcaaatagatttcaggcctctagagtctttcaaccctcacattcaggaataattttatgtaaattttcatgctttataatgttcttacttttttctattcaattttgtctatatattgatgattaagatgtattttatttatttttatccatagctttttccatataagtatgtatcttagggtcagaactgctgaaagagacaaactcagccaaaaacacttggaaagcatattttggtatctgcattgctttgcatatctaaattttcccataaagtaataaagtaaaatggttgcagagtgaacaaa

SEQ ID NO: 312156 - DNA, 2659 bp, Homo sapiens
  misc_feature (1)..(1): n is a, c, g, or t
  misc_feature (3)..(3): n is a, c, g, or t
  misc_feature (5)..(6): n is a, c, g, or t
ngncnngagctggttgccggggcaggggcggaggcggaggcagaggtggaggcgctttgaaagccgtcattgtgtggcactggacggggaatcaagagacccggtttctaatccctgctctgtcactaacaagctgcgtgatcttcggaaaaaagtaatcctcttggaaagctggaaacatagtccgaagcttaagtgaaaatgatacatgttagaagacatgaaacaaggagaaattctaagagtcacgtgcctgagcagaaatctcgagttgattggaggcgaactaaaagaagtagtatctcacaattacttgatagtgatgaagagcttgatagtgaagaatttgatagtgatgaagagcttgatagtgatgaaagttttgaaaatgatgaagagcttgatagtaacaagggacctgattgtaataaaacaccaggaagtgaaagagagctcaacttaagtaaaattcaaagtgaaggaaatgacagtaagtgtctcattaactctggcaacggttcaacatatgaagaagaaacgaacaaaatcaaacataggaatattgacttacaagatcaggaaaaacatttaagtcaagaggataatgatctcaacaaacaaactggacaaataatagaggatgatcaggaaaaacatttaagtcaagaggataatgatctcaacaaacaaactggacaaataatagaggatgatttagaagaagaagacatcaagcgaggaaaaagaaaaaggctatcctctgtgatgtgtgacagtgatgagagtgatgacagcgatatcctagttagaaaagtaggtgttaaacgtccccgtagagtggttgaagatgaaggttcttcagtggaaatggagcaaaagactcctgaaaaaacattagctgcacaaaagcgagaaaaacttcagaagctcaaagaactctcaaaacaaagatctcgtcagagacgcagtagtggtagagattttgaggactctgaaaaggaatcttgcccaagcagtgatgaagttgatgaggaggaagaagaggataattatgaatctgatgaagatggagatgattatattatcgatgactttgtagtgcaagatgaggagggtgatgaagagaataaaaaccaacaaggagaaaaattgactacatcacaactgaaattagtaaaacagaattctctttattcttttagtgaccactatactcattttgaaagagttgtgaaggctcttctgatcaacgctttagatgaatcttttctgggaacattatatgatggcacaaggcaaaaatcatatgcaaaagatatgctaacatctcttcattatttggataaccgctttgttcagcctcgtctagagagcttggtatctagaagtcgttggaaagagcaatataaggagcgagtagaaaattattctaatgtaagtattcatttgaagaatcctgaaaactgttcctgccaggcttgtggactgcatcgctactgtaaatattcagtgcatttatcaggagagttgtataacaccaggaccatgcaaatagataatttcatgtcacatgataaacaggtgttcactgttggcagaatttgtgccagccgtaccagaatttatcataaactgaaacattttaaattcaaactataccaggaatgttgcaccattgcaatgacagaagaagttgaagatgaacaagttaaagaaacagtggaaagaattttcaggcggtcaaaagcggattactttcaagaagagaagtttgagttgtaacacatttccatcagagaagattttttaaattcctgtaaatgtgaagatcatgattcttgtttttctgtatcatgtgacatgtttgtacattttatctatatcttcatggcaaaatattttgtttaaaacatgattatcttaattcctgtgaagtggcactctacactctaattaaacttttatctgatgtacataaaagcattatcttaatttttaagtctgtaaatatattttaaagttatataataatggctttataacagatgactgtcaagtgaatgagctgttgatatcctgtcagtttagtcaaaatatattgtatcttaaaaatgtatttagactaacgtctacatgtatttttacggaattcctgtccagatctgtttattcttttacagtattaaatgattttcactaatatattttttactgctatcatctaaatcagtgggccatggaagaaacctcatatatcattcagttcaatcccattgcttcagaatcagatcatagcatatctattctaagtagaggaatgcttttttccttttcttgaaagtttctctttcaaatagatttcaggcctctagagtctttcaaccctcacattcaggaataattttatgtaaattttcatgctttataatgttcttacttttttctattcaattttgtctatatattgatgattaagatgtattttatttatttttatccatagctttttccatataagtatgtatcttagggtcagaactgctgaaagagacaaactcagccaaaaacacttggaaagcatattttggtatctgcattgctttgcatatctaaattttcccataaagtaataaagtaaaatggttgcagagtgaacaaa

SEQ ID NO: 312157 - DNA, 300 bp, Homo sapiens
gcacagggaacatgactatgagtatccaactagccctgccttccaagtgttcattggctagaactgaatgcaagcagatgatgtaaggttacgttaaatagaaaagcagaaactatgaagtctgagagacacctaataagggacacacagtttcacatctgctttgttgcttagcgaccaagttcagcttcagaagatggataccacagaatacgacaattccaaaaagacctacctttgtggaatgattcaagcttcagaatttttcacgttttattatgactactgaggctttttatc

SEQ ID NO: 312158 - DNA, 3132 bp, Homo sapiens
gcggccgcggctcccgagctcctcgggctctgggtcccggcgcccctccggccgcgagtcccacgcgccacccccgggcgccctcgacggtggatctagcggcggcgaggaggcgggtcccggccccggcgaaccccagtcccggcccccggccccgggcccagcttcggcatggatgtgaggttctaccccgcggcggccggggaccctgccagcctggacttcgcgcagtgcctggggtactacggctacagcaagtttggaaataataataactatatgaatatggctgaggcgaacaatgcgttcttcgctgccagtgagcagacattccacacaccaagccttggggacgaggaattcgaaattccaccaatcacgcctcctccagagtcagaccctgccctaggcatgccggatgtactgctaccctttcaagccctcagcgatccattgccttcccagggaagtgaattcacaccccagtttccccctcaaagcctggacctcccttccattacaatctcaagaaatctcgtggaacaagatggcgtgcttcatagcagtgggttgcatatggatcagagccacacacaagtgtcccagtaccggcaggatccctccctgatcatgcggtccatcgtccacatgaccgatgctgcgcgttctggggtcatgcctcctgcccagctcaccaccatcaaccagtctcagctcagcgcccagttggggttgaatttgggaggtgccagtatgcctcacacatctccttcacctccagcaagcaaatcagccactccctccccttccagctccatcaatgaagaggatgctgatgaagccaacagagccattggagagaaaagagctgctccagactctggcaagaagcccaagactccaaagaaaaagaaaaagaaagatcccaatgagccacagaagccagtgtcagcatatgccctgtttttcagagacacacaggctgcaattaaaggtcaaaaccccaatgcaacctttggagaggtctcaaaaattgtagcatctatgtgggacagccttggagaagaacaaaagcaggtatataaaaggaaaacagaagctgccaaaaaagaatacctgaaggccctggcggcatacagggccagcctcgtttctaaggctgctgctgagtcagcagaagcccagaccatccgttctgttcagcagaccctggcgtcgaccaatctaacatcctctctccttctcaacactccactgtctcaacatggaacagtgtcagcatcacctcagactctccagcaatccctccctaggtcaatcgctcccaaacccttaaccatgagactccccatgaaccagattgtcacatcagtcaccattgcagccaacatgccctcgaacattggggctccactgataagctccatgggaacgaccatggttggctcagcaccctccacccaagtgagtccttcggtgcaaacccagcagcatcagatgcaattgcagcagcagcagcagcagcaacaacaacagatgcaacagatgcagcagcagcaactccagcagcaccaaatgcatcagcaaatccagcagcagatgcagcagcagcatttccagcaccacatgcagcagcacctgcagcagcagcagcagcatctccagcagcaaattaatcaacagcagctgcagcagcagctgcagcagcgcctccagctgcagcagctgcaacacatgcagcaccagtctcagccttctcctcggcagcactcccccgtcgcctctcagataacatcccccatccctgccatcgggagcccccagccagcctctcagcagcaccagtcgcaaatacagtctcagacacagactcaagtattatcgcaggtcagtattttctgaagacgcatatggcagacggatttgcgtataccaaggagagtggcataggagggaaaagcatatgtggctgaaacctgtaagttggtgttggttatgcagaaatgtgtaacagatcaaacggtcctctcaagtgtctattagataggcaataagaactgcagtgtagctgagtaacatcttttagctgactataaatcactttgtttttaaacaagaaaagctgtgctcttttatgtgatgccttttttatttattcaggctatacctacaatatgtgaatcaaactgtttaatgaatcctgggacatactgatgactataaactggcctctctgagtcatagaaaaatggccttatttctccagaagtgagtaaaccacacttccaggctatctgaactcctgaagccctaaaaataaaaagcacagttgtaactacctgaaatatgaagatccagtttcatacaaacatttgtatgacgtgaatagttgatggcatttttttgtcatgaaaaaaataatgtaaatcacagacttttgccaaagctcttattttttttcctaaatctctccagaaaaaaaatgcaagtgactaaattcaattattgactaatttccactttttatccatgacttctccaaatcaaaccacagtatatgttgtaacaatatctatgaccactgttagcccattatattcattccaattagaagaaaagaaatgtgaatactatattccgtgttttgagtgacaagtttcgaaaaataaaaacactgtatttttaaaagggaaatgcacttaaatgaaaacagttattacaaaagttaagatttaaaaagaaaaagcaagagtttttattatgatgtaataccagtagaatatttaaaaggcacaccacatctgaataatcaatgtaaatattttctttcaaagttgtaagttttcatatcatgtgctgtaaagttttcctaaatgaggctttaacgtaaacactggtgacataaaccattcattgctacgttgcttattgtgtttttatgctgttttatacttttttatgagttatgatagcagcaattaagttgtttgtattttgcttaactaaaacaaaaatgcttttatcttgctatagaataaacacatttcagtaaaaactgtggactgtattttgatgcaacaacaaagaaactgttcacttttcaaataaaatgatatgtcagatttcattttt

SEQ ID NO: 312159 - DNA, 3050 bp, Homo sapiens
gcggccgcggctcccgagctcctcgggctctgggtcccggcgcccctccggccgcgagtcccacgcgccacccccgggcgccctcgacggtggatctagcggcggcgaggaggcgggtcccggccccggcgaaccccagtcccggcccccggccccgggcccagcttcggcatggatgtgaggttctaccccgcggcggccggggaccctgccagcctggacttcgcgcagtgcctggggtactacggctacagcaagtttggaaataataataactatatgaatatggctgaggcgaacaatgcgttcttcgctgccagtgagcagacattccacacaccaagccttggggacgaggaattcgaaattccaccaatcacgcctcctccagagtcagaccctgccctaggcatgccggatgtactgctaccctttcaagccctcagcgatccattgccttcccagggaagtgaattcacaccccagtttccccctcaaagcctggacctcccttccattacaatctcaagaaatctcgtggaacaagatggcgtgcttcatagcagtgggttgcatatggatcagagccacacacaagtgtcccagtaccggcaggatccctccctgatcatgcggtccatcgtccacatgaccgatgctgcgcgttctggggtcatgcctcctgcccagctcaccaccatcaaccagtctcagctcagcgcccagttggggttgaatttgggaggtgccagtatgcctcacacatctccttcacctccagcaagcaaatcagccactccctccccttccagctccatcaatgaagaggatgctgatgaagccaacagagccattggagagaaaagagctgctccagactctggcaagaagcccaagactccaaagaaaaagaaaaagaaagatcccaatgagccacagaagccagtgtcagcatatgccctgtttttcagagacacacaggctgcaattaaaggtcaaaaccccaatgcaacctttggagaggtctcaaaaattgtagcatctatgtgggacagccttggagaagaacaaaagcaggtatataaaaggaaaacagaagctgccaaaaaagaatacctgaaggccctggcggcatacagggccagcctcgtttctaaggctgctgctgagtcagcagaagcccagaccatccgttctgttcagcagaccctggcgtcgaccaatctaacatcctctctccttctcaacactccactgtctcaacatggaacagtgtcagcatcacctcagactctccagcaatccctccctaggtcaatcgctcccaaacccttaaccatgagactccccatgaaccagattgtcacatcagtcaccattgcagccaacatgccctcgaacattggggctccactgataagctccatgggaacgaccatggttggctcagcaccctccacccaagtgagtccttcggtgcaaacccagcagcatcagatgcaattgcagcagcagcagcagcagcaacaacaacagatgcaacagatgcagcagcagcaactccagcagcaccaaatgcatcagcaaatccagcagcagatgcagcagcagcatttccagcaccacatgcagcagcacctgcagcagcagcagcagcatctccagcagcaaattaatcaacagcagctgcagcagcagctgcagcagcgcctccagctgcagcagctgcaacacatgcagcaccagtctcagccttctcctcggcagcactcccccgtcgcctctcagataacatcccccatccctgccatcgggagcccccagccagcctctcagcagcaccagtcgcaaatacagtctcagacacagactcaagtattatcgcaggtcagtattttctgaagacgcatatggcagacggatttgcgtataccaaggagagtggcataggagggaaaagcatatgtggctgaaacctgtaagttggtgttggttatgcagaaatgtgtaacagatcaaacggtcctctcaagtgtctattagataggcaataagaactgcagtgtagctgagtaacatcttttagctgactataaatcactttgtttttaaacaagaaaagctgtgctcttttatgtgatgccttttttatttattcaggctatacctacaatatgtgaatcaaactgtttaatgaatcctgggacatactgatgactataaactggcctctctgagtcatagaaaaatggccttatttctccagaagtgagtaaaccacacttccaggctatctgaactcctgaagccctaaaaataaaaagcacagttgtaactacctgaaatatgaagatccagtttcatacaaacatttgtatgacgtgaatagttgatggcatttttttgtcatgaaaaaaataatgtaaatcacagacttttgccaaagctcttattttttttcctaaatctctccagaaaaaaaatgcaagtgactaaattcaattattgactaatttccactttttatccatgacttctccaaatcaaaccacagtatatgttgtaacaatatctatgaccactgttagcccattatattcattccaattagaagaaaagaaatgtgaatactatattccgtgttttgagtgacaagtttcgaaaaataaaaacactgtatttttaaaagggaaatgcacttaaatgaaaacagttattacaaaagttaagatttaaaaagaaaaagcaagagtttttattatgatgtaataccagtagaatatttaaaaggcacaccacatctgaataatcaatgtaaatattttctttcaaagttgtaagttttcatatcatgtgctgtaaagttttcctaaatgaggctttaacgtaaacactggtgacataaaccattcattgctacgttgcttattgtgtttttatgctgttttatacttttttatgagttatgatagcagcaattaagttgtttgtattttgcttaactaaaacaaaaatgcttttatcttgctatagaataaacacatttcagt

SEQ ID NO: 312160 - DNA, 534 bp, Homo sapiens
ccccgggtgcgggattcggccggggtttcatttataacaaaagttaaggattaagtgcatttcccttttaaaaatactgtatttttaaaagggaaatgcacttaaatgaaaacagttattacaaaagttaagatttaaaaagaaaaagcaagagtttttattatgatgtaataccagtagaatatttaaaaggcacaccacatctgaataatcaatgtaaatattttctttcaaagttgtaagttttcatatcatgtgctgtaaagttttcctaaatgaggctttaacgtaaacactggtgacataaaccattcattgctacgttgcttattgtgtttttatgctgttttatacttttttatgagttatgatagcagcaattaagttgtttgtattttgcttaactaaaacaaaaatgcttttatcttgctatagaataaacacatttcagtaaaaactgtggactgtattttgatgcaacaacaaagaaactgttcacttttcaaataaaatgatatgtcagatttcattttt

SEQ ID NO: 312161 - DNA, 3242 bp, Homo sapiens
gcggccgcggctcccgagctcctcgggctctgggtcccggcgcccctccggccgcgagtcccacgcgccacccccgggcgccctcgacggtggatctagcggcggcgaggaggcgggtcccggccccggcgaaccccagtcccggcccccggccccgggcccagcttcggcatggatgtgaggttctaccccgcggcggccggggaccctgccagcctggacttcgcgcagtgcctggggtactacggctacagcaagcattttgcctgcaggctagaatctgtgttgttcattgcagtttgtgctcagccacggaaggcacctatccctagcacccaacccccatccacctagggctctataaaaagtttggaaataataataactatatgaatatggctgaggcgaacaatgcgttcttcgctgccagtgagcagacattccacacaccaagccttggggacgaggaattcgaaattccaccaatcacgcctcctccagagtcagaccctgccctaggcatgccggatgtactgctaccctttcaagccctcagcgatccattgccttcccagggaagtgaattcacaccccagtttccccctcaaagcctggacctcccttccattacaatctcaagaaatctcgtggaacaagatggcgtgcttcatagcagtgggttgcatatggatcagagccacacacaagtgtcccagtaccggcaggatccctccctgatcatgcggtccatcgtccacatgaccgatgctgcgcgttctggggtcatgcctcctgcccagctcaccaccatcaaccagtctcagctcagcgcccagttggggttgaatttgggaggtgccagtatgcctcacacatctccttcacctccagcaagcaaatcagccactccctccccttccagctccatcaatgaagaggatgctgatgaagccaacagagccattggagagaaaagagctgctccagactctggcaagaagcccaagactccaaagaaaaagaaaaagaaagatcccaatgagccacagaagccagtgtcagcatatgccctgtttttcagagacacacaggctgcaattaaaggtcaaaaccccaatgcaacctttggagaggtctcaaaaattgtagcatctatgtgggacagccttggagaagaacaaaagcaggtatataaaaggaaaacagaagctgccaaaaaagaatacctgaaggccctggcggcatacagggccagcctcgtttctaaggctgctgctgagtcagcagaagcccagaccatccgttctgttcagcagaccctggcgtcgaccaatctaacatcctctctccttctcaacactccactgtctcaacatggaacagtgtcagcatcacctcagactctccagcaatccctccctaggtcaatcgctcccaaacccttaaccatgagactccccatgaaccagattgtcacatcagtcaccattgcagccaacatgccctcgaacattggggctccactgataagctccatgggaacgaccatggttggctcagcaccctccacccaagtgagtccttcggtgcaaacccagcagcatcagatgcaattgcagcagcagcagcagcagcaacaacaacagatgcaacagatgcagcagcagcaactccagcagcaccaaatgcatcagcaaatccagcagcagatgcagcagcagcatttccagcaccacatgcagcagcacctgcagcagcagcagcagcatctccagcagcaaattaatcaacagcagctgcagcagcagctgcagcagcgcctccagctgcagcagctgcaacacatgcagcaccagtctcagccttctcctcggcagcactcccccgtcgcctctcagataacatcccccatccctgccatcgggagcccccagccagcctctcagcagcaccagtcgcaaatacagtctcagacacagactcaagtattatcgcaggtcagtattttctgaagacgcatatggcagacggatttgcgtataccaaggagagtggcataggagggaaaagcatatgtggctgaaacctgtaagttggtgttggttatgcagaaatgtgtaacagatcaaacggtcctctcaagtgtctattagataggcaataagaactgcagtgtagctgagtaacatcttttagctgactataaatcactttgtttttaaacaagaaaagctgtgctcttttatgtgatgccttttttatttattcaggctatacctacaatatgtgaatcaaactgtttaatgaatcctgggacatactgatgactataaactggcctctctgagtcatagaaaaatggccttatttctccagaagtgagtaaaccacacttccaggctatctgaactcctgaagccctaaaaataaaaagcacagttgtaactacctgaaatatgaagatccagtttcatacaaacatttgtatgacgtgaatagttgatggcatttttttgtcatgaaaaaaataatgtaaatcacagacttttgccaaagctcttattttttttcctaaatctctccagaaaaaaaatgcaagtgactaaattcaattattgactaatttccactttttatccatgacttctccaaatcaaaccacagtatatgttgtaacaatatctatgaccactgttagcccattatattcattccaattagaagaaaagaaatgtgaatactatattccgtgttttgagtgacaagtttcgaaaaataaaaacactgtatttttaaaagggaaatgcacttaaatgaaaacagttattacaaaagttaagatttaaaaagaaaaagcaagagtttttattatgatgtaataccagtagaatatttaaaaggcacaccacatctgaataatcaatgtaaatattttctttcaaagttgtaagttttcatatcatgtgctgtaaagttttcctaaatgaggctttaacgtaaacactggtgacataaaccattcattgctacgttgcttattgtgtttttatgctgttttatacttttttatgagttatgatagcagcaattaagttgtttgtattttgcttaactaaaacaaaaatgcttttatcttgctatagaataaacacatttcagtaaaaactgtggactgtattttgatgcaacaacaaagaaactgttcacttttcaaataaaatgatatgtcagatttcattttt

SEQ ID NO: 312162 - DNA, 3071 bp, Homo sapiens
gcggccgcggctcccgagctcctcgggctctgggtcccggcgcccctccggccgcgagtcccacgcgccacccccgggcgccctcgacggtggatctagcggcggcgaggaggcgggtcccggccccggcgaaccccagtcccggcccccggccccgggcccagcttcggcatggatgtgaggttctaccccgcggcggccggggaccctgccagcctggacttcgcgcagtgcctggggtactacggctacagcaagtttggaaataataataactatatgaatatggctgaggcgaacaatgcgttcttcgctgccagtgagcagacattccacacaccaagccttggggacgaggaattcgaaattccaccaatcacgcctcctccagagtcagaccctgccctaggcatgccggatgtactgctaccctttcaagccctcagcgatccattgccttcccagggaagtgaattcacaccccagtttccccctcaaagcctggacctcccttccattacaatctcaagaaatctcgtggaacaagatggcgtgcttcatagcagtgggttgcatatggatcagagccacacacaagtgtcccagtaccggcaggatccctccctgatcatgcggtccatcgtccacatgaccgatgctgcgcgttctggggtcatgcctcctgcccagctcaccaccatcaaccagtctcagctcagcgcccagttggggttgaatttgggaggtgccagtatgcctcacacatctccttcacctccagcaagcaaatcagccactccctccccttccagctccatcaatgaagaggatgctgatgaagccaacagagccattggagagaaaagagctgctccagactctggcaagaagcccaagactccaaagaaaaagaaaaagaaagatcccaatgagccacagaagccagtgtcagcatatgccctgtttttcagagacacacaggctgcaattaaaggtcaaaaccccaatgcaacctttggagaggtctcaaaaattgtagcatctatgtgggacagccttggagaagaacaaaagcaggtatataaaaggaaaacagaagctgccaaaaaagaatacctgaaggccctggcggcatacagggccagcctcgtttctaaggctgctgctgagtcagcagaagcccagaccatccgttctgttcagcagaccctggcgtcgaccaatctaacatcctctctccttctcaacactccactgtctcaacatggaacagtgtcagcatcacctcagactctccagcaatccctccctaggtcaatcgctcccaaacccttaaccatgagactccccatgaaccagattgtcacatcagtcaccattgcagccaacatgccctcgaacattggggctccactgataagctccatgggaacgaccatggttggctcagcaccctccacccaagtgagtccttcggtgcaaacccagcagcatcagatgcaattgcagcagcagcagcagcagcaacaacaacagatgcaacagatgcagcagcagcaactccagcagcaccaaatgcatcagcaaatccagcagcagatgcagcagcagcatttccagcaccacatgcagcagcacctgcagcagcagcagcagcatctccagcagcaaattaatcaacagcagctgcagcagcagctgcagcagcgcctccagctgcagcagctgcaacacatgcagcaccagtctcagccttctcctcggcagcactcccccgtcgcctctcagataacatcccccatccctgccatcgggagcccccagccagcctctcagcagcaccagtcgcaaatacagtctcagacacagactcaagtattatcgcaggtcagtattttctgaagacgcatatggcagacggatttgcgtataccaaggagagtggcataggagggaaaagcatatgtggctgaaacctgtaagttggtgttggttatgcagaaatgtgtaacagatcaaacggtcctctcaagtgtctattagataggcaataagaactgcagtgtagctgagtaacatcttttagctgactataaatcactttgtttttaaacaagaaaagctgtgctcttttatgtgatgccttttttatttattcaggctatacctacaatatgtgaatcaaactgtttaatgaatcctgggacatactgatgactataaactggcctctctgagtcatagaaaaatggccttatttctccagaagtgagtaaaccacacttccaggctatctgaactcctgaagccctaaaaataaaaagcacagttgtaactacctgaaatatgaagatccagtttcatacaaacatttgtatgacgtgaatagttgatggcatttttttgtcatgaaaaaaataatgtaaatcacagacttttgccaaagctcttattttttttcctaaatctctccagaaaaaaaatgcaagtgactaaattcaattattgactaatttccactttttatccatgacttctccaaatcaaaccacagtatatgttgtaacaatatctatgaccactgttagcccattatattcattccaattagaagaaaagaaatgtgaatactatattccgtgttttgagtgacaagtttcgaaaaataaaaacactgtatttttaaaagggaaatgcacttaaatgaaaacagttattacaaaagttaagatttaaaaagaaaaagcaagagtttttattatgatgtaataccagtagaatatttaaaaggcacaccacatctgaataatcaatgtaaatattttctttcaaagttgtaagttttcatatcatgtgctgtaaagttttcctaaatgaggctttaacgtaaacactggtgacataaaccattcattgctacgttgcttattgtgtttttatgctgttttatacttttttatgagttatgatagcagcaattaagttgtttgtatttttttactgaaatgtgtttattctatagcaagataaaagcatttttgttttagttaagcaaaatacaaacgtcgacg

SEQ ID NO: 312163 - DNA, 343 bp, Homo sapiens
caacgcagtgagctcatcaatatgccagcagatgatctaagccccaaatcatcaccttctcgggaaagacagacaaacaaaaacagccggaaggagggcgggcaggcgggctgggaggggctgtcggcggcgaggcggagaagcgcggccggccggggctgcggggggctgcaaggagggcgtgtgcgctggcgctcgggctcgggcagcggcttcgtttcagccgcgggcgctggggccggcgttgccttggcgaccgcgtcgcgctcgaagccgcagcctccgcccccgccgccgccgccagagcccacccggcgggtgcagattccctttgtctcctccg

SEQ ID NO: 312164 - DNA, 424 bp, Homo sapiens
gtctagtgtgtgcttcttagtactgaacttgatataacttccaaaagcgctcactcaagtagtagtacatattattctaagtgagcgcttttggaagttatatcaagttctagtgtttgcttcttagtaactgaactgaatttacagttctgtcctagacattttgcactaaagtagccgaatccactctcatgtcttttcgttaatgtgctctgtaccactggtgagtgctccatagtttccttacctgctgctacagaatgttattttacatccctatggctattgccaaggctacaaaaaaggaaagctatatttgtatgcaacactaaccttttgactgctaatgtatgtttctgcttgctgtgccttgttatggctgctttttttgtgctaataaagtatgtttggtgttctccttgta

SEQ ID NO: 312165 - DNA, 5485 bp, Homo sapiens
ggcagccgcgcagagcgcgcacccaagcggccggacctccccgactcccgggccgcccccgtctcgcgccctgcctccctccttcggccttcacctacccgcctccggattggccgctaggaatcccgcccctctaaagccctgcctgctattggtcacgattttataatcaatggataaagtgggaaaaatgtggaataacttcaaatacaggtgtcagaatctcttcggtcatgagggaggaagccgtagtgaaaatgtggacatgaactccaacagatgtttgtctgtcaaagagaaaaacatcagcataggagactcaactcctcagcaacaaagcagtcccttaagagaaaatattgccttacaactgggattaagcccttcgaagaattcttcaaggagaaatcaaaattgtgccacagaaatccctcaaattgttgaaataagcatcgaaaaggataatgattcttgtgttaccccaggaacaagacttgcacgaagagattcctactctcgacatgctccatggggtgggaagaaaaaacattcctgttctacaaagacccagagttcattggatgctgataaaaagtttggtagaactcgaagtggacttcaaaggagagagaggcgctacggcgtaagttctgtacacgacatggacagtgtttccagcagaactgtaggaagtcgctctctaagacagaggttgcaggatactgtgggcttgtgttttcccatgagaacttacagcaagcagtcaaagcctctcttttccaataaaagaaaaatccatctctctgaattaatgcttgagaaatgcccttttcctgctggctcagatttagcccaaaaatggcatttgattaaacagcatacagctcctgtgagcccacattcaacattttttgatacatttgatccatctttggtttctacagaagatgaagaagataggcttagagagagaaggcggcttagtattgaagaaggggttgatccccctcccaatgcacaaatacatacatttgaagctactgcacaggttaatccattatataaactgggaccaaaattagctcctggaatgactgaaataagtggggacagttctgcaattccacaagctaattgtgactcggaagaggatacaaccaccctgtgtttgcagtcacggaggcagaagcagcgtcagatatctggagacagccatacccatgttagcagacagggagcttggaaagtccacacacagattgattacatacactgcctcgtgcctgatttgcttcaaattacagggaatccctgttactggggagtgatggaccgttatgaagcagaagcccttctcgaagggaaacctgaaggcacgtttttgctcagggactctgcgcaagaggactacctcttctctgtgagcttccgccgctacaacagatccctgcatgcccgaattgagcagtggaatcacaactttagtttcgacgcccatgacccgtgtgtatttcactcctccactgtaacgggacttttagaacattataaagatcccagttcgtgcatgttttttgaaccattgcttactatatcactaaataggactttcccttttagcctgcagtatatctgtcgcgcggtaatctgcaggtgcactacgtatgatggaattgatgggctccctctaccctcaatgttacaggattttttaaaagagtatcattataaacaaaaagttagagttcgctggttggaacgagaaccagtcaaggcaaagtaaactctccggtccccaaagggtgttaactaggtccgctttcatgtgcatcagacagtacacctatagcaagcacacgtagcagtgttaggctttttcatacagtatgtaagcttagtgttagtatctgtcagatgctacctgctgttacttattcagataaacatggtgcctattggaacaatagcggatagagctacaggtgttcagtaagactacaaaaacattttgcctatttcgctaacagtttggtttttaatggctgtggtatttgagtgaggcaactctggggcatttgttatgaagaattctatttcttactgaagaacaaattattaatattggatgagtatttcaacagtgtgactaatgtttgaaattattttttctaagagtttttctataaccttccaaaagtcgtgatgtttgtagttactataaatcaagctttggaagtccaaaaagaataaaagactgccttccttttagaaaaaaatgcaattttctggccacaagggcatagtgcagttcacttacgtgttgatgtagtttataatcagacgccttttctcttctgcaaaaggtactgttaagtaaaccagattttctaaataggcattcttaaaatttcagacttacaaagctagtagtagaattttattgaaaggcctaggtattaattttttaaatgagtgctttaacttaaaacaggcgtttggaatagctgctgcaatgtagtcttgtgtgtgatttttttttaagttgatgtgcagtctaattgttgtttcataaaagttggatctgttcctatgcccaggatgattttgtgaaccgtgaagtacgtgagactagaagacgcccaaacaagtcagataatagtaactacaatggttgctgatgttgagattattgttgaactataattaataatttggatggcagaatttatctcttttttgtaaactctcataactgaattgcttaagtataatttatagaatttcagtgcagttcattcttaatggaaaatctgaaacctaaattgcagatttaaaaggtactgtacaaccattatatctgtaaataacttagcacctttttgtcacttagaataatatgtactactacttgagtgagcgcttttggaagttatatcaagttctagtgtttgcttcttagtaactgaactgaatttacagttctgtcctagacattttgcactaaagtagccgaatccactctcatgtcttttcgttaatgtgctctgtaccactggtgagtgctccatagtttccttacctgctgctacagaatgttattttacatccctatggctattgccaaggctacaaaaaaggaaagctatatttgtatgcaacactaaccttttgactgctaatgtatgtttctgcttgctgtgccttgttatggctgctttttttgtgctaataaagtatgtttggtgttctccttgtatatctgctgttttatacatttgcaacaatttctcttgtaaatggaatggtttggggtttttaaataagcattaactaacaacctttctatagttaatgcagagttaatgaacagtctaatattgacttatcagaataagctaactctaaatttaatgctctacatcttatcagtcataattatatatactgtggaacagtatctgtagttactgcaaattactgtacagtttaggttataacagaaaactgacagagaagtaataaacctattgatttctctgcttataaatgaaagattgaaactatccaatgacatattatagtaaatgagtatctgtaacctcccactgcatcagaagcaggttaaatgaagtcttgtgaatttgtaatagatcagtaccatttattggtttggggaccatcttaattaaaaataaatgcccaaaatgtagaactttaaccaaagacttgtcccttttaaagcaaaatggggattgaagggacttataatttctgttgtttctaattaaagtccctgaagatcatataccaaagtgtttgagaacttcatccaaacctactttaaagcattatgtgcaattaagttgttatgacataattatattgcctaattgttgggtcttttttcttgagcttataatgtacctggaaaataaacctcttgagaaaaagaaaagttcatactgattattggaaaaggactatatatgtgagcaagattgtgttttagagaggaaacttgaaactccaagaaagcacttgatgtttttatatgcttgtagcaaattgatgttctaactgtagttttatagaaagtattaatgcttttatgtatttcaaaactttcatatgttaaatggaaattgttttaaatgtgtttgagtttatgtaagcatgtatacactgtgctaaaagtcacatgtttcagtttgtgtataatattaatatgcaatttttggtttaaatttttgtcttaaaatattagtggcttacattttaaaaaagaaaaatcaccagcatgaacttgcacctaagtctatattcactgtgtccttttctgaatcccattgtagcctgtcaactaaatttgagtgttaacggtctttttaaagtgcatttaaatacaaaccaggaatttctttagaagttgagatacatctttatagttgaaataattaacccaagaaaaggttgctttgatttgtacccattctcattcattttcttcattcccttacacacacacacacacctctcccttccgcatacatataagtgtgtattatatatttatgtatgcacatatatacatttatgttgttaatattactttagatggcatttccacctgatacaaaaacatttagagatcttattctatagatattacctaaagagtattcttgtactattcgaattttattatctgcactaaaagtttagccttgctactttagccttgtttataatacagtcaccttacaaagagaaagagttcatctgtattttgttttctggctaaacacagtacaaaatatttgaagaaaaacagcttggattaaatagttactaagagttataattaaatttatgtttcttagacaaaaaaaaaaaaaaaaaaaaaaaaaaaaaaaaaaaaaaaaaaaaaaaaaaagaaaaaaaaaaaaaaaaaagaacaacaaagaatacaaagaacaaacaaaagcagtacaaactacaggcaaagcagaagaaagagacagccacacgaacgaaacccgcaaacagagacagcagaagaggaaaaacaaaacaagaaacgaacgagaagagacgaacacgagcaagataaaaaaaaagccaaagcgacctacgaagaaccaagaacagaaagagaaagaaaccagatagaaaacaagaacgacgcgagaggagacaaagaaaggataaaagagcaaggagacagaaatgagagagcagccaagcacgcaacgcgcagcgcacaggctccatagacaagaacaaaaagacagaaacggaagaaacgaacagaacaagaaccaacaccgaggaagacaaaaacgagacagaacaggaaggacaagaacgaacgacagagaaaaggaaaaacgaaagaacgaaaagagcacaacgaaagaaaagcaggaacaagaacgacacaagaaaacacaccagaacaaacaaacagaaaagaaggcaaaacaaa

SEQ ID NO: 312166 - DNA, 3348 bp, Homo sapiens
tggtgggggttggggggaggggggaggggaaacgggtgaagaaggggaggcggcggcctggcgggggcatccggcggagctggggtccccgggctccgtccggaggaagcgacgctgcgctcgctgggcagtcggaggggacgggacgcaccggagggcaggcggactcgccctgtcggtgactgcgccgtccgggcccgtcctgcctggccgcaggtgccctggatgaggccgccccgcgcgccccaaacgattttataatcaatggataaagtgggaaaaatgtggaataacttcaaatacaggtgtcagaatctcttcggtcatgagggaggaagccgtagtgaaaatgtggacatgaactccaacagatgtttgtctgtcaaagagaaaaacatcagcataggagactcaactcctcagcaacaaagcagtcccttaagagaaaatattgccttacaactgggattaagcccttcgaagaattcttcaaggagaaatcaaaattgtgccacagaaatccctcaaattgttgaaataagcatcgaaaaggataatgattcttgtgttaccccaggaacaagacttgcacgaagagattcctactctcgacatgctccatggggtgggaagaaaaaacattcctgttctacaaagacccagagttcattggatgctgataaaaagtttggtagaactcgaagtggacttcaaaggagagagaggcgctacggcgtaagttctgtacacgacatggacagtgtttccagcagaactgtaggaagtcgctctctaagacagaggttgcaggatactgtgggcttgtgttttcccatgagaacttacagcaagcagtcaaagcctctcttttccaataaaagaaaaatccatctctctgaattaatgcttgagaaatgcccttttcctgctggctcagatttagcccaaaaatggcatttgattaaacagcatacagctcctgtgagcccacattcaacattttttgatacatttgatccatctttggtttctacagaagatgaagaagataggcttagagagagaaggcggcttagtattgaagaaggggttgatccccctcccaatgcacaaatacatacatttgaagctactgcacaggttaatccattatataaactgggaccaaaattagctcctggaatgactgaaataagtggggacagttctgcaattccacaagctaattgtgactcggaagaggatacaaccaccctgtgtttgcagtcacggaggcagaagcagcgtcagatatctggagacagccatacccatgttagcagacagggagcttggaaagtccacacacagattgattacatacactgcctcgtgcctgatttgcttcaaattacagggaatccctgttactggggagtgatggaccgttatgaagcagaagcccttctcgaagggaaacctgaaggcacgtttttgctcagggactctgcgcaagaggactacctcttctctgtgagcttccgccgctacaacagatccctgcatgcccgaattgagcagtggaatcacaactttagtttcgacgcccatgacccgtgtgtatttcactcctccactgtaacgggacttttagaacattataaagatcccagttcgtgcatgttttttgaaccattgcttactatatcactaaataggactttcccttttagcctgcagtatatctgtcgcgcggtaatctgcaggtgcactacgtatgatggaattgatgggctccctctaccctcaatgttacaggattttttaaaagagtatcattataaacaaaaagttagagttcgctggttggaacgagaaccagtcaaggcaaagtaaactctccggtccccaaagggtgttaactaggtccgctttcatgtgcatcagacagtacacctatagcaagcacacgtagcagtgttaggctttttcatacagtatgtaagcttagtgttagtatctgtcagatgctacctgctgttacttattcagataaacatggtgcctattggaacaatagcggatagagctacaggtgttcagtaagactacaaaaacattttgcctatttcgctaacagtttggtttttaatggctgtggtatttgagtgaggcaactctggggcatttgttatgaagaattctatttcttactgaagaacaaattattaatattggatgagtatttcaacagtgtgactaatgtttgaaattattttttctaagagtttttctataaccttccaaaagtcgtgatgtttgtagttactataaatcaagctttggaagtccaaaaagaataaaagactgccttccttttagaaaaaaatgcaattttctggccacaagggcatagtgcagttcacttacgtgttgatgtagtttataatcagacgccttttctcttctgcaaaaggtactgttaagtaaaccagattttctaaataggcattcttaaaatttcagacttacaaagctagtagtagaattttattgaaaggcctaggtattaattttttaaatgagtgctttaacttaaaacaggcgtttggaatagctgctgcaatgtagtcttgtgtgtgatttttttttaagttgatgtgcagtctaattgttgtttcataaaagttggatctgttcctatgcccaggatgattttgtgaaccgtgaagtacgtgagactagaagacgcccaaacaagtcagataatagtaactacaatggttgctgatgttgagattattgttgaactataattaataatttggatggcagaatttatctcttttttgtaaactctcataactgaattgcttaagtataatttatagaatttcagtgcagttcattcttaatggaaaatctgaaacctaaattgcagatttaaaaggtactgtacaaccattatatctgtaaataacttagcacctttttgtcacttagaataatatgtactactacttgagtgagcgcttttggaagttatatcaagttctagtgtttgcttcttagtaactgaactgaatttacagttctgtcctagacattttgcactaaagtagccgaatccactctcatgtcttttcgttaatgtgctctgtaccactggtgagtgctccatagtttccttacctgctgctacagaatgttattttacatccctatggctattgccaaggctacaaaaaaggaaagctatatttgtatgcaacactaaccttttgactgctaatgtatgtttctgcttgctgtgccttgttatggctgctttttttgtgctaataaagtatgtttggtgttctccttgta

SEQ ID NO: 312167 - DNA, 1206 bp, Homo sapiens
tggtgggggttggggggaggggggaggggaaacgggtgaagaaggggaggcggcggcctggcgggggcatccggcggagctggggtccccgggctccgtccggaggaagcgacgctgcgctcgctgggcagtcggaggggacgggacgcaccggagggcaggcggactcgccctgtcggtgactgcgccgtccgggcccgtcctgcctggccgcaggtgccctggatgaggccgccccgcgcgccccaaacgattttataatcaatggataaagtgggaaaaatgtggaataacttcaaatacaggtgtcagaatctcttcggtcatgagggaggaagccgtagtgaaaatgtggacatgaactccaacagatgtttgtctgtcaaagagaaaaacatcagcataggagactcaactcctcagcaacaaagcagtcccttaagagaaaatattgccttacaactgggattaagcccttcgaagaattcttcaaggagaaatcaaaattgtgccacagaaatccctcaaattgttgaaataagcatcgaaaaggataatgattcttgtgttaccccaggaacaagacttgcacgaagagattcctactctcgacatgctccatggggtgggaagaaaaaacattcctgttctacaaagacccagagttcattggatgctgataaaaagtttggtagaactcgaagtggacttcaaaggagagagaggcgctacggcgtaagttctgtacacgacatggacagtgtttccagcagaactgtaggaagtcgctctctaagacagaggttgcaggatactgtgggcttgtgttttcccatgagaacttacagcaagcagtcaaagcctctcttttccaataaaagaaaaatccatctctctgaattaatgcttgagaaatgcccttttcctgctggctcagatttagcccaaaaatggcatttgattaaacagcatacagctcctgtgagcccacattcaacattttttgatacatttgatccatctttggtttctacagaagatgaagaagataggcttagagagagaaggcgcccagttgttcgagaccagcctggacaacatggcgagatcccatctccacaaaagaaatacaaaactagttgggcatggtggcgtgtgcctccagtcccagctaccagggaggccgaggtgagaagacagatggag

SEQ ID NO: 312168 - DNA, 4052 bp, Homo sapiens
tggtgggggttggggggaggggggaggggaaacgggtgaagaaggggaggcggcagggaagggggtgggggcctggcgggggcatccggcggagctggggtccccgggctccgtccggaggaagcgacgctgcgctcgctgggcagtcggaggggacgggacgcaccggagggcaggcggactcgccctgtcggtgactgcgccgtccgggcccgtcctgcctggccgcaggtgccctggatgaggccgccccgcgcgccccaaacgattttataatcaatggataaagtgggaaaaatgtggaataacttcaaatacaggtgtcagaatctcttcggtcatgagggaggaagccgtagtgaaaatgtggacatgaactccaacagatgtttgtctgtcaaagagaaaaacatcagcataggagactcaactcctcagcaacaaagcagtcccttaagagaaaatattgccttacaactgggattaagcccttcgaagaattcttcaaggagaaatcaaaattgtgccacagaaatccctcaaattgttgaaataagcatcgaaaaggataatgattcttgtgttaccccaggaacaagacttgcacgaagagattcctactctcgacatgctccatggggtgggaagaaaaaacattcctgttctacaaagacccagagttcattggatgctgataaaaagtttggtagaactcgaagtggacttcaaaggagagagaggcgctacggcgtaagttctgtacacgacatggacagtgtttccagcagaactgtaggaagtcgctctctaagacagaggttgcaggatactgtgggcttgtgttttcccatgagaacttacagcaagcagtcaaagcctctcttttccaataaaagaaaaatccatctctctgaattaatgcttgagaaatgcccttttcctgctggctcagatttagcccaaaaatggcatttgattaaacagcatacagctcctgtgagcccacattcaacattttttgatacatttgatccatctttggtttctacagaagatgaagaagataggcttagagagagaaggcggcttagtattgaagaaggggttgatccccctcccaatgcacaaatacatacatttgaagctactgcacaggttaatccattatataaactgggaccaaaattagctcctggaatgactgaaataagtggggacagttctgcaattccacaagctaattgtgactcggaagaggatacaaccaccctgtgtttgcagtcacggaggcagaagcagcgtcagatatctggagacagccatacccatgttagcagacagggagcttggaaagtccacacacagattgattacatacactgcctcgtgcctgatttgcttcaaattacagggaatccctgttactggggagtgatggaccgttatgaagcagaagcccttctcgaagggaaacctgaaggcacgtttttgctcagggactctgcgcaagaggactacctcttctctgtgagcttccgccgctacaacagatccctgcatgcccgaattgagcagtggaatcacaactttagtttcgacgcccatgacccgtgtgtatttcactcctccactgtaacgggacttttagaacattataaagatcccagttcgtgcatgttttttgaaccattgcttactatatcactaaataggactttcccttttagcctgcagtatatctgtcgcgcggtaatctgcaggtgcactacgtatgatggaattgatgggctccctctaccctcaatgttacaggattttttaaaagagtatcattataaacaaaaagttagagttcgctggttggaacgagaaccagtcaaggcaaagtaaactctccggtccccaaagggtgttaactaggtccgctttcatgtgcatcagacagtacacctatagcaagcacacgtagcagtgttaggctttttcatacagtatgtaagcttagtgttagtatctgtcagatgctacctgctgttacttattcagataaacatggtgcctattggaacaatagcggatagagctacaggtgttcagtaagactacaaaaacattttgcctatttcgctaacagtttggtttttaatggctgtggtatttgagtgaggcaactctggggcatttgttatgaagaattctatttcttactgaagaacaaattattaatattggatgagtatttcaacagtgtgactaatgtttgaaattattttttctaagagtttttctataaccttccaaaagtcgtgatgtttgtagttactataaatcaagctttggaagtccaaaaagaataaaagactgccttccttttagaaaaaaatgcaattttctggccacaagggcatagtgcagttcacttacgtgttgatgtagtttataatcagacgccttttctcttctgcaaaaggtactgttaagtaaaccagattttctaaataggcattcttaaaatttcagacttacaaagctagtagtagaattttattgaaaggcctaggtattaattttttaaatgagtgctttaacttaaaacaggcgtttggaatagctgctgcaatgtagtcttgtgtgtgatttttttttaagttgatgtgcagtctaattgttgtttcataaaagttggatctgttcctatgcccaggatgattttgtgaaccgtgaagtacgtgagactagaagacgcccaaacaagtcagataatagtaactacaatggttgctgatgttgagattattgttgaactataattaataatttggatggcagaatttatctcttttttgtaaactctcataactgaattgcttaagtataatttatagaatttcagtgcagttcattcttaatggaaaatctgaaacctaaattgcagatttaaaaggtactgtacaaccattatatctgtaaataacttagcacctttttgtcacttagaataatatgtactactacttgagtgagcgcttttggaagttatatcaagttctagtgtttgcttcttagtaactgaactgaatttacagttctgtcctagacattttgcactaaagtagccgaatccactctcatgtcttttcgttaatgtgctctgtaccactggtgagtgctccatagtttccttacctgctgctacagaatgttattttacatccctatggctattgccaaggctacaaaaaaggaaagctatatttgtatgcaacactaaccttttgactgctaatgtatgtttctgcttgctgtgccttgttatggctgctttttttgtgctaataaagtatgtttggtgttctccttgtatatctgctgttttatacatttgcaacaatttctcttgtaaatggaatggtttggggtttttaaataagcattaactaacaacctttctatagttaatgcagagttaatgaacagtctaatattgacttatcagaataagctaactctaaatttaatgctctacatcttatcagtcataattatatatactgtggaacagtatctgtagttactgcaaattactgtacagtttaggttataacagaaaactgacagagaagtaataaacctattgatttctctgcttataaatgaaagattgaaactatccaatgacatattatagtaaatgagtatctgtaacctcccactgcatcagaagcaggttaaatgaagtcttgtgaatttgtaatagatcagtaccatttattggtttggggaccatcttaattaaaaataaatgcccaaaatgtagaactttaaccaaagacttgtcccttttaaagcaaaatggggattgaagggacttataatttctgttgtttctaattaaagtccctgaagatcatataccaaagtgtttgagaacttcatccaaacctactttaaagcattatgtgcaattaagttgttatgacataattatattgcctaattgttgggtcttttttcttgagcttataatgtacctggaaaataaacctcttgag

SEQ ID NO: 312169 - DNA, 5577 bp, Homo sapiens
tggtgggggttggggggaggggggaggggaaacgggtgaagaaggggaggcggcggcctggcgggggcatccggcggagctggggtccccgggctccgtccggaggaagcgacgctgcgctcgctgggcagtcggaggggacgggacgcaccggagggcaggcggactcgccctgtcggtgactgcgccgtccgggcccgtcctgcctggccgcaggtgccctggatgaggccgccccgcgcgccccaaacgattttataatcaatggataaagtgggaaaaatgtggaataacttcaaatacaggtgtcagaatctcttcggtcatgagggaggaagccgtagtgaaaatgtggacatgaactccaacagatgtttgtctgtcaaagagaaaaacatcagcataggagactcaactcctcagcaacaaagcagtcccttaagagaaaatattgccttacaactgggattaagcccttcgaagaattcttcaaggagaaatcaaaattgtgccacagaaatccctcaaattgttgaaataagcatcgaaaaggataatgattcttgtgttaccccaggaacaagacttgcacgaagagattcctactctcgacatgctccatggggtgggaagaaaaaacattcctgttctacaaagacccagagttcattggatgctgataaaaagtttggtagaactcgaagtggacttcaaaggagagagaggcgctacggcgtaagttctgtacacgacatggacagtgtttccagcagaactgtaggaagtcgctctctaagacagaggttgcaggatactgtgggcttgtgttttcccatgagaacttacagcaagcagtcaaagcctctcttttccaataaaagaaaaatccatctctctgaattaatgcttgagaaatgcccttttcctgctggctcagatttagcccaaaaatggcatttgattaaacagcatacagctcctgtgagcccacattcaacattttttgatacatttgatccatctttggtttctacagaagatgaagaagataggcttagagagagaaggcggcttagtattgaagaaggggttgatccccctcccaatgcacaaatacatacatttgaagctactgcacaggttaatccattatataaactgggaccaaaattagctcctggaatgactgaaataagtggggacagttctgcaattccacaagctaattgtgactcggaagaggatacaaccaccctgtgtttgcagtcacggaggcagaagcagcgtcagatatctggagacagccatacccatgttagcagacagggagcttggaaagtccacacacagattgattacatacactgcctcgtgcctgatttgcttcaaattacagggaatccctgttactggggagtgatggaccgttatgaagcagaagcccttctcgaagggaaacctgaaggcacgtttttgctcagggactctgcgcaagaggactacctcttctctgtgagcttccgccgctacaacagatccctgcatgcccgaattgagcagtggaatcacaactttagtttcgacgcccatgacccgtgtgtatttcactcctccactgtaacgggacttttagaacattataaagatcccagttcgtgcatgttttttgaaccattgcttactatatcactaaataggactttcccttttagcctgcagtatatctgtcgcgcggtaatctgcaggtgcactacgtatgatggaattgatgggctccctctaccctcaatgttacaggattttttaaaagagtatcattataaacaaaaagttagagttcgctggttggaacgagaaccagtcaaggcaaagtaaactctccggtccccaaagggtgttaactaggtccgctttcatgtgcatcagacagtacacctatagcaagcacacgtagcagtgttaggctttttcatacagtatgtaagcttagtgttagtatctgtcagatgctacctgctgttacttattcagataaacatggtgcctattggaacaatagcggatagagctacaggtgttcagtaagactacaaaaacattttgcctatttcgctaacagtttggtttttaatggctgtggtatttgagtgaggcaactctggggcatttgttatgaagaattctatttcttactgaagaacaaattattaatattggatgagtatttcaacagtgtgactaatgtttgaaattattttttctaagagtttttctataaccttccaaaagtcgtgatgtttgtagttactataaatcaagctttggaagtccaaaaagaataaaagactgccttccttttagaaaaaaatgcaattttctggccacaagggcatagtgcagttcacttacgtgttgatgtagtttataatcagacgccttttctcttctgcaaaaggtactgttaagtaaaccagattttctaaataggcattcttaaaatttcagacttacaaagctagtagtagaattttattgaaaggcctaggtattaattttttaaatgagtgctttaacttaaaacaggcgtttggaatagctgctgcaatgtagtcttgtgtgtgatttttttttaagttgatgtgcagtctaattgttgtttcataaaagttggatctgttcctatgcccaggatgattttgtgaaccgtgaagtacgtgagactagaagacgcccaaacaagtcagataatagtaactacaatggttgctgatgttgagattattgttgaactataattaataatttggatggcagaatttatctcttttttgtaaactctcataactgaattgcttaagtataatttatagaatttcagtgcagttcattcttaatggaaaatctgaaacctaaattgcagatttaaaaggtactgtacaaccattatatctgtaaataacttagcacctttttgtcacttagaataatatgtactactacttgagtgagcgcttttggaagttatatcaagttctagtgtttgcttcttagtaactgaactgaatttacagttctgtcctagacattttgcactaaagtagccgaatccactctcatgtcttttcgttaatgtgctctgtaccactggtgagtgctccatagtttccttacctgctgctacagaatgttattttacatccctatggctattgccaaggctacaaaaaaggaaagctatatttgtatgcaacactaaccttttgactgctaatgtatgtttctgcttgctgtgccttgttatggctgctttttttgtgctaataaagtatgtttggtgttctccttgtatatctgctgttttatacatttgcaacaatttctcttgtaaatggaatggtttggggtttttaaataagcattaactaacaacctttctatagttaatgcagagttaatgaacagtctaatattgacttatcagaataagctaactctaaatttaatgctctacatcttatcagtcataattatatatactgtggaacagtatctgtagttactgcaaattactgtacagtttaggttataacagaaaactgacagagaagtaataaacctattgatttctctgcttataaatgaaagattgaaactatccaatgacatattatagtaaatgagtatctgtaacctcccactgcatcagaagcaggttaaatgaagtcttgtgaatttgtaatagatcagtaccatttattggtttggggaccatcttaattaaaaataaatgcccaaaatgtagaactttaaccaaagacttgtcccttttaaagcaaaatggggattgaagggacttataatttctgttgtttctaattaaagtccctgaagatcatataccaaagtgtttgagaacttcatccaaacctactttaaagcattatgtgcaattaagttgttatgacataattatattgcctaattgttgggtcttttttcttgagcttataatgtacctggaaaataaacctcttgagaaaaagaaaagttcatactgattattggaaaaggactatatatgtgagcaagattgtgttttagagaggaaacttgaaactccaagaaagcacttgatgtttttatatgcttgtagcaaattgatgttctaactgtagttttatagaaagtattaatgcttttatgtatttcaaaactttcatatgttaaatggaaattgttttaaatgtgtttgagtttatgtaagcatgtatacactgtgctaaaagtcacatgtttcagtttgtgtataatattaatatgcaatttttggtttaaatttttgtcttaaaatattagtggcttacattttaaaaaagaaaaatcaccagcatgaacttgcacctaagtctatattcactgtgtccttttctgaatcccattgtagcctgtcaactaaatttgagtgttaacggtctttttaaagtgcatttaaatacaaaccaggaatttctttagaagttgagatacatctttatagttgaaataattaacccaagaaaaggttgctttgatttgtacccattctcattcattttcttcattcccttacacacacacacacacctctcccttccgcatacatataagtgtgtattatatatttatgtatgcacatatatacatttatgttgttaatattactttagatggcatttccacctgatacaaaaacatttagagatcttattctatagatattacctaaagagtattcttgtactattcgaattttattatctgcactaaaagtttagccttgctactttagccttgtttataatacagtcaccttacaaagagaaagagttcatctgtattttgttttctggctaaacacagtacaaaatatttgaagaaaaacagcttggattaaatagttactaagagttataattaaatttatgtttcttagacaaaaaaaaaaaaaaaaaaaaaaaaaaaaaaaaaaaaaaaaaaaaaaaaaaagaaaaaaaaaaaaaaaaaagaacaacaaagaatacaaagaacaaacaaaagcagtacaaactacaggcaaagcagaagaaagagacagccacacgaacgaaacccgcaaacagagacagcagaagaggaaaaacaaaacaagaaacgaacgagaagagacgaacacgagcaagataaaaaaaaagccaaagcgacctacgaagaaccaagaacagaaagagaaagaaaccagatagaaaacaagaacgacgcgagaggagacaaagaaaggataaaagagcaaggagacagaaatgagagagcagccaagcacgcaacgcgcagcgcacaggctccatagacaagaacaaaaagacagaaacggaagaaacgaacagaacaagaaccaacaccgaggaagacaaaaacgagacagaacaggaaggacaagaacgaacgacagagaaaaggaaaaacgaaagaacgaaaagagcacaacgaaagaaaagcaggaacaagaacgacacaagaaaacacaccagaacaaacaaacagaaaagaaggcaaaacaaa

SEQ ID NO: 312170 - DNA, 3525 bp, Homo sapiens
  misc_feature (3500)..(3500): n is a, c, g, or t
  misc_feature (3506)..(3506): n is a, c, g, or t
tggtgggggttggggggaggggggaggggaaacgggtgaagaaggggaggcggcggcctggcgggggcatccggcggagctggggtccccgggctccgtccggaggaagcgacgctgcgctcgctgggcagtcggaggggacgggacgcaccggagggcaggcggactcgccctgtcggtgactgcgccgtccgggcccgtcctgcctggccgcaggtgccctggatgaggccgccccgcgcgccccaaacgattttataatcaatggataaagtgggaaaaatgtggaataacttcaaatacaggtgtcagaatctcttcggtcatgagggaggaagccgtagtgaaaatgtggacatgaactccaacagatgtttgtctgtcaaagagaaaaacatcagcataggagactcaactcctcagcaacaaagcagtcccttaagagaaaatattgccttacaactgggattaagcccttcgaagaattcttcaaggagaaatcaaaattgtgccacagaaatccctcaaattgttgaaataagcatcgaaaaggataatgattcttgtgttaccccaggaacaagacttgcacgaagagattcctactctcgacatgctccatggggtgggaagaaaaaacattcctgttctacaaagacccagagttcattggatgctgataaaaagtttggtagaactcgaagtggacttcaaaggagagagaggcgctacggcgtaagttctgtacacgacatggacagtgtttccagcagaactgtaggaagtcgctctctaagacagaggttgcaggatactgtgggcttgtgttttcccatgagaacttacagcaagcagtcaaagcctctcttttccaataaaagaaaaatccatctctctgaattaatgcttgagaaatgcccttttcctgctggctcagatttagcccaaaaatggcatttgattaaacagcatacagctcctgtgagcccacattcaacattttttgatacatttgatccatctttggtttctacagaagatgaagaagataggcttagagagagaaggcggcttagtattgaagaaggggttgatccccctcccaatgcacaaatacatacatttgaagctactgcacaggttaatccattatataaactgggaccaaaattagctcctggaatgactgaaataagtggggacagttctgcaattccacaagctaattgtgactcggaagaggatacaaccaccctgtgtttgcagtcacggaggcagaagcagcgtcagatatctggagacagccatacccatgttagcagacagggagcttggaaagtccacacacagattgattacatacactgcctcgtgcctgatttgcttcaaattacagggaatccctgttactggggagtgatggaccgttatgaagcagaagcccttctcgaagggaaacctgaaggcacgtttttgctcagggactctgcgcaagaggactacctcttctctgtgagcttccgccgctacaacagatccctgcatgcccgaattgagcagtggaatcacaactttagtttcgacgcccatgacccgtgtgtatttcactcctccactgtaacgggacttttagaacattataaagatcccagttcgtgcatgttttttgaaccattgcttactatatcactaaataggactttcccttttagcctgcagtatatctgtcgcgcggtaatctgcaggtgcactacgtatgatggaattgatgggctccctctaccctcaatgttacaggattttttaaaagagtatcattataaacaaaaagttagagttcgctggttggaacgagaaccagtcaaggcaaagtaaactctccggtccccaaagggtgttaactaggtccgctttcatgtgcatcagacagtacacctatagcaagcacacgtagcagtgttaggctttttcatacagtatgtaagcttagtgttagtatctgtcagatgctacctgctgttacttattcagataaacatggtgcctattggaacaatagcggatagagctacaggtgttcagtaagactacaaaaacattttgcctatttcgctaacagtttggtttttaatggctgtggtatttgagtgaggcaactctggggcatttgttatgaagaattctatttcttactgaagaacaaattattaatattggatgagtatttcaacagtgtgactaatgtttgaaattattttttctaagagtttttctataaccttccaaaagtcgtgatgtttgtagttactataaatcaagctttggaagtccaaaaagaataaaagactgccttccttttagaaaaaaatgcaattttctggccacaagggcatagtgcagttcacttacgtgttgatgtagtttataatcagacgccttttctcttctgcaaaaggtactgttaagtaaaccagattttctaaataggcattcttaaaatttcagacttacaaagctagtagtagaattttattgaaaggcctaggtattaattttttaaatgagtgctttaacttaaaacaggcgtttggaatagctgctgcaatgtagtcttgtgtgtgatttttttttaagttgatgtgcagtctaattgttgtttcataaaagttggatctgttcctatgcccaggatgattttgtgaaccgtgaagtacgtgagactagaagacgcccaaacaagtcagataatagtaactacaatggttgctgatgttgagattattgttgaactataattaataatttggatggcagaatttatctcttttttgtaaactctcataactgaattgcttaagtataatttatagaatttcagtgcagttcattcttaatggaaaatctgaaacctaaattgcagatttaaaaggtactgtacaaccattatatctgtaaataacttagcacctttttgtcacttagaataatatgtactactacttgagtgagcgcttttggaagttatatcaagttctagtgtttgcttcttagtaactgaactgaatttacagttctgtcctagacattttgcactaaagtagccgaatccactctcatgtcttttcgttaatgtgctctgtaccactggtgagtgctccatagtttccttacctgctgctacagaatgttattttacatccctatggctattgccaaggctacaaaaaaggaaagctatatttgtatgcaacactaaccttttgactgctaatgtatgtttctgcttgctgtgccttgttatggctgctttttttgtgctaataaagtatgtttggtgttctccttgtatatctgctgttttatacatttgcaacaatttctcttgtttggtaaattgggaaatgggttttggggggttttttaaaataaagccttttaaccttaacccaacccttttttttttaggttaaatggccgaaaggttaaatggaaccaggccnaaatantttggcctttattccaaaa

SEQ ID NO: 312171 - DNA, 6209 bp, Homo sapiens
ccaccgcctccacctccatcgccgtcgggggaggggccggccggaccccggggtcactgccgaggaatgaagagaggcggccgggccccgcgctccgccccggcctagggccttgccccgggagcccgcgaggtggaggcctgaattttgatctatgttctaccatacatccagctggctgaaagtacttgaggatcacatgaccctggacatggatgctgttctgtcagattttgtccgttccacaggagcagagccagggctagcgcgagatctcctagaaggaaagaattgggatgtgaatgccgccctcagtgattttgaacagctacgtcaagtccatgctggaaacctacccccatcctttagtgaggggagtggtggctccaggacccctgaaaaagggttttctgacagagagcctactcgccctccccgacccatcctccagcggcaggatgacatcgttcaagaaaaacgcctgtctaggggcatctcccacgccagctccagcattgtttccctggcccggtcccatgtctcctccaatggtgggggtggggggagcaatgagcaccccctggaaatgcccatctgtgccttccagcttccagatctcactgtatacaatgaagacttccgcagcttcatagagagagacctcattgagcagtccatgctggttgccttggaacaggcagggcgtttgaactggtgggtgagtgtggatcccacctctcagaggctgcttcctttggcaactactggagatgggaactgcctcctgcatgcagcctcccttggaatgtggggtttccatgatcgggacttgatgctgcggaaagctttgtatgcactgatggagaagggagttgagaaggaagcgttgaaaaggcgctggaggtggcagcagacacagcagaataaagagtcagggctggtatacacagaagatgaatggcagaaggagtggaatgaactgatcaagcttgcctcaagtgaaccccgaatgcatctaggtaccaatggagccaactgtggtggggtggagagttctgaggagcctgtatatgagagccttgaagagtttcacgtctttgtccttgctcatgtgcttaggaggcccatagtcgtcgtggcagacaccatgctgagggactccggaggggaagcatttgcccctattccctttggaggaatctatctgcctttggaggtcccagccagccagtgtcaccgctcccctctggtgctcgcctatgatcaggcccacttttctgcactcgtgtccatggagcagaaggagaataccaaggaacaagctgtgatcccacttacagattcagagtataagctgctgcccttgcactttgctgtggaccctggaaagggctgggagtggggcaaagatgatagtgacaatgtccgattggccagtgtaattctgtccctagaggtcaaattgcatctgctgcatagctacatgaatgtgaagtggatcccactgtcctctgatgcacaggctcctctggcccagcctgagtcccccaccgcctcagctggagatgagccccggtccactcctgagtctggagactcagacaaggagtcagttggcagcagttccaccagcaacgagggcggccggcggaaggagaagtcaaagcgagatcgggagaaggacaagaagagagcagattctgtggctaacaaactgggcagctttggcaaaaccttgggcagcaagctcaagaagaacatggggggcctgatgcacagcaagggttcaaagcctggaggggtggggacagggttgggaggaagcagcggcactgagacactggagaagaagaagaaaaactcactgaagagctggaagggtggcaaggaggaggcagctggggatgggcctgtgtctgagaagcccccagctgagtctgttggtaacggagggagcaagtatagccaggaggtgatgcagagcctgagcattctgaggactgccatgcaaggggaggggaagtttatttttgttggaaccctgaagatgggtcaccgtcaccagtatcaggaggaaatgatccagcgctacctttctgatgctgaggagagattcctggcagaacagaagcagaaggaggcagagaggaagatcatgaatggaggaatagggggtggccctcctccagccaaaaagccagagccagatgctagggaagagcagccgaccggtcccccagcagagtccagggcaatggcattttccactggctaccctggggactttactatccctcggccgtctgggggcggagtccactgccaggaaccccggaggcagttggcagggggtccatgtgtcgggggcctaccaccatatgccaccttccccagacagtgccctcctgggcgaccctacccccaccaggacagcatcccttctctggagccaggcagccactctaaggatggacttcacaggggtgccttgttaccacccccctaccgagtggctgattcctatagcaatggctacagagagccccctgagccagatggatgggctggaggtctccggggccttcccccaactcagaccaaatgcaaacaaccgaactgcagcttctatggacaccctgagacaaacaacttctgttcctgttgttacagggaagaactgaggaggagggagcgggaaccggatggggagctcctggtgcacaggttctgaacgggtggaacactgaagggcaaggaggctaaacaaagttaagctcaactaattggctcatcaagaacacagtccccatgttgagggggaaaatgcagtaatgtttgtgggagcctggctggaaacttttaagtgtgtgcacacaggagtgctgccaggctggcaagagcaggtcggggctggatggcacctcaggggctgtactattcctctgcagagcttgacttgatgaggtttgaggtacaaggggaaaagatggcgattctgtcttataacctcctgggtcccatccagggacctaagagaaagtagcaggggaaggtttggtgtgtgggggtgggaggtgggcagaagtcttggggaggaatgggcaaaggaggttctcagtcaataaaaccaaagttctttaggttgggaaaaagcacatggtggagtgagaagtgtggaggggaagtgggaaattggacacatttgctattgatttgaattaagctagaaattaaggttggataaattcttccccttgaaggatctggaaagacaaggcagtaatgtgtcctcatgggtgcctgttaggaggtgggggtagtttaaatccgtttgtttagatgggaaagggaggaacttaagagggaaatccttttcctcttaaggtttatttccttccaagcagtcatatgtcatctgttacagtttgagaagagattgctgattaccccctgtcttttcctcatctaagtctttaattgtatttgtttaaagggaagagtgtggtgagaacagccgtcatgtgtgttgcattttctccaggtgaattggggcagagctgatctattttttaaccacagcaataaccatacgttggggtttgagtgcaccttgggaggggtgggaggacagacattttagccagaggctgtttcaaacaaaaccaaaaacctaagtagagcattacaggcctctgtggctgctgcgtttctgtagaaagcaacttattttattgacttttttttttaaggaaaagaaataaaaagaccccagcaagcaaaaacatttaaaaaatgattttttttcctcctacttaagtggttctttctccctttgctctacttttggagaatgaacttaacatcccggcttcttttgttaagccatagctgaccttaatctgtggttagtttattaaaataattaaaaatactttctaagaagagatatttttgatattaggactgatgttgaaacatataggggcaatttataaaaaggtagttagagaaatatattttagtgaactataaccacagagcacagatgactcccaatgagctgatctgtctttaggtttctccctttccctgacccttccctgttctctaggggctgggagtggggatgcggacacagtagggggagctccttcgcattttgcacaaagcacaagtctgaacagcctatgctctggccagagccatttctaagagctttaaaccggaagacctatcctgggccaattttcctttttctttatatttttttccgggaaaaaaagtcaactatgcaattgtatacactcccgggtgcatgtgaagaaggggaataagtgtacttatgtgtccagagtattaactggggctgtttttctgtgtttggatttctcttttgaggtatgtactcataacccatcccttggaacgtaatccccacatttgatctaaagcacttgagcgtgcatgcatgtgcgtgcgtgcatatgtgtgtgtgttttcctcctcggtagccagtcaagattgtccttgttggaaatgctcacggtttataaaggttattttctcctcaacaaactcagaagtcacctattttccaaatctgatttaataatttcctatggctattaattcttagggttttctttgaaaatagatttgtgttaaggaagcagtgagattccaaaggaagggatgtgtatatgtctaggcaggtctggaacctggtatgagatgagcactcccctaagttgcaaaatttaagggttactataaaactcattaatcaagatactataaaaaatgcagtatttaaaaaaattaatgcaaaaaatttatgttggataaaatagcgaaatcttacaggatctgacaggactgagattaggaggagggaagtgaggctgaattgaataagtatggggatgaatccttcttatttaaatttttgatacattgtccatcatagactttttacattaattgtgattttttaaaaatgttgcattaaaatagtatttatcttggttactgggttttttggcactccttaaattttgtgcccaaggtgagtgctttgctcacctcaccctagttacgtccctgtttctgtgatttgaacactagcgagaacaccactgtgtgcgcctccacccccatcacacaccaaacaacaggtggctcagacaccctgaatttgcacagctcacctagctttcctaatttaggccttcatatcatagaatggtggcctggaccaataggaatgaaaacagaccaggggttttcccagagaataaagccggaaaagttttgattctccactggactgctgtgtttggatttgatctgttgttagattctagttaacacttttgtttttaaaaactaaggacaaatgaacaaaaaaccttgtatcatgtttgtttttatttataagttagccaatcccaattccgtttgctttattttcaaataaaaaaagatggaaattttgaggggtggtctaggggtgaatatggtaaaatggggctttaggccttatagctttttattaagaaataaattattttttttatttgggagggtaactatttattgaggcattgaagagatagtgaagtttgttttgcttcattctttcggggagggtcttggtgggatggggggaggtgaaggaataatgcctgggaaattaatatagattcagcttggtttgtggtattttgggaagatgagggaatagaagaggcaagcccatgtcgttactgggttggggagaaggaaagaaggggcatatggcctgcactcgaaatgggcagaaaaattccttagttaaggaggggtgtgtgagtgaagggggaaggtagaccctttaaccccaagtgagggatgatatcatctctcaggcttaaatttaagtgcacttagttcctttaatccagggcaactggggtacctactgaagtttttaatggagaggggagattttcagggttcttgtttttccctttttgatgttagacagtgctactccctccctgctgtgctctctgccccatctccaatggagtaagtattactgtaggataggcctccgcttctcccttaacctatgctgcatttattgaaagttacaagatttaaccagaagtttttcctccatactggtttttatcaacaaaataaaaagattatatccaaaaaaattt

SEQ ID NO: 312172 - DNA, 6214 bp, Homo sapiens
gggcaaaaagccactgggggaggccagtcccgatcagtcctttctggctccagctccagatcccgtgcggagcaacagctgcggtggaggcctgaattttgatctatgttctaccatacatccagctggctgaaagtacttgaggatcacatgaccctggacatggatgctgttctgtcagattttgtccgttccacaggagcagagccagggctagcgcgagatctcctagaaggaaagaattgggatgtgaatgccgccctcagtgattttgaacagctacgtcaagtccatgctggaaacctacccccatcctttagtgaggggagtggtggctccaggacccctgaaaaagggttttctgacagagagcctactcgccctccccgacccatcctccagcggcaggatgacatcgttcaagaaaaacgcctgtctaggggcatctcccacgccagctccagcattgtttccctggcccggtcccatgtctcctccaatggtgggggtggggggagcaatgagcaccccctggaaatgcccatctgtgccttccagcttccagatctcactgtatacaatgaagacttccgcagcttcatagagagagacctcattgagcagtccatgctggttgccttggaacaggcagggcgtttgaactggtgggtgagtgtggatcccacctctcagaggctgcttcctttggcaactactggagatgggaactgcctcctgcatgcagcctcccttggaatgtggggtttccatgatcgggacttgatgctgcggaaagctttgtatgcactgatggagaagggagttgagaaggaagcgttgaaaaggcgctggaggtggcagcagacacagcagaataaagagtcagggctggtatacacagaagatgaatggcagaaggagtggaatgaactgatcaagcttgcctcaagtgaaccccgaatgcatctaggtaccaatggagccaactgtggtggggtggagagttctgaggagcctgtatatgagagccttgaagagtttcacgtctttgtccttgctcatgtgcttaggaggcccatagtcgtcgtggcagacaccatgctgagggactccggaggggaagcatttgcccctattccctttggaggaatctatctgcctttggaggtcccagccagccagtgtcaccgctcccctctggtgctcgcctatgatcaggcccacttttctgcactcgtgtccatggagcagaaggagaataccaaggaacaagctgtgatcccacttacagattcagagtataagctgctgcccttgcactttgctgtggaccctggaaagggctgggagtggggcaaagatgatagtgacaatgtccgattggccagtgtaattctgtccctagaggtcaaattgcatctgctgcatagctacatgaatgtgaagtggatcccactgtcctctgatgcacaggctcctctggcccagcctgagtcccccaccgcctcagctggagatgagccccggtccactcctgagtctggagactcagacaaggagtcagttggcagcagttccaccagcaacgagggcggccggcggaaggagaagtcaaagcgagatcgggagaaggacaagaagagagcagattctgtggctaacaaactgggcagctttggcaaaaccttgggcagcaagctcaagaagaacatggggggcctgatgcacagcaagggttcaaagcctggaggggtggggacagggttgggaggaagcagcggcactgagacactggagaagaagaagaaaaactcactgaagagctggaagggtggcaaggaggaggcagctggggatgggcctgtgtctgagaagcccccagctgagtctgttggtaacggagggagcaagtatagccaggaggtgatgcagagcctgagcattctgaggactgccatgcaaggggaggggaagtttatttttgttggaaccctgaagatgggtcaccgtcaccagtatcaggaggaaatgatccagcgctacctttctgatgctgaggagagattcctggcagaacagaagcagaaggaggcagagaggaagatcatgaatggaggaatagggggtggccctcctccagccaaaaagccagagccagatgctagggaagagcagccgaccggtcccccagcagagtccagggcaatggcattttccactggctaccctggggactttactatccctcggccgtctgggggcggagtccactgccaggaaccccggaggcagttggcagggggtccatgtgtcgggggcctaccaccatatgccaccttccccagacagtgccctcctgggcgaccctacccccaccaggacagcatcccttctctggagccaggcagccactctaaggatggacttcacaggggtgccttgttaccacccccctaccgagtggctgattcctatagcaatggctacagagagccccctgagccagatggatgggctggaggtctccggggccttcccccaactcagaccaaatgcaaacaaccgaactgcagcttctatggacaccctgagacaaacaacttctgttcctgttgttacagggaagaactgaggaggagggagcgggaaccggatggggagctcctggtgcacaggttctgaacgggtggaacactgaagggcaaggaggctaaacaaagttaagctcaactaattggctcatcaagaacacagtccccatgttgagggggaaaatgcagtaatgtttgtgggagcctggctggaaacttttaagtgtgtgcacacaggagtgctgccaggctggcaagagcaggtcggggctggatggcacctcaggggctgtactattcctctgcagagcttgacttgatgaggtttgaggtacaaggggaaaagatggcgattctgtcttataacctcctgggtcccatccagggacctaagagaaagtagcaggggaaggtttggtgtgtgggggtgggaggtgggcagaagtcttggggaggaatgggcaaaggaggttctcagtcaataaaaccaaagttctttaggttgggaaaaagcacatggtggagtgagaagtgtggaggggaagtgggaaattggacacatttgctattgatttgaattaagctagaaattaaggttggataaattcttccccttgaaggatctggaaagacaaggcagtaatgtgtcctcatgggtgcctgttaggaggtgggggtagtttaaatccgtttgtttagatgggaaagggaggaacttaagagggaaatccttttcctcttaaggtttatttccttccaagcagtcatatgtcatctgttacagtttgagaagagattgctgattaccccctgtcttttcctcatctaagtctttaattgtatttgtttaaagggaagagtgtggtgagaacagccgtcatgtgtgttgcattttctccaggtgaattggggcagagctgatctattttttaaccacagcaataaccatacgttggggtttgagtgcaccttgggaggggtgggaggacagacattttagccagaggctgtttcaaacaaaaccaaaaacctaagtagagcattacaggcctctgtggctgctgcgtttctgtagaaagcaacttattttattgacttttttttttaaggaaaagaaataaaaagaccccagcaagcaaaaacatttaaaaaatgattttttttcctcctacttaagtggttctttctccctttgctctacttttggagaatgaacttaacatcccggcttcttttgttaagccatagctgaccttaatctgtggttagtttattaaaataattaaaaatactttctaagaagagatatttttgatattaggactgatgttgaaacatataggggcaatttataaaaaggtagttagagaaatatattttagtgaactataaccacagagcacagatgactcccaatgagctgatctgtctttaggtttctccctttccctgacccttccctgttctctaggggctgggagtggggatgcggacacagtagggggagctccttcgcattttgcacaaagcacaagtctgaacagcctatgctctggccagagccatttctaagagctttaaaccggaagacctatcctgggccaattttcctttttctttatatttttttccgggaaaaaaagtcaactatgcaattgtatacactcccgggtgcatgtgaagaaggggaataagtgtacttatgtgtccagagtattaactggggctgtttttctgtgtttggatttctcttttgaggtatgtactcataacccatcccttggaacgtaatccccacatttgatctaaagcacttgagcgtgcatgcatgtgcgtgcgtgcatatgtgtgtgtgttttcctcctcggtagccagtcaagattgtccttgttggaaatgctcacggtttataaaggttattttctcctcaacaaactcagaagtcacctattttccaaatctgatttaataatttcctatggctattaattcttagggttttctttgaaaatagatttgtgttaaggaagcagtgagattccaaaggaagggatgtgtatatgtctaggcaggtctggaacctggtatgagatgagcactcccctaagttgcaaaatttaagggttactataaaactcattaatcaagatactataaaaaatgcagtatttaaaaaaattaatgcaaaaaatttatgttggataaaatagcgaaatcttacaggatctgacaggactgagattaggaggagggaagtgaggctgaattgaataagtatggggatgaatccttcttatttaaatttttgatacattgtccatcatagactttttacattaattgtgattttttaaaaatgttgcattaaaatagtatttatcttggttactgggttttttggcactccttaaattttgtgcccaaggtgagtgctttgctcacctcaccctagttacgtccctgtttctgtgatttgaacactagcgagaacaccactgtgtgcgcctccacccccatcacacaccaaacaacaggtggctcagacaccctgaatttgcacagctcacctagctttcctaatttaggccttcatatcatagaatggtggcctggaccaataggaatgaaaacagaccaggggttttcccagagaataaagccggaaaagttttgattctccactggactgctgtgtttggatttgatctgttgttagattctagttaacacttttgtttttaaaaactaaggacaaatgaacaaaaaaccttgtatcatgtttgtttttatttataagttagccaatcccaattccgtttgctttattttcaaataaaaaaagatggaaattttgaggggtggtctaggggtgaatatggtaaaatggggctttaggccttatagctttttattaagaaataaattattttttttatttgggagggtaactatttattgaggcattgaaaaacctctccattctaaggatgagagaccctgagacaatggatattttttataggagatagtgaagtttgttttgcttcattctttcggggagggtcttggtgggatggggggaggtgaaggaataatgcctgggaaattaatatagattcagcttggtttgtggtattttgggaagatgagggaatagaagaggcaagcccatgtcgttactgggttggggagaaggaaagaaggggcatatggcctgcactcgaaatgggcagaaaaattccttagttaaggaggggtgtgtgagtgaagggggaaggtagaccctttaaccccaagtgagggatgatatcatctctcaggcttaaatttaagtgcacttagttcctttaatccagggcaactggggtacctactgaagtttttaatggagaggggagattttcagggttcttgtttttccctttttgatgttagacagtgctactccctccctgctgtgctctctgccccatctccaatggagtaagtattactgtaggataggcctccgcttctcccttaacctatgctgcatttattgaaagttacaagatttaaccagaagtttttcctccatactggtttttatcaacaaaataaaaagattatatccaaaaaaattt

SEQ ID NO: 312173 - DNA, 5526 bp, Homo sapiens
gggcaaaaagccactgggggaggccagtcccgatcagtcctttctggctccagctccagatcccgtgcggagcaacagctgcggtggaggcctgaattttgatctatgttctaccatacatccagctggctgaaagtacttgaggatcacatgaccctggacatggatgctgttctgtcagattttgtccgttccacaggagcagagccagggctagcgcgagatctcctagaaggaaagaattgggatgtgaatgccgccctcagtgattttgaacagctacgtcaagtccatgctggaaacctacccccatcctttagtgaggggagtggtggctccaggacccctgaaaaagggttttctgacagagagcctactcgccctccccgacccatcctccagcggcaggatgacatcgttcaagaaaaacgcctgtctaggggcatctcccacgccagctccagcattgtttccctggcccggtcccatgtctcctccaatggtgggggtggggggagcaatgagcaccccctggaaatgcccatctgtgccttccagcttccagatctcactgtatacaatgaagacttccgcagcttcatagagagagacctcattgagcagtccatgctggttgccttggaacaggcagggcgtttgaactggtgggtgagtgtggatcccacctctcagaggctgcttcctttggcaactactggagatgggaactgcctcctgcatgcagcctcccttggaatgtggggtttccatgatcgggacttgatgctgcggaaagctttgtatgcactgatggagaagggagttgagaaggaagcgttgaaaaggcgctggaggtggcagcagacacagcagaataaagagtcagggctggtatacacagaagatgaatggcagaaggagtggaatgaactgatcaagcttgcctcaagtgaaccccgaatgcatctaggtaccaatggagccaactgtggtggggtggagagttctgaggagcctgtatatgagagccttgaagagtttcacgtctttgtccttgctcatgtgcttaggaggcccatagtcgtcgtggcagacaccatgctgagggactccggaggggaagcatttgcccctattccctttggaggaatctatctgcctttggaggtcccagccagccagtgtcaccgctcccctctggtgctcgcctatgatcaggcccacttttctgcactcgtgtccatggagcagaaggagaataccaaggaacaagctgtgatcccacttacagattcagagtataagctgctgcccttgcactttgctgtggaccctggaaagggctgggagtggggcaaagatgatagtgacaatgtccgattggccagtgtaattctgtccctagaggtcaaattgcatctgctgcatagctacatgaatgtgaagtggatcccactgtcctctgatgcacaggctcctctggcccagcctgagtcccccaccgcctcagctggagatgagccccggtccactcctgagtctggagactcagacaaggagtcagttggcagcagttccaccagcaacgagggcggccggcggaaggagaagtcaaagcgagatcgggagaaggacaagaagagagcagattctgtggctaacaaactgggcagctttggcaaaaccttgggcagcaagctcaagaagaacatggggggcctgatgcacagcaagggttcaaagcctggaggggtggggacagggttgggaggaagcagcggcactgagacactggagaagaagaagaaaaactcactgaagagctggaagggtggcaaggaggaggcagctggggatgggcctgtgtctgagaagcccccagctgagtctgttggtaacggagggagcaagtatagccaggaggtgatgcagagcctgagcattctgaggactgccatgcaaggggaggggaagtttatttttgttggaaccctgaagatgggtcaccgtcaccagtatcaggaggaaatgatccagcgctacctttctgatgctgaggagagattcctggcagaacagaagcagaaggaggcagagaggaagatcatgaatggaggaatagggggtggccctcctccagccaaaaagccagagccagatgctagggaagagcagccgaccggtcccccagcagagtccagggcaatggcattttccactggctaccctggggactttactatccctcggccgtctgggggcggagtccactgccaggaaccccggaggcagttggcagggggtccatgtgtcgggggcctaccaccatatgccaccttccccagaagtcttggggaggaatgggcaaaggaggttctcagtcaataaaaccaaagttctttaggttgggaaaaagcacatggtggagtgagaagtgtggaggggaagtgggaaattggacacatttgctattgatttgaattaagctagaaattaaggttggataaattcttccccttgaaggatctggaaagacaaggcagtaatgtgtcctcatgggtgcctgttaggaggtgggggtagtttaaatccgtttgtttagatgggaaagggaggaacttaagagggaaatccttttcctcttaaggtttatttccttccaagcagtcatatgtcatctgttacagtttgagaagagattgctgattaccccctgtcttttcctcatctaagtctttaattgtatttgtttaaagggaagagtgtggtgagaacagccgtcatgtgtgttgcattttctccaggtgaattggggcagagctgatctattttttaaccacagcaataaccatacgttggggtttgagtgcaccttgggaggggtgggaggacagacattttagccagaggctgtttcaaacaaaaccaaaaacctaagtagagcattacaggcctctgtggctgctgcgtttctgtagaaagcaacttattttattgacttttttttttaaggaaaagaaataaaaagaccccagcaagcaaaaacatttaaaaaatgattttttttcctcctacttaagtggttctttctccctttgctctacttttggagaatgaacttaacatcccggcttcttttgttaagccatagctgaccttaatctgtggttagtttattaaaataattaaaaatactttctaagaagagatatttttgatattaggactgatgttgaaacatataggggcaatttataaaaaggtagttagagaaatatattttagtgaactataaccacagagcacagatgactcccaatgagctgatctgtctttaggtttctccctttccctgacccttccctgttctctaggggctgggagtggggatgcggacacagtagggggagctccttcgcattttgcacaaagcacaagtctgaacagcctatgctctggccagagccatttctaagagctttaaaccggaagacctatcctgggccaattttcctttttctttatatttttttccgggaaaaaaagtcaactatgcaattgtatacactcccgggtgcatgtgaagaaggggaataagtgtacttatgtgtccagagtattaactggggctgtttttctgtgtttggatttctcttttgaggtatgtactcataacccatcccttggaacgtaatccccacatttgatctaaagcacttgagcgtgcatgcatgtgcgtgcgtgcatatgtgtgtgtgttttcctcctcggtagccagtcaagattgtccttgttggaaatgctcacggtttataaaggttattttctcctcaacaaactcagaagtcacctattttccaaatctgatttaataatttcctatggctattaattcttagggttttctttgaaaatagatttgtgttaaggaagcagtgagattccaaaggaagggatgtgtatatgtctaggcaggtctggaacctggtatgagatgagcactcccctaagttgcaaaatttaagggttactataaaactcattaatcaagatactataaaaaatgcagtatttaaaaaaattaatgcaaaaaatttatgttggataaaatagcgaaatcttacaggatctgacaggactgagattaggaggagggaagtgaggctgaattgaataagtatggggatgaatccttcttatttaaatttttgatacattgtccatcatagactttttacattaattgtgattttttaaaaatgttgcattaaaatagtatttatcttggttactgggttttttggcactccttaaattttgtgcccaaggtgagtgctttgctcacctcaccctagttacgtccctgtttctgtgatttgaacactagcgagaacaccactgtgtgcgcctccacccccatcacacaccaaacaacaggtggctcagacaccctgaatttgcacagctcacctagctttcctaatttaggccttcatatcatagaatggtggcctggaccaataggaatgaaaacagaccaggggttttcccagagaataaagccggaaaagttttgattctccactggactgctgtgtttggatttgatctgttgttagattctagttaacacttttgtttttaaaaactaaggacaaatgaacaaaaaaccttgtatcatgtttgtttttatttataagttagccaatcccaattccgtttgctttattttcaaataaaaaaagatggaaattttgaggggtggtctaggggtgaatatggtaaaatggggctttaggccttatagctttttattaagaaataaattattttttttatttgggagggtaactatttattgaggcattgaaaaacctctccattctaaggatgagagaccctgagacaatggatattttttataggagatagtgaagtttgttttgcttcattctttcggggagggtcttggtgggatggggggaggtgaaggaataatgcctgggaaattaatatagattcagcttggtttgtggtattttgggaagatgagggaatagaagaggcaagcccatgtcgttactgggttggggagaaggaaagaaggggcatatggcctgcactcgaaatgggcagaaaaattccttagttaaggaggggtgtgtgagtgaagggggaaggtagaccctttaaccccaagtgagggatgatatcatctctcaggcttaaatttaagtgcacttagttcctttaatccagggcaactggggtacctactgaagtttttaatggagaggggagattttcagggttcttgtttttccctttttgatgttagacagtgctactccctccctgctgtgctctctgccccatctccaatggagtaagtattactgtaggataggcctccgcttctcccttaacctatgctgcatttattgaaagttacaagatttaaccagaagtttttcctccatactggtttttatcaacaaaataaaaagattatatccaaaaaaattt

SEQ ID NO: 312174 - DNA, 3098 bp, Homo sapiens
gggcaaaaagccactgggggaggccagtcccgatcagtcctttctggctccagctccagatcccgtgcggagcaacagctgcggtggaggcctgaattttgatctatgttctaccatacatccagctggctgaaagtacttgaggatcacatgaccctggacatggatgctgttctgtcagattttgtccgttccacaggagcagagccagggctagcgcgagatctcctagaaggaaagaattgggatgtgaatgccgccctcagtgattttgaacagctacgtcaagtccatgctggaaacctacccccatcctttagtgaggggagtggtggctccaggacccctgaaaaagggttttctgacagagagcctactcgccctccccgacccatcctccagcggcaggatgacatcgttcaagaaaaacgcctgtctaggggcatctcccacgccagctccagcattgtttccctggcccggtcccatgtctcctccaatggtgggggtggggggagcaatgagcaccccctggaaatgcccatctgtgccttccagcttccagatctcactgtatacaatgaagacttccgcagcttcatagagagagacctcattgagcagtccatgctggttgccttggaacaggcagggcgtttgaactggtgggtgagtgtggatcccacctctcagaggctgcttcctttggcaactactggagatgggaactgcctcctgcatgcagcctcccttggaatgtggggtttccatgatcgggacttgatgctgcggaaagctttgtatgcactgatggagaagggagttgagaaggaagcgttgaaaaggcgctggaggtggcagcagacacagcagaataaagagtcagggctggtatacacagaagatgaatggcagaaggagtggaatgaactgatcaagcttgcctcaagtgaaccccgaatgcatctaggtaccaatggagccaactgtggtggggtggagagttctgaggagcctgtatatgagagccttgaagagtttcacgtctttgtccttgctcatgtgcttaggaggcccatagtcgtcgtggcagacaccatgctgagggactccggaggggaagcatttgcccctattccctttggaggaatctatctgcctttggaggtcccagccagccagtgtcaccgctcccctctggtgctcgcctatgatcaggcccacttttctgcactcgtgtccatggagcagaaggagaataccaaggaacaagctgtgatcccacttacagattcagagtataagctgctgcccttgcactttgctgtggaccctggaaagggctgggagtggggcaaagatgatagtgacaatgtccgattggccagtgtaattctgtccctagaggtcaaattgcatctgctgcatagctacatgaatgtgaagtggatcccactgtcctctgatgcacaggctcctctggcccagcctgagtcccccaccgcctcagctggagatgagccccggtccactcctgagtctggagactcagacaaggagtcagttggcagcagttccaccagcaacgagggcggccggcggaaggagaagtcaaagcgagatcgggagaaggacaagaagagagcagattctgtggctaacaaactgggcagctttggcaaaaccttgggcagcaagctcaagaagaacatggggggcctgatgcacagcaagggttcaaagcctggaggggtggggacagggttgggaggaagcagcggcactgagacactggagaagaagaagaaaaactcactgaagagctggaagggtggcaaggaggaggcagctggggatgggcctgtgtctgagaagcccccagctgagtctgttggtaacggagggagcaagtatagccaggaggtgatgcagagcctgagcattctgaggactgccatgcaaggggaggggaagtttatttttgttggaaccctgaagatgggtcaccgtcaccagtatcaggaggaaatgatccagcgctacctttctgatgctgaggagagattcctggcagaacagaagcagaaggaggcagagaggaagatcatgaatggaggaatagggggtggccctcctccagccaaaaagccagagccagatgctagggaagagcagccgaccggtcccccagcagagtccagggcaatggcattttccactggctaccctggggactttactatccctcggccgtctgggggcggagtccactgccaggaaccccggaggcagttggcagggggtccatgtgtcgggggcctaccaccatatgccaccttccccagacagtgccctcctgggcgaccctacccccaccaggacagcatcccttctctggagccaggcagccactctaaggatggacttcacaggggtgccttgttaccacccccctaccgagtggctgattcctatagcaatggctacagagagccccctgagccagatggatgggctggaggtctccggggccttcccccaactcagaccaaatgcaaacaaccgaactgcagcttctatggacaccctgagacaaacaacttctgttcctgttgttacagggaagaactgaggaggagggagcgggaaccggatggggagctcctggtgcacaggttctgaacgggtggaacactgaagggcaaggaggctaaacaaagttaagctcaactaattggctcatcaagaacacagtccccatgttgagggggaaaatgcagtaatgtttgtgggagcctggctggaaacttttaagtgtgtgcacacaggagtgctgccaggctggcaagagcaggtcggggctggatggcacctcaggggctgtactattcctctgcagagcttgacttgatgaggtttgaggtacaaggggaaaagatggcgattctgtcttataacctcctgggtcccatccagggacctaagagaaagtagcaggggaaggtttggtgtgtgggggtgggaggtgggcagaagtcttggggaggaatgggcaaaggaggttctcagtcaataaaaccaaagttctttaggttggg

SEQ ID NO: 312175 - DNA, 454 bp, Homo sapiens
gcagttgggattagttgacagggcttcttaggaaagaattattaaacatgttggaatgaaagcagggagggactcacttggcagagtgggatgtagggattgtccactaggcagaaacacagccttcataataatcttcatggcttcctgcagcatttgcccctattccctttggaggaatctatctgcctttggaggtcccagccagccagtgtcaccgctcccctctggtgctcgcctatgatcaggcccacttttctgcactcgtgtccatggagcagaaggagaataccaaggaacaaggtgctgaatgacatgtcttttggtctgcattattttcacttgaaaaaattgaatgagatctaatgtaggaggaaagaattaagtgacatgcaagcccagacagcacatgttgatactgttttattaagccagaagttacgccagagttttc

SEQ ID NO: 312176 - DNA, 612 bp, Homo sapiens
aggtaggtgaaatgttatgtggcaggtgggtgagcaggatggagggcagaaatgggacagattgcagtaggtcaaaaagaatggatgataaagaagtttaatagtcatagactattagttcatggatcttgactgtaaaagagataagagatttgactttgtagtacaatttgtaaaccaagtgctaagggattagggagtaagtaacagtgaataaggtggaataggtattgcctcttagaacccagcctctaattgcccaatgtcccctgcctgtccttcacacagtcagggctggtatacacagaagatgaatggcagaaggagtggaatgaactgatcaagcttgcctcaagtgaaccccgaatgcatctaggtaccaatggagccaactgtggtgggtaagtatggctaagtaggggaggaggaaacctgcatagagtcctcactgggcttccacagcccagtgtctagagagctctgtgctaagaggatattagaaggaaagaggggaactatgctaagggcacaaaagtgtgtaacaacatgatatgtttaggaactacaggtagttcggtattgaactggaatataaagtagcccatctagact

SEQ ID NO: 312177 - DNA, 363 bp, Homo sapiens
tcactgatctaaccaattgtgctcacaagattctgactgactagatataagtgaggaagatataaagagtaatcaagtgatggttttattctgggtaggcctcctagaggaggctgctttggagtctgtttcagaaataggaaggtggaagggcttcatggataatctccttttcctccactatcttgtttctacagggcgtttgaactggtgggtgagtgtggatcccacctctcagaggctgcttcctttggcaactactggagatgggaactgcctcctgcatgcagcctcccttggtgagtcttgaaagcagtcctccattcacctgcagaaaggaagcagttgagtcaaatctcatgt

SEQ ID NO: 312178 - DNA, 6263 bp, Homo sapiens
ccaccgcctccacctccatcgccgtcgggggaggggccggccggaccccggggtcactgccgaggaatgaagagaggcggccgggccccgcgctccgccccggcctagggccttgccccgggagcccgcgaggtggaggcctgaattttgatctatgttctaccatacatccagctggctgaaagtacttgaggatcacatgaccctggacatggatgctgttctgtcagattttgtccgttccacaggagcagagccagggctagcgcgagatctcctagaaggaaagaattgggatgtgaatgccgccctcagtgattttgaacagctacgtcaagtccatgctggaaacctacccccatcctttagtgaggggagtggtggctccaggacccctgaaaaagggttttctgacagagagcctactcgccctccccgacccatcctccagcggcaggatgacatcgttcaagaaaaacgcctgtctaggggcatctcccacgccagctccagcattgtttccctggcccggtcccatgtctcctccaatggtgggggtggggggagcaatgagcaccccctggaaatgcccatctgtgccttccagcttccagatctcactgtatacaatgaagacttccgcagcttcatagagagagacctcattgagcagtccatgctggttgccttggaacaggcagggcgtttgaactggtgggtgagtgtggatcccacctctcagaggctgcttcctttggcaactactggagatgggaactgcctcctgcatgcagcctcccttggaatgtggggtttccatgatcgggacttgatgctgcggaaagctttgtatgcactgatggagaagggagttgagaaggaagcgttgaaaaggcgctggaggtggcagcagacacagcagaataaagagtcagggctggtatacacagaagatgaatggcagaaggagtggaatgaactgatcaagcttgcctcaagtgaaccccgaatgcatctaggtaccaatggagccaactgtggtggggtggagagttctgaggagcctgtatatgagagccttgaagagtttcacgtctttgtccttgctcatgtgcttaggaggcccatagtcgtcgtggcagacaccatgctgagggactccggaggggaagcatttgcccctattccctttggaggaatctatctgcctttggaggtcccagccagccagtgtcaccgctcccctctggtgctcgcctatgatcaggcccacttttctgcactcgtgtccatggagcagaaggagaataccaaggaacaagctgtgatcccacttacagattcagagtataagctgctgcccttgcactttgctgtggaccctggaaagggctgggagtggggcaaagatgatagtgacaatgtccgattggccagtgtaattctgtccctagaggtcaaattgcatctgctgcatagctacatgaatgtgaagtggatcccactgtcctctgatgcacaggctcctctggcccagcctgagtcccccaccgcctcagctggagatgagccccggtccactcctgagtctggagactcagacaaggagtcagttggcagcagttccaccagcaacgagggcggccggcggaaggagaagtcaaagcgagatcgggagaaggacaagaagagagcagattctgtggctaacaaactgggcagctttggcaaaaccttgggcagcaagctcaagaagaacatggggggcctgatgcacagcaagggttcaaagcctggaggggtggggacagggttgggaggaagcagcggcactgagacactggagaagaagaagaaaaactcactgaagagctggaagggtggcaaggaggaggcagctggggatgggcctgtgtctgagaagcccccagctgagtctgttggtaacggagggagcaagtatagccaggaggtgatgcagagcctgagcattctgaggactgccatgcaaggggaggggaagtttatttttgttggaaccctgaagatgggtcaccgtcaccagtatcaggaggaaatgatccagcgctacctttctgatgctgaggagagattcctggcagaacagaagcagaaggaggcagagaggaagatcatgaatggaggaatagggggtggccctcctccagccaaaaagccagagccagatgctagggaagagcagccgaccggtcccccagcagagtccagggcaatggcattttccactggctaccctggggactttactatccctcggccgtctgggggcggagtccactgccaggaaccccggaggcagttggcagggggtccatgtgtcgggggcctaccaccatatgccaccttccccagacagtgccctcctgggcgaccctacccccaccaggacagcatcccttctctggagccaggcagccactctaaggatggacttcacaggggtgccttgttaccacccccctaccgagtggctgattcctatagcaatggctacagagagccccctgagccagatggatgggctggaggtctccggggccttcccccaactcagaccaaatgcaaacaaccgaactgcagcttctatggacaccctgagacaaacaacttctgttcctgttgttacagggaagaactgaggaggagggagcgggaaccggatggggagctcctggtgcacaggttctgaacgggtggaacactgaagggcaaggaggctaaacaaagttaagctcaactaattggctcatcaagaacacagtccccatgttgagggggaaaatgcagtaatgtttgtgggagcctggctggaaacttttaagtgtgtgcacacaggagtgctgccaggctggcaagagcaggtcggggctggatggcacctcaggggctgtactattcctctgcagagcttgacttgatgaggtttgaggtacaaggggaaaagatggcgattctgtcttataacctcctgggtcccatccagggacctaagagaaagtagcaggggaaggtttggtgtgtgggggtgggaggtgggcagaagtcttggggaggaatgggcaaaggaggttctcagtcaataaaaccaaagttctttaggttgggaaaaagcacatggtggagtgagaagtgtggaggggaagtgggaaattggacacatttgctattgatttgaattaagctagaaattaaggttggataaattcttccccttgaaggatctggaaagacaaggcagtaatgtgtcctcatgggtgcctgttaggaggtgggggtagtttaaatccgtttgtttagatgggaaagggaggaacttaagagggaaatccttttcctcttaaggtttatttccttccaagcagtcatatgtcatctgttacagtttgagaagagattgctgattaccccctgtcttttcctcatctaagtctttaattgtatttgtttaaagggaagagtgtggtgagaacagccgtcatgtgtgttgcattttctccaggtgaattggggcagagctgatctattttttaaccacagcaataaccatacgttggggtttgagtgcaccttgggaggggtgggaggacagacattttagccagaggctgtttcaaacaaaaccaaaaacctaagtagagcattacaggcctctgtggctgctgcgtttctgtagaaagcaacttattttattgacttttttttttaaggaaaagaaataaaaagaccccagcaagcaaaaacatttaaaaaatgattttttttcctcctacttaagtggttctttctccctttgctctacttttggagaatgaacttaacatcccggcttcttttgttaagccatagctgaccttaatctgtggttagtttattaaaataattaaaaatactttctaagaagagatatttttgatattaggactgatgttgaaacatataggggcaatttataaaaaggtagttagagaaatatattttagtgaactataaccacagagcacagatgactcccaatgagctgatctgtctttaggtttctccctttccctgacccttccctgttctctaggggctgggagtggggatgcggacacagtagggggagctccttcgcattttgcacaaagcacaagtctgaacagcctatgctctggccagagccatttctaagagctttaaaccggaagacctatcctgggccaattttcctttttctttatatttttttccgggaaaaaaagtcaactatgcaattgtatacactcccgggtgcatgtgaagaaggggaataagtgtacttatgtgtccagagtattaactggggctgtttttctgtgtttggatttctcttttgaggtatgtactcataacccatcccttggaacgtaatccccacatttgatctaaagcacttgagcgtgcatgcatgtgcgtgcgtgcatatgtgtgtgtgttttcctcctcggtagccagtcaagattgtccttgttggaaatgctcacggtttataaaggttattttctcctcaacaaactcagaagtcacctattttccaaatctgatttaataatttcctatggctattaattcttagggttttctttgaaaatagatttgtgttaaggaagcagtgagattccaaaggaagggatgtgtatatgtctaggcaggtctggaacctggtatgagatgagcactcccctaagttgcaaaatttaagggttactataaaactcattaatcaagatactataaaaaatgcagtatttaaaaaaattaatgcaaaaaatttatgttggataaaatagcgaaatcttacaggatctgacaggactgagattaggaggagggaagtgaggctgaattgaataagtatggggatgaatccttcttatttaaatttttgatacattgtccatcatagactttttacattaattgtgattttttaaaaatgttgcattaaaatagtatttatcttggttactgggttttttggcactccttaaattttgtgcccaaggtgagtgctttgctcacctcaccctagttacgtccctgtttctgtgatttgaacactagcgagaacaccactgtgtgcgcctccacccccatcacacaccaaacaacaggtggctcagacaccctgaatttgcacagctcacctagctttcctaatttaggccttcatatcatagaatggtggcctggaccaataggaatgaaaacagaccaggggttttcccagagaataaagccggaaaagttttgattctccactggactgctgtgtttggatttgatctgttgttagattctagttaacacttttgtttttaaaaactaaggacaaatgaacaaaaaaccttgtatcatgtttgtttttatttataagttagccaatcccaattccgtttgctttattttcaaataaaaaaagatggaaattttgaggggtggtctaggggtgaatatggtaaaatggggctttaggccttatagctttttattaagaaataaattattttttttatttgggagggtaactatttattgaggcattgaaaaacctctccattctaaggatgagagaccctgagacaatggatattttttataggagatagtgaagtttgttttgcttcattctttcggggagggtcttggtgggatggggggaggtgaaggaataatgcctgggaaattaatatagattcagcttggtttgtggtattttgggaagatgagggaatagaagaggcaagcccatgtcgttactgggttggggagaaggaaagaaggggcatatggcctgcactcgaaatgggcagaaaaattccttagttaaggaggggtgtgtgagtgaagggggaaggtagaccctttaaccccaagtgagggatgatatcatctctcaggcttaaatttaagtgcacttagttcctttaatccagggcaactggggtacctactgaagtttttaatggagaggggagattttcagggttcttgtttttccctttttgatgttagacagtgctactccctccctgctgtgctctctgccccatctccaatggagtaagtattactgtaggataggcctccgcttctcccttaacctatgctgcatttattgaaagttacaagatttaaccagaagtttttcctccatactggtttttatcaacaaaataaaaagattatatccaaaaaaattt

SEQ ID NO: 312179 - DNA, 5493 bp, Homo sapiens
gaggtatcttaccattatgcttttttgccacaggaatgtggggtttccatgatcgggacttgatgctgcggaaagctttgtatgcactgatggagaagggagttgagaaggaagcgttgaaaaggcgctggaggtggcagcagacacagcagaataaagagtcagggctggtatacacagaagatgaatggcagaaggagtggaatgaactgatcaagcttgcctcaagtgaaccccgaatgcatctaggtaccaatggagccaactgtggtggggtggagagttctgaggagcctgtatatgagagccttgaagagtttcacgtctttgtccttgctcatgtgcttaggaggcccatagtcgtcgtggcagacaccatgctgagggactccggaggggaagcatttgcccctattccctttggaggaatctatctgcctttggaggtcccagccagccagtgtcaccgctcccctctggtgctcgcctatgatcaggcccacttttctgcactcgtgtccatggagcagaaggagaataccaaggaacaagctgtgatcccacttacagattcagagtataagctgctgcccttgcactttgctgtggaccctggaaagggctgggagtggggcaaagatgatagtgacaatgtccgattggccagtgtaattctgtccctagaggtcaaattgcatctgctgcatagctacatgaatgtgaagtggatcccactgtcctctgatgcacaggctcctctggcccagcctgagtcccccaccgcctcagctggagatgagccccggtccactcctgagtctggagactcagacaaggagtcagttggcagcagttccaccagcaacgagggcggccggcggaaggagaagtcaaagcgagatcgggagaaggacaagaagagagcagattctgtggctaacaaactgggcagctttggcaaaaccttgggcagcaagctcaagaagaacatggggggcctgatgcacagcaagggttcaaagcctggaggggtggggacagggttgggaggaagcagcggcactgagacactggagaagaagaagaaaaactcactgaagagctggaagggtggcaaggaggaggcagctggggatgggcctgtgtctgagaagcccccagctgagtctgttggtaacggagggagcaagtatagccaggaggtgatgcagagcctgagcattctgaggactgccatgcaaggggaggggaagtttatttttgttggaaccctgaagatgggtcaccgtcaccagtatcaggaggaaatgatccagcgctacctttctgatgctgaggagagattcctggcagaacagaagcagaaggaggcagagaggaagatcatgaatggaggaatagggggtggccctcctccagccaaaaagccagagccagatgctagggaagagcagccgaccggtcccccagcagagtccagggcaatggcattttccactggctaccctggggactttactatccctcggccgtctgggggcggagtccactgccaggaaccccggaggcagttggcagggggtccatgtgtcgggggcctaccaccatatgccaccttccccagacagtgccctcctgggcgaccctacccccaccaggacagcatcccttctctggagccaggcagccactctaaggatggacttcacaggggtgccttgttaccacccccctaccgagtggctgattcctatagcaatggctacagagagccccctgagccagatggatgggctggaggtctccggggccttcccccaactcagaccaaatgcaaacaaccgaactgcagcttctatggacaccctgagacaaacaacttctgttcctgttgttacagggaagaactgaggaggagggagcgggaaccggatggggagctcctggtgcacaggttctgaacgggtggaacactgaagggcaaggaggctaaacaaagttaagctcaactaattggctcatcaagaacacagtccccatgttgagggggaaaatgcagtaatgtttgtgggagcctggctggaaacttttaagtgtgtgcacacaggagtgctgccaggctggcaagagcaggtcggggctggatggcacctcaggggctgtactattcctctgcagagcttgacttgatgaggtttgaggtacaaggggaaaagatggcgattctgtcttataacctcctgggtcccatccagggacctaagagaaagtagcaggggaaggtttggtgtgtgggggtgggaggtgggcagaagtcttggggaggaatgggcaaaggaggttctcagtcaataaaaccaaagttctttaggttgggaaaaagcacatggtggagtgagaagtgtggaggggaagtgggaaattggacacatttgctattgatttgaattaagctagaaattaaggttggataaattcttccccttgaaggatctggaaagacaaggcagtaatgtgtcctcatgggtgcctgttaggaggtgggggtagtttaaatccgtttgtttagatgggaaagggaggaacttaagagggaaatccttttcctcttaaggtttatttccttccaagcagtcatatgtcatctgttacagtttgagaagagattgctgattaccccctgtcttttcctcatctaagtctttaattgtatttgtttaaagggaagagtgtggtgagaacagccgtcatgtgtgttgcattttctccaggtgaattggggcagagctgatctattttttaaccacagcaataaccatacgttggggtttgagtgcaccttgggaggggtgggaggacagacattttagccagaggctgtttcaaacaaaaccaaaaacctaagtagagcattacaggcctctgtggctgctgcgtttctgtagaaagcaacttattttattgacttttttttttaaggaaaagaaataaaaagaccccagcaagcaaaaacatttaaaaaatgattttttttcctcctacttaagtggttctttctccctttgctctacttttggagaatgaacttaacatcccggcttcttttgttaagccatagctgaccttaatctgtggttagtttattaaaataattaaaaatactttctaagaagagatatttttgatattaggactgatgttgaaacatataggggcaatttataaaaaggtagttagagaaatatattttagtgaactataaccacagagcacagatgactcccaatgagctgatctgtctttaggtttctccctttccctgacccttccctgttctctaggggctgggagtggggatgcggacacagtagggggagctccttcgcattttgcacaaagcacaagtctgaacagcctatgctctggccagagccatttctaagagctttaaaccggaagacctatcctgggccaattttcctttttctttatatttttttccgggaaaaaaagtcaactatgcaattgtatacactcccgggtgcatgtgaagaaggggaataagtgtacttatgtgtccagagtattaactggggctgtttttctgtgtttggatttctcttttgaggtatgtactcataacccatcccttggaacgtaatccccacatttgatctaaagcacttgagcgtgcatgcatgtgcgtgcgtgcatatgtgtgtgtgttttcctcctcggtagccagtcaagattgtccttgttggaaatgctcacggtttataaaggttattttctcctcaacaaactcagaagtcacctattttccaaatctgatttaataatttcctatggctattaattcttagggttttctttgaaaatagatttgtgttaaggaagcagtgagattccaaaggaagggatgtgtatatgtctaggcaggtctggaacctggtatgagatgagcactcccctaagttgcaaaatttaagggttactataaaactcattaatcaagatactataaaaaatgcagtatttaaaaaaattaatgcaaaaaatttatgttggataaaatagcgaaatcttacaggatctgacaggactgagattaggaggagggaagtgaggctgaattgaataagtatggggatgaatccttcttatttaaatttttgatacattgtccatcatagactttttacattaattgtgattttttaaaaatgttgcattaaaatagtatttatcttggttactgggttttttggcactccttaaattttgtgcccaaggtgagtgctttgctcacctcaccctagttacgtccctgtttctgtgatttgaacactagcgagaacaccactgtgtgcgcctccacccccatcacacaccaaacaacaggtggctcagacaccctgaatttgcacagctcacctagctttcctaatttaggccttcatatcatagaatggtggcctggaccaataggaatgaaaacagaccaggggttttcccagagaataaagccggaaaagttttgattctccactggactgctgtgtttggatttgatctgttgttagattctagttaacacttttgtttttaaaaactaaggacaaatgaacaaaaaaccttgtatcatgtttgtttttatttataagttagccaatcccaattccgtttgctttattttcaaataaaaaaagatggaaattttgaggggtggtctaggggtgaatatggtaaaatggggctttaggccttatagctttttattaagaaataaattattttttttatttgggagggtaactatttattgaggcattgaaaaacctctccattctaaggatgagagaccctgagacaatggatattttttataggagatagtgaagtttgttttgcttcattctttcggggagggtcttggtgggatggggggaggtgaaggaataatgcctgggaaattaatatagattcagcttggtttgtggtattttgggaagatgagggaatagaagaggcaagcccatgtcgttactgggttggggagaaggaaagaaggggcatatggcctgcactcgaaatgggcagaaaaattccttagttaaggaggggtgtgtgagtgaagggggaaggtagaccctttaaccccaagtgagggatgatatcatctctcaggcttaaatttaagtgcacttagttcctttaatccagggcaactggggtacctactgaagtttttaatggagaggggagattttcagggttcttgtttttccctttttgatgttagacagtgctactccctccctgctgtgctctctgccccatctccaatggagtaagtattactgtaggataggcctccgcttctcccttaacctatgctgcatttattgaaagttacaagatttaaccagaagtttttcctccatactggtttttatcaacaaaataaaaagattatatccaaaaaaattt

SEQ ID NO: 312180 - DNA, 4659 bp, Homo sapiens
ccaccgcctccacctccatcgccgtcgggggaggggccggccggaccccggggtcactgccgaggaatgaagagaggcggccgggccccgcgctccgccccggcctagggccttgccccgggagcccgcgaggtggaggcctgaattttgatctatgttctaccatacatccagctggctgaaagtacttgaggatcacatgaccctggacatggatgctgttctgtcagattttgtccgttccacaggagcagagccagggctagcgcgagatctcctagaaggaaagaattgggatgtgaatgccgccctcagtgattttgaacagctacgtcaagtccatgctggaaacctacccccatcctttagtgaggggagtggtggctccaggacccctgaaaaagggttttctgacagagagcctactcgccctccccgacccatcctccagcggcaggatgacatcgttcaagaaaaacgcctgtctaggggcatctcccacgccagctccagcattgtttccctggcccggtcccatgtctcctccaatggtgggggtggggggagcaatgagcaccccctggaaatgcccatctgtgccttccagcttccagatctcactgtatacaatgaagacttccgcagcttcatagagagagacctcattgagcagtccatgctggttgccttggaacaggcagggcgtttgaactggtgggtgagtgtggatcccacctctcagaggctgcttcctttggcaactactggagatgggaactgcctcctgcatgcagcctcccttggaatgtggggtttccatgatcgggacttgatgctgcggaaagctttgtatgcactgatggagaagggagttgagaaggaagcgttgaaaaggcgctggaggtggcagcagacacagcagaataaagagtcagggctggtatacacagaagatgaatggcagaaggagtggaatgaactgatcaagcttgcctcaagtgaaccccgaatgcatctaggtaccaatggagccaactgtggtggggtggagagttctgaggagcctgtatatgagagccttgaagagtttcacgtctttgtccttgctcatgtgcttaggaggcccatagtcgtcgtggcagacaccatgctgagggactccggaggggaagcatttgcccctattccctttggaggaatctatctgcctttggaggtcccagccagccagtgtcaccgctcccctctggtgctcgcctatgatcaggcccacttttctgcactcgtgtccatggagcagaaggagaataccaaggaacaagctgtgatcccacttacagattcagagtataagctgctgcccttgcactttgctgtggaccctggaaagggctgggagtggggcaaagatgatagtgacaatgtccgattggccagtgtaattctgtccctagaggtcaaattgcatctgctgcatagctacatgaatgtgaagtggatcccactgtcctctgatgcacaggctcctctggcccagcctgagtcccccaccgcctcagctggagatgagccccggtccactcctgagtctggagactcagacaaggagtcagttggcagcagttccaccagcaacgagggcggccggcggaaggagaagtcaaagcgagatcgggagaaggacaagaagagagcagattctgtggctaacaaactgggcagctttggcaaaaccttgggcagcaagctcaagaagaacatggggggcctgatgcacagcaagggttcaaagcctggaggggtggggacagggttgggaggaagcagcggcactgagacactggagaagaagaagaaaaactcactgaagagctggaagggtggcaaggaggaggcagctggggatgggcctgtgtctgagaagcccccagctgagtctgttggtaacggagggagcaagtatagccaggaggtgatgcagagcctgagcattctgaggactgccatgcaaggggaggggaagtttatttttgttggaaccctgaagatgggtcaccgtcaccagtatcaggaggaaatgatccagcgctacctttctgatgctgaggagagattcctggcagaacagaagcagaaggaggcagagaggaagatcatgaatggaggaatagggggtggccctcctccagccaaaaagccagagccagatgctagggaagagcagccgaccggtcccccagcagagtccagggcaatggcattttccactggctaccctggggactttactatccctcggccgtctgggggcggagtccactgccaggaaccccggaggcagttggcagggggtccatgtgtcgggggcctaccaccatatgccaccttccccagacagtgccctcctgggcgaccctacccccaccaggacagcatcccttctctggagccaggcagccactctaaggatggacttcacaggggtgccttgttaccacccccctaccgagtggctgattcctatagcaatggctacagagagccccctgagccagatggatgggctggaggtctccggggccttcccccaactcagaccaaatgcaaacaaccgaactgcagcttctatggacaccctgagacaaacaacttctgttcctgttgttacagggaagaactgaggaggagggagcgggaaccggatggggagctcctggtgcacaggttctgaacgggtggaacactgaagggcaaggaggctaaacaaagttaagctcaactaattggctcatcaagaacacagtccccatgttgagggggaaaatgcagtaatgtttgtgggagcctggctggaaacttttaagtgtgtgcacacaggagtgctgccaggctggcaagagcaggtcggggctggatggcacctcaggggctgtactattcctctgcagagcttgacttgatgaggtttgaggtacaaggggaaaagatggcgattctgtcttataacctcctgggtcccatccagggacctaagagaaagtagcaggggaaggtttggtgtgtgggggtgggaggtgggcagaagtcttggggaggaatgggcaaaggaggttctcagtcaataaaaccaaagttctttaggttgggaaaaagcacatggtggagtgagaagtgtggaggggaagtgggaaattggacacatttgctattgatttgaattaagctagaaattaaggttggataaattcttccccttgaaggatctggaaagacaaggcagtaatgtgtcctcatgggtgcctgttaggaggtgggggtagtttaaatccgtttgtttagatgggaaagggaggaacttaagagggaaatccttttcctcttaaggtttatttccttccaagcagtcatatgtcatctgttacagtttgagaagagattgctgattaccccctgtcttttcctcatctaagtctttaattgtatttgtttaaagggaagagtgtggtgagaacagccgtcatgtgtgttgcattttctccaggtgaattggggcagagctgatctattttttaaccacagcaataaccatacgttggggtttgagtgcaccttgggaggggtgggaggacagacattttagccagaggctgtttcaaacaaaaccaaaaacctaagtagagcattacaggcctctgtggctgctgcgtttctgtagaaagcaacttattttattgacttttttttttaaggaaaagaaataaaaagaccccagcaagcaaaaacatttaaaaaatgattttttttcctcctacttaagtggttctttctccctttgctctacttttggagaatgaacttaacatcccggcttcttttgttaagccatagctgaccttaatctgtggttagtttattaaaataattaaaaatactttctaagaagagatatttttgatattaggactgatgttgaaacatataggggcaatttataaaaaggtagttagagaaatatattttagtgaactataaccacagagcacagatgactcccaatgagctgatctgtctttaggtttctccctttccctgacccttccctgttctctaggggctgggagtggggatgcggacacagtagggggagctccttcgcattttgcacaaagcacaagtctgaacagcctatgctctggccagagccatttctaagagctttaaaccggaagacctatcctgggccaattttcctttttctttatatttttttccgggaaaaaaagtcaactatgcaattgtatacactcccgggtgcatgtgaagaaggggaataagtgtacttatgtgtccagagtattaactggggctgtttttctgtgtttggatttctcttttgaggtatgtactcataacccatcccttggaacgtaatccccacatttgatctaaagcacttgagcgtgcatgcatgtgcgtgcgtgcatatgtgtgtgtgttttcctcctcggtagccagtcaagattgtccttgttggaaatgctcacggtttattctctggacacataagtacacttattccccttcttcacatgcacccgggagtgtattcaattgcatagttgactttttttcccggaaaaaaatattaatataaaggag

SEQ ID NO: 312181 - DNA, 836 bp, Homo sapiens
gggcaaaaagccactgggggaggccagtcccgatcagtcctttctggctccagctccagatcccgtgcggagcaacagctgcggtggaggcctgaattttgatctatgttctaccatacatccagctggctgaaagtacttgaggatcacatgaccctggacatggatgctgttctgtcagattttgtccgttccacaggagcagagccagggctagcgcgagatctcctagaaggaaagaattgggatgtgaatgccgccctcagtgattttgaacagctacgtcaagtccatgctggaaacctacccccatcctttagtgaggggagtggtggctccaggacccctgaaaaagggttttctgacagagagcctactcgccctccccgacccatcctccagcggcaggatgacatcgttcaagaaaaacgcctgtctaggggcatctcccacgccagctccagcattgtttccctggcccggtcccatgtctcctccaatggtgggggtggggggagcaatgagcaccccctggaaatgcccatctgtgccttccagcttccagatctcactgtatacaatgaagacttccgcagcttcatagagagagacctcattgagcagtccatgctggttgccttggaacaggcagggcgtttgaactggtgggtgagtgtggatcccacctctcagaggctgcttcctttggcaactactggagatgggaactgcctcctgcatgcagcctcccttggtgagtcttgaaagcagtcctccattcacctgcagaaaggaagcagttgagtcaaatctcatgtgtaggacttgatccagat

SEQ ID NO: 312182 - DNA, 2355 bp, Homo sapiens
  misc_feature (851)..(851): n is a, c, g, or t
  misc_feature (1294)..(1294): n is a, c, g, or t
  misc_feature (1796)..(1796): n is a, c, g, or t
aatatttatgtatatttatgtgtgtgtgggataagtgtggatatgtttatacatactcatatgtatgtttgtgtgtgtatctgtctgtgcctgcctccattttcttttgctttagagaggctatacttgaggctgccatcaagagtgagaagtttgaagctggaagagcctgcatgggcccttcttgaactggtgcagcatgtgcagcatgacatcactcaagagttcttgtcagagtgataatgaatgtctggctattgtaaacgggaacaagaaaactatttccagctgtgtgacaaccaagacgacaaaaagcattgcagagaatattattgccacaaggaccctgcttcatctgggtctcagacgacgggaggaggggcattttggagcacgtgtttggcatctgtgaaccttttgttaggtagaaaacaaggcctgaatgaaaggcctttcaaccacttctggagcagagaagataggtagagttactcattataggcaggtttcattgtaggagtattcagtgaggacccccgccttggaagtctgtaatcagcatatgataaggatggtgtgttcttactaagagaataacacaactgaaacagaattgccttttgttaaggggatgctttgccttcttggactacgattgtggggagaaggattattgtcaactaagtgaggcattcattctgtacccactatttattgtagttccacagagaactgcttgctttactttctgactaggcacagaaaagtaaaggttcaaaggctagggcaagatgactgacttttccagatttagcacaatctgttctctggtcactttgagacgctgtcantttagtttcatgcagctgatatcttggagaacttctgtgtccttacgtttggctgaggacactaaatttttttttttttttttttttttttgaggcagagcctcactttattgcccaggctggagtgcaatggcacgatcttggctcactgcctcctgggttcaagcaattctcttgcctcagccttccaagtagctgggaccacaggcgtgcaccaccatgcctggctaattttttttgtattttttggtagagatggggtttcactgtgttggccaggctggtcttgaactcctggcctcaagtgaaccacccgcctcggcctctcaaagtgctgggtttacaggcccaagccaccgtgcctggcctgaggacactaaaattaaaaaaaaattaagaaagtacggtccccgctcttgagtagctcatgaacatggagcganatggactcaaatgattaagatcaggtaggtagtgatgaatacggtaaaccaaggttcaaacaaagagctgtctgcatatctgaggatggagagggtaagtcagccttagaggagggaaatgacttgcagcaggatgccagcctcaatggtctgtggagctcattccatgcagaagagtaatgaggaagacccagtgagtgacaggcttggggaggagtgcctgaaattgacggtttgtggcaggaagtggtgggaccaatctcgaagcttgtggaggtagaagggtactggagactactgtggacaaaaaagggcatgttgatgccattaccagacaggacacgagagcatgatgattgttgcagtgaggcttgttagttttagacatgtctaaaaccatgcaggcagagattttcagctggtggctggcaatttgagtttgaagtttagctgagaagtcagttggcagtattcaggcataattgctaaatgtagaagtaantgccagtaaaatgtgtgtgataagctggagagcacttttagagtgaaaagattgatatattttaacaaggacaaggcttatttcaattctttaggttatttttctttagcagattaaagtagttttatcggttatcaagcatttgttgagcgtttactatggcttctcttgataggtggtcctggggagataggaaggaaatggtgcaaatttcaacaatacccactggggtgaacaaaaaatccctgaaacaccccattccagctattgttatctggaaaaaaatccttacaataattagatggtgatttgacgtctgggggaagttgcagatatagttttaatttactgtaggactagtggcagtgagtctcatattgctgtcatataaaaggtaaaccttccagaagaactttggaaatttcagtagcctaaagaccacgctttgagaaactcgtaaaggtttgtcatagaggttttaaaagtctgatcaaataattttaagctttagttgcctactaaaaagtaggatgcagtacaagtttgtcctttacttggt

SEQ ID NO: 312183 - DNA, 2301 bp, Homo sapiens
  misc_feature (851)..(851): n is a, c, g, or t
  misc_feature (1294)..(1294): n is a, c, g, or t
  misc_feature (1742)..(1742): n is a, c, g, or t
aatatttatgtatatttatgtgtgtgtgggataagtgtggatatgtttatacatactcatatgtatgtttgtgtgtgtatctgtctgtgcctgcctccattttcttttgctttagagaggctatacttgaggctgccatcaagagtgagaagtttgaagctggaagagcctgcatgggcccttcttgaactggtgcagcatgtgcagcatgacatcactcaagagttcttgtcagagtgataatgaatgtctggctattgtaaacgggaacaagaaaactatttccagctgtgtgacaaccaagacgacaaaaagcattgcagagaatattattgccacaaggaccctgcttcatctgggtctcagacgacgggaggaggggcattttggagcacgtgtttggcatctgtgaaccttttgttaggtagaaaacaaggcctgaatgaaaggcctttcaaccacttctggagcagagaagataggtagagttactcattataggcaggtttcattgtaggagtattcagtgaggacccccgccttggaagtctgtaatcagcatatgataaggatggtgtgttcttactaagagaataacacaactgaaacagaattgccttttgttaaggggatgctttgccttcttggactacgattgtggggagaaggattattgtcaactaagtgaggcattcattctgtacccactatttattgtagttccacagagaactgcttgctttactttctgactaggcacagaaaagtaaaggttcaaaggctagggcaagatgactgacttttccagatttagcacaatctgttctctggtcactttgagacgctgtcantttagtttcatgcagctgatatcttggagaacttctgtgtccttacgtttggctgaggacactaaatttttttttttttttttttttttttgaggcagagcctcactttattgcccaggctggagtgcaatggcacgatcttggctcactgcctcctgggttcaagcaattctcttgcctcagccttccaagtagctgggaccacaggcgtgcaccaccatgcctggctaattttttttgtattttttggtagagatggggtttcactgtgttggccaggctggtcttgaactcctggcctcaagtgaaccacccgcctcggcctctcaaagtgctgggtttacaggcccaagccaccgtgcctggcctgaggacactaaaattaaaaaaaaattaagaaagtacggtccccgctcttgagtagctcatgaacatggagcganatggactcaaatgattaagatcaggtaggtagtgatgaatacggtaaaccaaggttcaaacaaagagctgtctgcatatctgaggatggagagggtaagtcagccttagaggagggaaatgacttgcagcaggatgccagcctcaatggtctgtggagctcattccatgcagaagagtaatgaggaagacccagtgagtgacaggcttggggaggagtgcctgaaattgacggtttgtggcaggaagtggtgggaccaatctcgaagcttgtggaggtagaagggtactggagactactgtggacaagcagtgaggcttgttagttttagacatgtctaaaaccatgcaggcagagattttcagctggtggctggcaatttgagtttgaagtttagctgagaagtcagttggcagtattcaggcataattgctaaatgtagaagtaantgccagtaaaatgtgtgtgataagctggagagcacttttagagtgaaaagattgatatattttaacaaggacaaggcttatttcaattctttaggttatttttctttagcagattaaagtagttttatcggttatcaagcatttgttgagcgtttactatggcttctcttgataggtggtcctggggagataggaaggaaatggtgcaaatttcaacaatacccactggggtgaacaaaaaatccctgaaacaccccattccagctattgttatctggaaaaaaatccttacaataattagatggtgatttgacgtctgggggaagttgcagatatagttttaatttactgtaggactagtggcagtgagtctcatattgctgtcatataaaaggtaaaccttccagaagaactttggaaatttcagtagcctaaagaccacgctttgagaaactcgtaaaggtttgtcatagaggttttaaaagtctgatcaaataattttaagctttagttgcctactaaaaagtaggatgcagtacaagtttgtcctttacttggt

SEQ ID NO: 312184 - DNA, 968 bp, Homo sapiens
  misc_feature (794)..(795): n is a, c, g, or t
  misc_feature (798)..(798): n is a, c, g, or t
  misc_feature (811)..(811): n is a, c, g, or t
taaggcacctgctggttgcaggacctcgctttccatctgttcttgttgcaatgccatcttcaagtggcgctagcggcggacccggctgggcagttccttccccagaaggagagattcctctgccatggagtcctacgatgtgatcgccaaccagcctgtcgtgatcgacaacggatccggtgtgattaaagctggttttgctggtgatcagatccccaaatactgctttccaaactatgtgggccgacccaagcacgttcgtgtcatggcaggagcccttgaaggcgacatcttcattggccccaaagctgaggagcaccgagggctgctttcaatccgctatcccatggagcatggcatcgtcaaggattggaacgacatggaacgcatttggcaatatgtctattctaaggaccagctgcagactttctcagaggagcatcctgtgctcctgactgaggcgcctttaaacccacgaaaaaaccgggaacgagctgccgaagttttcttcgagaccttcaatgtgcccgctcttttcatctccatgcaagctgtactcagcctttacgctacaggcaggaccacaggggtggtgctggattctggggatggagtcacccatgctgtgcccatctatgagggctttgccatgccccactccatcatgcgcatcgacatcgcgggccgggacgtctctcgcttcctgcgcctctacctgcgtaaggagggctacgacttccactcatcctctgagtttgagattgtcaaggccataaaagaagagctgtactatnntanaccaaggtgagangtaagacggaaggcagattacgcttgtgggccttgatggctccgtcggccgagtgcttagccattgtggaggaagacaccccgcggtggcccaaaagcgggcgttacgttcggcccgcaggggggcgagaacacaagatgcgagtgggtctatacaa

SEQ ID NO: 312185 - DNA, 2874 bp, Homo sapiens
cgctccctcgccgccctgaaccggcggctagactgcgcatgcgtgtcagtggcgctagcggcggacccggctgggcagttccttccccagaaggagagattcctctgccatggagtcctacgatgtgatcgccaaccagcctgtcgtgatcgacaacggatccggtgtgattaaagctggttttgctggtgatcagatccccaaatactgctttccaaactatgtgggccgacccaagcacgttcgtgtcatggcaggagcccttgaaggcgacatcttcattggccccaaagctgaggagcaccgagggctgctttcaatccgctatcccatggagcatggcatcgtcaaggattggaacgacatggaacgcatttggcaatatgtctattctaaggaccagctgcagactttctcagaggagcatcctgtgctcctgactgaggcgcctttaaacccacgaaaaaaccgggaacgagctgccgaagttttcttcgagaccttcaatgtgcccgctcttttcatctccatgcaagctgtactcagcctttacgctacaggcaggaccacaggggtggtgctggattctggggatggagtcacccatgctgtgcccatctatgagggctttgccatgccccactccatcatgcgcatcgacatcgcgggccgggacgtctctcgcttcctgcgcctctacctgcgtaaggagggctacgacttccactcatcctctgagtttgagattgtcaaggccataaaagaaagagcctgttacctatccataaacccccaaaaggatgagacgctagagacagagaaagctcagtactacctgcctgatggcagcaccattgagattggtccttcccgattccgggcccctgagttgctcttcaggccagatttgattggagaggagagtgaaggcatccacgaggtcctggtgttcgccattcagaagtcagacatggacctgcggcgcacgcttttctctaacattgtcctctcaggaggctctaccctgttcaaaggttttggtgacaggctcctgagtgaagtgaagaaactagctccaaaagatgtgaagatcaggatatctgcacctcaggagagactgtattccacgtggattgggggctccatccttgcctccctggacacctttaagaagatgtgggtctccaaaaaggaatatgaggaagacggtgcccgatccatccacagaaaaaccttctaatgtcgggacatcatcttcacctctctctgaagttaactccactttaaaactcgctttcttgagtcggagtgtttgcgaggaactgcctgtgtgtgagtgcgtgtgtggatatgagtgtgtgcgcacatgcgagtgccgtgtggccctgggaccctgggcccagaaaggacgatgaactacccgcagtggtgatggcctgaggcctggggttgaccactaactggctcctgacagggaagagcgctggcagaggctgtgctccctcctcaggtggcctctggctggctgtgggggactccgtttactaccacagggagacagagggaggtaagccatcccccgggagaccttgctgctgaccatcctaggctgggctggccccaccctcacccccacccccagggtgccctgaggccccaggcagctgctgcctccactatcgatgcctcctgactgcacactgaggactgggactggggttgagttctgtctggttttgttgccattttggtttgggaggctggaaaagcaccccaagagctattacagagactggagtcaggagagagcaggaggccctcatgttcaccagggaacaggaccacaccggccactggaggagggcaggagcagtcctccctctgaatggctgcagagttaatgttcccagcccagtcccctttcgggggccttgggagagtttaaggcacctgctggttccaggacctcgctttccatctgttcttgttgcaatgccatcttcaaaccgttttatttattgaagtgtttgttcagttaggggctggagagagggagcttgctgcctcctgccttgctacactaatgtttacagcacctaagcttagcctccagggccccacctctcccagctgatggtgagctgacagtgtccacaggttccaggaccatttgagattggaagctacactcaaagacactcccaccaggctctttctcccttttcctcttgctcactgccctggaatcaacaggctggttgctggttagattttctgaaacaggaggtaaaatttttctttggcagaggcccctaagcaagggaggggtgttggagagccagtgcccttaagactggagaaagctgcaatttaccaagttgccttttgccactgtagctgaccaggggactaggttgtagaggtgggaaggccccctctgggctgatcttgtgccattcttgaccttggacctgcttggttaaggagggagtgggccagaccagagtgccaggagctaatggagccaggcctgactcctaggagtggtccaaaggccttcagcctagatggtgcaaagctggggccagcctgtcttcaccggcaccctcacctgtgacaccaagacccaccccaatcccagacttcacacagtattctcccccacgccgtcctatgaccaaaggcccctgccaggtgtgggccacagcagcaggtatgtgtgaaagcaacgtagcgccccgcggactgcagtgcgcttaaccaactcacctcccttctcttagcccaagcctgtccctcgcacagcctcgcacaaaccacattgcctggtggggcccagtgtactgaaataaagtcgttccgatagacacgtca

SEQ ID NO: 312186 - DNA, 2894 bp, Homo sapiens
cgctccctcgccgccctgaaccggcggctagactgcgcatgcgtgtcagtggcgctagcggcggacccggctgggcagttccttccccagaaggagagattcctctgccatggagtcctacgatgtgatcgccaaccagcctgtcgtgatcgacaacggatccggtgtgattaaagctggttttgctggtgatcagatccccaaatactgctttccaaactatgtgggccgacccaagcacgttcgtgtcatggcaggagcccttgaaggcgacatcttcattggccccaaagctgaggagcaccgagggctgctttcaatccgctatcccatggagcatggcatcgtcaaggattggaacgacatggaacgcatttggcaatatgtctattctaaggaccagctgcagactttctcagaggagcatcctgtgctcctgactgaggcgcctttaaacccacgaaaaaaccgggaacgagctgccgaagttttcttcgagaccttcaatgtgcccgctcttttcatctccatgcaagctgtactcagcctttacgctacaggcaggaccacaggggtggtgctggattctggggatggagtcacccatgctgtgcccatctatgagggctttgccatgccccactccatcatgcgcatcgacatcgcgggccgggacgtctctcgcttcctgcgcctctacctgcgtaaggagggctacgacttccactcatcctctgagtttgagattgtcaaggccataaaagaaagagcctgttacctatccataaacccccaaaaggatgagacgctagagacagagaaagctcagtactacctgcctgatggcagcaccattgagattggtccttcccgattccgggcccctgagttgctcttcaggccagatttgattggagaggagagtgaaggcatccacgaggtcctggtgttcgccattcagaagtcagacatggacctgcggcgcacgcttttctctaacattgtcctctcaggaggctctaccctgttcaaaggttttggtgacaggctcctgagtgaagtgaagaaactagctccaaaagatgtgaagatcaggatatctgcacctcaggagagactgtattccacgtggattgggggctccatccttgcctccctggacacctttaagaagatgtgggtctccaaaaaggaatatgaggaagacggtgcccgatccatccacagaaaaaccttctaatgtcgggacatcatcttcacctctctctgaagttaactccactttaaaactcgctttcttgagtcggagtgtttgcgaggaactgcctgtgtgtgagtgcgtgtgtggatatgagtgtgtgcgcacatgcgagtgccgtgtggccctgggaccctgggcccagaaaggacgatgaactacccgcagtggtgatggcctgaggcctggggttgaccactaactggctcctgacagggaagagcgctggcagaggctgtgctccctcctcaggtggcctctggctggctgtgggggactccgtttactaccacagggagacagagggaggtaagccatcccccgggagaccttgctgctgaccatcctaggctgggctggccccaccctcacccccacccccagggtgccctgaggccccaggcagctgctgcctccactatcgatgcctcctgactgcacactgaggactgggactggggttgagttctgtctggttttgttgccattttggtttgggaggctggaaaagcaccccaagagctattacagagactggagtcaggagagagcaggaggccctcatgttcaccagggaacaggaccacaccggccactggaggagggcaggagcagtcctccctctgaatggctgcagagttaatgttcccagcccagtcccctttcgggggccttgggagagtttaaggcacctgctggttccaggacctcgctttccatctgttcttgttgcaatgccatcttcaaaccgttttatttattgaagtgtttgttcagttaggggctggagagagggagcttgctgcctcctgccttgctacactaatgtttacagcacctaagcttagcctccagggccccacctctcccagctgatggtgagctgacagtgtccacaggttccaggaccatttgagattggaagctacactcaaagacactcccaccaggctctttctcccttttcctcttgctcactgccctggaatcaacaggctggttgctggttagattttctgaaacaggaggtaaaatttttctttggcagaggcccctaagcaagggaggggtgttggagagccagtgcccttaagactggagaaagctgcaatttaccaagttgccttttgccactgtagctgaccaggggactaggttgtagaggtgggaaggccccctctgggctgatcttgtgccattcttgaccttggacctgcttggttaaggagggagtgggccagaccagagtgccaggagctaatggagccaggcctgactcctaggagtggtccaaaggccttcagcctagatggtgcaaagctggggccagcctgtcttcaccggcaccctcacctgtgacaccaagacccaccccaatcccagacttcacacagtattctcccccacgccgtcctatgaccaaaggcccctgccaggtgtgggccacagcagcaggtatgtgtgaaagcaacgtagcgccccgcggactgcagtgcgcttaaccaactcacctcccttctcttagcccaagcctgtccctcgcacagcctcgcacaaaccacattgcctggtggggcccagtgtactgaaataaagtcgttccgatagacacgtcaaaaaaaaaaaacccgaattc

SEQ ID NO: 312187 - DNA, 2889 bp, Homo sapiens
taaggcacctgctggttgcaggacctcgctttccatctgttcttgttgcaatgccatcttcaagtggcgctagcggcggacccggctgggcagttccttccccagaaggagagattcctctgccatggagtcctacgatgtgatcgccaaccagcctgtcgtgatcgacaacggatccggtgtgattaaagctggttttgctggtgatcagatccccaaatactgctttccaaactatgtgggccgacccaagcacgttcgtgtcatggcaggagcccttgaaggcgacatcttcattggccccaaagctgaggagcaccgagggctgctttcaatccgctatcccatggagcatggcatcgtcaaggattggaacgacatggaacgcatttggcaatatgtctattctaaggaccagctgcagactttctcagaggagcatcctgtgctcctgactgaggcgcctttaaacccacgaaaaaaccgggaacgagctgccgaagttttcttcgagaccttcaatgtgcccgctcttttcatctccatgcaagctgtactcagcctttacgctacaggcaggaccacaggggtggtgctggattctggggatggagtcacccatgctgtgcccatctatgagggctttgccatgccccactccatcatgcgcatcgacatcgcgggccgggacgtctctcgcttcctgcgcctctacctgcgtaaggagggctacgacttccactcatcctctgagtttgagattgtcaaggccataaaagaaagagcctgttacctatccataaacccccaaaaggatgagacgctagagacagagaaagctcagtactacctgcctgatggcagcaccattgagattggtccttcccgattccgggcccctgagttgctcttcaggccagatttgattggagaggagagtgaaggcatccacgaggtcctggtgttcgccattcagaagtcagacatggacctgcggcgcacgcttttctctaacattgtcctctcaggaggctctaccctgttcaaaggttttggtgacaggctcctgagtgaagtgaagaaactagctccaaaagatgtgaagatcaggatatctgcacctcaggagagactgtattccacgtggattgggggctccatccttgcctccctggacacctttaagaagatgtgggtctccaaaaaggaatatgaggaagacggtgcccgatccatccacagaaaaaccttctaatgtcgggacatcatcttcacctctctctgaagttaactccactttaaaactcgctttcttgagtcggagtgtttgcgaggaactgcctgtgtgtgagtgcgtgtgtggatatgagtgtgtgcgcacatgcgagtgccgtgtggccctgggaccctgggcccagaaaggacgatgaactacccgcagtggtgatggcctgaggcctggggttgaccactaactggctcctgacagggaagagcgctggcagaggctgtgctccctcctcaggtggcctctggctggctgtgggggactccgtttactaccacagggagacagagggaggtaagccatcccccgggagaccttgctgctgaccatcctaggctgggctggccccaccctcacccccacccccagggtgccctgaggccccaggcagctgctgcctccactatcgatgcctcctgactgcacactgaggactgggactggggttgagttctgtctggttttgttgccattttggtttgggaggctggaaaagcaccccaagagctattacagagactggagtcaggagagagcaggaggccctcatgttcaccagggaacaggaccacaccggccactggaggagggcaggagcagtcctccctctgaatggctgcagagttaatgttcccagcccagtcccctttcgggggccttgggagagtttaaggcacctgctggttccaggacctcgctttccatctgttcttgttgcaatgccatcttcaaaccgttttatttattgaagtgtttgttcagttaggggctggagagagggagcttgctgcctcctgccttgctacactaatgtttacagcacctaagcttagcctccagggccccacctctcccagctgatggtgagctgacagtgtccacaggttccaggaccatttgagattggaagctacactcaaagacactcccaccaggctctttctcccttttcctcttgctcactgccctggaatcaacaggctggttgctggttagattttctgaaacaggaggtaaaatttttctttggcagaggcccctaagcaagggaggggtgttggagagccagtgcccttaagactggagaaagctgcaatttaccaagttgccttttgccactgtagctgaccaggggactaggttgtagaggtgggaaggccccctctgggctgatcttgtgccattcttgaccttggacctgcttggttaaggagggagtgggccagaccagagtgccaggagctaatggagccaggcctgactcctaggagtggtccaaaggccttcagcctagatggtgcaaagctggggccagcctgtcttcaccggcaccctcacctgtgacaccaagacccaccccaatcccagacttcacacagtattctcccccacgccgtcctatgaccaaaggcccctgccaggtgtgggccacagcagcaggtatgtgtgaaagcaacgtagcgccccgcggactgcagtgcgcttaaccaactcacctcccttctcttagcccaagcctgtccctcgcacagcctcgcacaaaccacattgcctggtggggcccagtgtactgaaataaagtcgttccgatagacacgtca

SEQ ID NO: 312188 - DNA, 2904 bp, Homo sapiens
cgctccctcgccgccctgaaccggcggctagactgcgcatgcgtgtcagtggcgctagcggcggacccggctgggcagttccttccccagaaggagagattcctctgccatggagtcctacgatgtgatcgccaaccagcctgtcgtgatcgacaacggatccggtgtgattaaagctggttttgctggtgatcagatccccaaatactgctttccaaactatgtgggccgacccaagcacgttcgtgtcatggcaggagcccttgaaggcgacatcttcattggccccaaagctgaggagcaccgagggctgctttcaatccgctatcccatggagcatggcatcgtcaaggattggaacgacatggaacgcatttggcaatatgtctattctaaggaccagctgcagactttctcagaggagcatcctgtgctcctgactgaggcgcctttaaacccacgaaaaaaccgggaacgagctgccgaagttttcttcgagaccttcaatgtgcccgctcttttcatctccatgcaagctgtactcagcctttacgctacaggcaggaccacaggggtggtgctggattctggggatggagtcacccatgctgtgcccatctatgagggctttgccatgccccactccatcatgcgcatcgacatcgcgggccgggacgtctctcgcttcctgcgcctctacctgcgtaaggagggctacgacttccactcatcctctgagtttgagattgtcaaggccataaaagaaagagcctgttacctatccataaacccccaaaaggatgagacgctagagacagagaaagctcagtactacctgcctgatggcagcaccattgagattggtccttcccgattccgggcccctgagttgctcttcaggccagatttgattggagaggagagtgaaggcatccacgaggtcctggtgttcgccattcagaagtcagacatggacctgcggcgcacgcttttctctaacattgtcctctcaggaggctctaccctgttcaaaggttttggtgacaggctcctgagtgaagtgaagaaactagctccaaaagatgtgaagatcaggatatctgcacctcaggagagactgtattccacgtggattgggggctccatccttgcctccctggacacctttaagaagatgtgggtctccaaaaaggaatatgaggaagacggtgcccgatccatccacagaaaaaccttctaatgtcgggacatcatcttcacctctctctgaagttaactccactttaaaactcgctttcttgagtcggagtgtttgcgaggaactgcctgtgtgtgagtgcgtgtgtggatatgagtgtgtgcgcacatgcgagtgccgtgtggccctgggaccctgggcccagaaaggacgatgaactacccgcagtggtgatggcctgaggcctggggttgaccactaactggctcctgacagggaagagcgctggcagaggctgtgctccctcctcaggtggcctctggctggctgtgggggactccgtttactaccacagggagacagagggaggtaagccatcccccgggagaccttgctgctgaccatcctaggctgggctggccccaccctcacccccacccccagggtgccctgaggccccaggcagctgctgcctccactatcgatgcctcctgactgcacactgaggactgggactggggttgagttctgtctggttttgttgccattttggtttgggaggctggaaaagcaccccaagagctattacagagactggagtcaggagagagcaggaggccctcatgttcaccagggaacaggaccacaccggccactggaggagggcaggagcagtcctccctctgaatggctgcagagttaatgttcccagcccagtcccctttcgggggccttgggagagtttaaggcacctgctggttccaggacctcgctttccatctgttcttgttgcaatgccatcttcaaaccgttttatttattgaagtgtttgttcagttaggggctggagagagggagcttgctgcctcctgccttgctacactaatgtttacagcacctaagcttagcctccagggccccacctctcccagctgatggtgagctgacagtgtccacaggttccaggaccatttgagattggaagctacactcaaagacactcccaccaggctctttctcccttttcctcttgctcactgccctggaatcaacaggctggttgctggttagattttctgaaacaggaggtaaaatttttctttggcagaggcccctaagcaagggaggggtgttggagagccagtgcccttaagactggagaaagctgcaatttaccaagttgccttttgccactgtagctgaccaggggactaggttgtagaggtgggaaggccccctctgggctgatcttgtgccattcttgaccttggacctgcttggttaaggagggagtgggccagaccagagtgccaggagctaatggagccaggcctgactcctaggagtggtccaaaggccttcagcctagatggtgcaaagctggggccagcctgtcttcaccggcaccctcacctgtgacaccaagacccaccccaatcccagacttcacacagtattctcccccacgccgtcctatgaccaaaggcccctgccaggtgtgggccacagcagcaggtatgtgtgaaagcaacgtagcgccccgcggactgcagtgcgcttaaccaactcacctcccttctcttagcccaagcctgtccctcgcacagcctcgcacaaaccacattgcctggtggggcccagtgtactgaaataaagtcgttccgatagacacgtcaaaaaaaaacacaaaaagaagaagcagcgaa

SEQ ID NO: 312189 - DNA, 2820 bp, Homo sapiens
cgctccctcgccgccctgaaccggcggctagactgcgcatgcgtgtcagtggcgctagcggcggacccggctgggcagttccttccccagaaggagagattcctctgccatggagtcctacgatgtgatcgccaaccagcctgtcgtgatcgacaacggatccggtgtgattaaagctggttttgctggtgatcagatccccaaatactgctttccaaactatgtgggccgacccaagcacgttcgtgtcatggcaggagcccttgaaggcgacatcttcattggccccaaagctgaggagcaccgagggctgctttcaatccgctatcccatggagcatggcatcgtcaaggattggaacgacatggaacgcatttggcaatatgtctattctaaggaccagctgcagactttctcagaggagcatcctgtgctcctgactgaggcgcctttaaacccacgaaaaaaccgggaacgagctgccgaagttttcttcgagaccttcaatgtgcccgctcttttcatctccatgcaagctgtactcagcctttacgctacaggcaggaccacaggggtggtgctggattctggggatggagtcacccatgctgtgcccatctatgagggctttgccatgccccactccatcatgcgcatcgacatcgcgggccgggacgtctctcgcttcctgcgcctctacctgcgtaaggagggctacgacttccactcatcctctgagtttgagattgtcaaggccataaaagaaagagcctgttacctatccataaacccccaaaaggatgagacgctagagacagagaaagctcagtactacctgcctgatggcagcaccattgagattggtccttcccgattccgggcccctgagttgctcttcaggccagatttgattggagaggagagtgaaggcatccacgaggtcctggtgttcgccattcagaagtcagacatggacctgcggcgcacgcttttctctaacattgtcctctcaggaggctctaccctgttcaaaggttttggtgacaggctcctgagtgaagtgaagaaactagctccaaaagatgtgaagatcaggatatctgcacctcaggagagactgtattccacgtggattgggggctccatccttgcctccctggacacctttaagaagatgtgggtctccaaaaaggaatatgaggaagacggtgcccgatccatccacagaaaaaccttctaatgtcgggacatcatcttcacctctctctgaagttaactccactttaaaactcgctttcttgagtcggagtgtttgcgaggaactgcctgtgtgtgagtgcgtgtgtggatatgagtgtgtgcgcacatgcgagtgccgtgtggccctgggaccctgggcccagaaaggacgatgaactacccgcagtggtgatggcctgaggcctggggttgaccactaactggctcctgacagggaagagcgctggcagaggctgtgctccctcctcaggtggcctctggctggctgtgggggactccgtttactaccacagggagacagagggaggtaagccatcccccgggagaccttgctgctgaccatcctaggctgggctggccccaccctcacccccacccccagggtgccctgaggccccaggcagctgctgcctccactatcgatgcctcctgactgcacactgaggactgggactggggttgagttctgtctggttttgttgccattttggtttgggaggctggaaaagcaccccaagagctattacagagactggagtcaggagagagcaggaggccctcatgttcaccagggaacaggaccacaccggccactggaggagggcaggagcagtcctccctctgaatggctgcagagttaatgttcccagcccagtcccctttcgggggccttgggagagtttaaggcacctgctggttccaggacctcgctttccatctgttcttgttgcaatgccatcttcaaaccgttttatttattgaagtgtttgttcagttaggggctggagagagggagcttgctgcctcctgccttgctacactaatgtttacagcacctaagcttagcctccagggccccacctctcccagctgatggtgagctgacagtgtccacaggttccaggaccatttgagattggaagctacactcaaagacactcccaccaggctctttctcccttttcctcttgctcactgccctggaatcaacaggctggttgctggttagattttctgaaacaggaggttgcccttaagactggagaaagctgcaatttaccaagttgccttttgccactgtagctgaccaggggactaggttgtagaggtgggaaggccccctctgggctgatcttgtgccattcttgaccttggacctgcttggttaaggagggagtgggccagaccagagtgccaggagctaatggagccaggcctgactcctaggagtggtccaaaggccttcagcctagatggtgcaaagctggggccagcctgtcttcaccggcaccctcacctgtgacaccaagacccaccccaatcccagacttcacacagtattctcccccacgccgtcctatgaccaaaggcccctgccaggtgtgggccacagcagcaggtatgtgtgaaagcaacgtagcgccccgcggactgcagtgcgcttaaccaactcacctcccttctcttagcccaagcctgtccctcgcacagcctcgcacaaaccacattgcctggtggggcccagtgtactgaaataaagtcgttccgatagacacgtca

SEQ ID NO: 312190 - DNA, 2606 bp, Homo sapiens
cgctccctcgccgccctgaaccggcggctagactgcgcatgcgtgtcagtggcgctagcggcggacccggctgggcagttccttccccagaaggagagattcctctgccatggagtcctacgatgtgatcgccaaccagcctgtcgtgatcgacaacggatccggtgtgattaaagctggttttgctggtgatcagatccccaaatactgctttccaaactatgtgggccgacccaagcacgttcgtgtcatggcaggagcccttgaaggcgacatcttcattggccccaaagctgaggagcaccgagggctgctttcaatccgctatcccatggagcatggcatcgtcaaggattggaacgacatggaacgcatttggcaatatgtctattctaaggaccagctgcagactttctcagaggagcatcctgtgctcctgactgaggcgcctttaaacccacgaaaaaaccgggaacgagctgccgaagttttcttcgagaccttcaatgtgcccgctcttttcatctccatgcaagctgtactcagcctttacgctacaggcaggaccacaggggtggtgctggattctggggatggagtcacccatgctgtgcccatctatgagggctttgccatgccccactccatcatgcgcatcgacatcgcgggccgggacgtctctcgcttcctgcgcctctacctgcgtaaggagggctacgacttccactcatcctctgagtttgagattgtcaaggccataaaagaaagagcctgttacctatccataaacccccaaaaggatgagacgctagagacagagaaagctcagtactacctgcctgatggcagcaccattgagattggtccttcccgattccgggcccctgagttgctcttcaggccagatttgattggagaggagagtgaaggcatccacgaggtcctggtgttcgccattcagaagtcagacatggacctgcggcgcacgcttttctctaacattgtcctctcaggaggctctaccctgttcaaaggttttggtgacaggctcctgagtgaagtgaagaaactagctccaaaagatgtgaagatcaggatatctgcacctcaggagagactgtattccacgtggattgggggctccatccttgcctccctggacacctttaagaagatgtgggtctccaaaaaggaatatgaggaagacggtgcccgatccatccacagaaaaaccttctaatgtcgggacatcatcttcacctctctctgaagttaactccactttaaaactcgctttcttgagtcggagtgtttgcgaggaactgcctgtgtgtgagtgcgtgtgtggatatgagtgtgtgcgcacatgcgagtgccgtgtggccctgggaccctgggcccagaaaggacgatgaactacccgcagtggtgatggcctgaggcctggggttgaccactaactggctcctgacagggaagagcgctggcagaggctgtgctccctcctcaggtggcctctggctggctgtgggggactccgtttactaccacagggagacagagggaggtaagccatcccccgggagaccttgctgctgaccatcctaggctgggctggccccaccctcacccccacccccagggtgccctgaggccccaggcagctgctgcctccactatcgatgcctcctgactgcacactgaggactgggactggggttgagttctgtctggttttgttgccattttggtttgggaggctggaaaagcaccccaagagctattacagagactggagtcaggagagagcaggaggccctcatgttcaccagggaacaggaccacaccggccactggaggagggcaggagcagtcctccctctgaatggctgcagagttaatgttcccagcccagtcccctttcgggggccttgggagagtttaaggcacctgctggttccaggacctcgctttccatctgttcttgttgcaatgccatcttcaaaccgttttatttattgaagtgtttgttcagttaggggctggagagagggagcttgctgcctcctgccttgctacactaatgtttacagcacctaagcttagcctccagggccccacctctcccactgaccaggggactaggttgtagaggtgggaaggccccctctgggctgatcttgtgccattcttgaccttggacctgcttggttaaggagggagtgggccagaccagagtgccaggagctaatggagccaggcctgactcctaggagtggtccaaaggccttcagcctagatggtgcaaagctggggccagcctgtcttcaccggcaccctcacctgtgacaccaagacccaccccaatcccagacttcacacagtattctcccccacgccgtcctatgaccaaaggcccctgccaggtgtgggccacagcagcaggtatgtgtgaaagcaacgtagcgccccgcggactgcagtgcgcttaaccaactcacctcccttctcttagcccaagcctgtccctcgcacagcctcgcacaaaccacattgcctggtggggcccagtgtactgaaataaagtcgttccgatagacacgtca

SEQ ID NO: 312191 - DNA, 2801 bp, Homo sapiens
aataggctaaggtaagcggttggttggaaatctcctgccatggagtctacgatgtgatcgcaacagcctttcgtgatcgacaacggatccggtgtgattaaagctggttttgctggtgatcagatccccaaatactgctttccaaactatgtgggccgacccaagcacgttcgtgtcatggcaggagcccttgaaggcgacatcttcattggccccaaagctgaggagcaccgagggctgctttcaatccgctatcccatggagcatggcatcgtcaaggattggaacgacatggaacgcatttggcaatatgtctattctaaggaccagctgcagactttctcagaggagcatcctgtgctcctgactgaggcgcctttaaacccacgaaaaaaccgggaacgagctgccgaagttttcttcgagaccttcaatgtgcccgctcttttcatctccatgcaagctgtactcagcctttacgctacaggcaggaccacaggggtggtgctggattctggggatggagtcacccatgctgtgcccatctatgagggctttgccatgccccactccatcatgcgcatcgacatcgcgggccgggacgtctctcgcttcctgcgcctctacctgcgtaaggagggctacgacttccactcatcctctgagtttgagattgtcaaggccataaaagaaagagcctgttacctatccataaacccccaaaaggatgagacgctagagacagagaaagctcagtactacctgcctgatggcagcaccattgagattggtccttcccgattccgggcccctgagttgctcttcaggccagatttgattggagaggagagtgaaggcatccacgaggtcctggtgttcgccattcagaagtcagacatggacctgcggcgcacgcttttctctaacattgtcctctcaggaggctctaccctgttcaaaggttttggtgacaggctcctgagtgaagtgaagaaactagctccaaaagatgtgaagatcaggatatctgcacctcaggagagactgtattccacgtggattgggggctccatccttgcctccctggacacctttaagaagatgtgggtctccaaaaaggaatatgaggaagacggtgcccgatccatccacagaaaaaccttctaatgtcgggacatcatcttcacctctctctgaagttaactccactttaaaactcgctttcttgagtcggagtgtttgcgaggaactgcctgtgtgtgagtgcgtgtgtggatatgagtgtgtgcgcacatgcgagtgccgtgtggccctgggaccctgggcccagaaaggacgatgaactacccgcagtggtgatggcctgaggcctggggttgaccactaactggctcctgacagggaagagcgctggcagaggctgtgctccctcctcaggtggcctctggctggctgtgggggactccgtttactaccacagggagacagagggaggtaagccatcccccgggagaccttgctgctgaccatcctaggctgggctggccccaccctcacccccacccccagggtgccctgaggccccaggcagctgctgcctccactatcgatgcctcctgactgcacactgaggactgggactggggttgagttctgtctggttttgttgccattttggtttgggaggctggaaaagcaccccaagagctattacagagactggagtcaggagagagcaggaggccctcatgttcaccagggaacaggaccacaccggccactggaggagggcaggagcagtcctccctctgaatggctgcagagttaatgttcccagcccagtcccctttcgggggccttgggagagtttaaggcacctgctggttccaggacctcgctttccatctgttcttgttgcaatgccatcttcaaaccgttttatttattgaagtgtttgttcagttaggggctggagagagggagcttgctgcctcctgccttgctacactaatgtttacagcacctaagcttagcctccagggccccacctctcccagctgatggtgagctgacagtgtccacaggttccaggaccatttgagattggaagctacactcaaagacactcccaccaggctctttctcccttttcctcttgctcactgccctggaatcaacaggctggttgctggttagattttctgaaacaggaggtaaaatttttctttggcagaggcccctaagcaagggaggggtgttggagagccagtgcccttaagactggagaaagctgcaatttaccaagttgccttttgccactgtagctgaccaggggactaggttgtagaggtgggaaggccccctctgggctgatcttgtgccattcttgaccttggacctgcttggttaaggagggagtgggccagaccagagtgccaggagctaatggagccaggcctgactcctaggagtggtccaaaggccttcagcctagatggtgcaaagctggggccagcctgtcttcaccggcaccctcacctgtgacaccaagacccaccccaatcccagacttcacacagtattctcccccacgccgtcctatgaccaaaggcccctgccaggtgtgggccacagcagcaggtatgtgtgaaagcaacgtagcgccccgcggactgcagtgcgcttaaccaactcacctcccttctcttagcccaagcctgtccctcgcacagcctcgcacaaaccacattgcctggtggggcccagtgtactgaaataaagtcgttccgatagacacgtca

SEQ ID NO: 312192 - DNA, 2807 bp, Homo sapiens
cgctccctcgccgccctgaaccggcggctagactgcgcatgcgtgtcagtggcgctagcggcggacccggctgggcagttccttccccagaaggagagattcctctgccatggagtcctacgatgtgatcgccaaccagcctgtcgtgatcgacaacggatccggtgtgattaaagctggttttgctggtgatcagatccccaaatactgctttccaaactatgtgggccgacccaagcacgttcgtgtcatggcaggagcccttgaaggcgacatcttcattggccccaaagctgaggagcaccgagggctgctttcaatccgctatcccatggagcatggcatcgtcaaggattggaacgacatggaacgcatttggcaatatgtctattctaaggaccagctgcagactttctcagaggagcatcctgtgctcctgactgaggcgcctttaaacccacgaaaaaaccgggaacgagctgccgaagttttcttcgagaccttcaatgtgcccgctcttttcatctccatgcaagctgtactcagcctttacgctacaggcaggaccacaggggtggtgctggattctggggatggagtcacccatgctgtgcccatctatgagggctttgccatgccccactccatcatgcgcatcgacatcgcgggccgggacgtctctcgcttcctgcgcctctacctgcgtaaggagggctacgacttccactcatcctctgagtttgagattgtcaaggccataaaagaaagagcctgttacctatccataaacccattggtccttcccgattccgggcccctgagttgctcttcaggccagatttgattggagaggagagtgaaggcatccacgaggtcctggtgttcgccattcagaagtcagacatggacctgcggcgcacgcttttctctaacattgtcctctcaggaggctctaccctgttcaaaggttttggtgacaggctcctgagtgaagtgaagaaactagctccaaaagatgtgaagatcaggatatctgcacctcaggagagactgtattccacgtggattgggggctccatccttgcctccctggacacctttaagaagatgtgggtctccaaaaaggaatatgaggaagacggtgcccgatccatccacagaaaaaccttctaatgtcgggacatcatcttcacctctctctgaagttaactccactttaaaactcgctttcttgagtcggagtgtttgcgaggaactgcctgtgtgtgagtgcgtgtgtggatatgagtgtgtgcgcacatgcgagtgccgtgtggccctgggaccctgggcccagaaaggacgatgaactacccgcagtggtgatggcctgaggcctggggttgaccactaactggctcctgacagggaagagcgctggcagaggctgtgctccctcctcaggtggcctctggctggctgtgggggactccgtttactaccacagggagacagagggaggtaagccatcccccgggagaccttgctgctgaccatcctaggctgggctggccccaccctcacccccacccccagggtgccctgaggccccaggcagctgctgcctccactatcgatgcctcctgactgcacactgaggactgggactggggttgagttctgtctggttttgttgccattttggtttgggaggctggaaaagcaccccaagagctattacagagactggagtcaggagagagcaggaggccctcatgttcaccagggaacaggaccacaccggccactggaggagggcaggagcagtcctccctctgaatggctgcagagttaatgttcccagcccagtcccctttcgggggccttgggagagtttaaggcacctgctggttccaggacctcgctttccatctgttcttgttgcaatgccatcttcaaaccgttttatttattgaagtgtttgttcagttaggggctggagagagggagcttgctgcctcctgccttgctacactaatgtttacagcacctaagcttagcctccagggccccacctctcccagctgatggtgagctgacagtgtccacaggttccaggaccatttgagattggaagctacactcaaagacactcccaccaggctctttctcccttttcctcttgctcactgccctggaatcaacaggctggttgctggttagattttctgaaacaggaggtaaaatttttctttggcagaggcccctaagcaagggaggggtgttggagagccagtgcccttaagactggagaaagctgcaatttaccaagttgccttttgccactgtagctgaccaggggactaggttgtagaggtgggaaggccccctctgggctgatcttgtgccattcttgaccttggacctgcttggttaaggagggagtgggccagaccagagtgccaggagctaatggagccaggcctgactcctaggagtggtccaaaggccttcagcctagatggtgcaaagctggggccagcctgtcttcaccggcaccctcacctgtgacaccaagacccaccccaatcccagacttcacacagtattctcccccacgccgtcctatgaccaaaggcccctgccaggtgtgggccacagcagcaggtatgtgtgaaagcaacgtagcgccccgcggactgcagtgcgcttaaccaactcacctcccttctcttagcccaagcctgtccctcgcacagcctcgcacaaaccacattgcctggtggggcccagtgtactgaaataaagtcgttccgatagacacgtca

SEQ ID NO: 312193 - DNA, 3082 bp, Homo sapiens
cgctccctcgccgccctgaaccggcggctagactgcgcatgcgtgtcagtggcgctagcggcggacccggctgggcagttccttccccagaaggagagattcctctgccatggagtcctacgatgtgatcgccaaccagcctgtcgtgatcgacaacggatccggtgtgattaaagctggttttgctggtgatcagatccccaaatactgctttccaaactatgtgggccgacccaagcacgttcgtgtcatggcaggagcccttgaaggcgacatcttcattggccccaaagctgaggagcaccgagggctgctttcaatccgctatcccatggagcatggcatcgtcaaggattggaacgacatggaacgcatttggcaatatgtctattctaaggaccagctgcagactttctcagaggagcatcctgtgctcctgactgaggcgcctttaaacccacgaaaaaaccgggaacgagctgccgaagttttcttcgagaccttcaatgtgcccgctcttttcatctccatgcaagctgtactcagcctttacgctacaggcaggaccacaggggtggtgctggattctggggatggagtcacccatgctgtgcccatctatgagggctttgccatgccccactccatcatgcgcatcgacatcgcgggccgggacgtctctcgcttcctgcgcctctacctgcgtaaggagggctacgacttccactcatcctctgagtttgagattgtcaaggccataaaagaaagagcctgttacctatccataaacccccaaaaggatgagacgctagagacagagaaagctcagtactacctgcctgatggcagcaccattgagattggtccttcccgattccgggcccctgagttgctcttcaggccagatttgattggagaggagagtgaaggcatccacgaggtcctggtgttcgccattcagaagtcagacatggacctgcggcgcacgcttttctctaacattgtcctctcaggaggctctaccctgttcaaaggttttggtgacaggctcctgagtgaagtgaagaaactagctccaaaagatgtgaagatcaggatatctgcacctcaggagagactgtattccacgtggattgggggctccatccttgcctccctggacacctttaagaagatgtgggtctccaaaaaggaatatgaggaagacggtgcccgatccatccacagaaaaaccttctaatgtcgggacatcatcttcacctctctctgaagttaactccactttaaaactcgctttcttgagtcggagtgtttgcgaggaactgcctgtgtgtgagtgcgtgtgtggatatgagtgtgtgcgcacatgcgagtgccgtgtggccctgggaccctgggcccagaaaggacgatgaactacccgcagtggtgatggcctgaggcctggggttgaccactaactggctcctgacagggaagagcgctggcagaggctgtgctccctcctcaggtggcctctggctggctgtgggggactccgtttactaccacagggagacagagggaggtaagccatcccccgggagaccttgctgctgaccatcctaggctgggctggccccaccctcacccccacccccagggtgccctgaggccccaggcagctgctgcctccactatcgatgcctcctgactgcacactgaggactgggactggggttgagttctgtctggttttgttgccattttggtttgggaggctggaaaagcaccccaagagctattacagagactggagtcaggagagagcaggaggccctcatgttcaccagggaacaggaccacaccggccactggaggagggcaggagcagtcctccctctgaatggctgcagagttaatgttcccagcccagtcccctttcgggggccttgggagagtttaaggcacctgctggttccaggacctcgctttccatctgttcttgttgcaatgccatcttcaaaccgttttatttattgaagtgtttgttcagttaggggctggagagagggagcttgctgcctcctgccttgctacactaatgtttacagcacctaagcttagcctccagggccccacctctcccactgaccaggggactaggttgtagaggtgggaaggccccctctgggctgatcttgtgccattcttgaccttggacctgcttggttaaggagggagtgggccagaccagagtgccaggagctaatggagccaggcctgactcctaggagtggtccaaaggccttcagcctagatggtgcaaagctggggccagcctgtcttcaccggcaccctcacctgtgacaccaagacccaccccaatcccagacttcacacagtattctcccccacgccgtcctatgaccaaaggcccctgccaggtgtgggccacagcagcaggtatgtgtgaaagcaacgtagcgccccgcggactgcagtgcgcttaaccaactcacctcccttctcttagcccaagcctgtccctcgcacagcctcgcacaaaccacattgcctggtggggcccagtgtactgaaataaagtcgttccgatagacacgtcaaaaacaaaaacaaaaaaccccgagtttttttttttttttaataattattgtttttttttttttttattaaaaagcccaccaacacagggggggggcacccaaaaaaagcaaccttaaaaaaggcgctcctagggcggggggcccaacacacaacagagaggacacgcgcagtagacgcagacacaacactaagcggagggggacgcagacaaaaacacacaaggaacgggcggccgcaaccaaagcgcaagagacagccggagaaagccgagcaaccacaacaacgagcgccacgaaaaacaccggaacaacaaagaaagaggagagcacagacagaagcagagcggaagaaggaggaaacaacaaaccagaagagaaaaagacgccgataaaagaagaagaagaaacagcacgtcgcgttcgccaatgagaaaagcaaagcaacagaaagacgacgaccagcaagaaaaggacag

SEQ ID NO: 312194 - DNA, 2377 bp, Homo sapiens
cgctaggtgaggcgggtgttatcggccgaggctcatgcagctgtttcagcctttacgctacaggcaggaccacaggggtggtgctggattctggggatggagtcacccatgctgtgcccatctatgagggctttgccatgccccactccatcatgcgcatcgacatcgcgggccgggacgtctctcgcttcctgcgcctctacctgcgtaaggagggctacgacttccactcatcctctgagtttgagattgtcaaggccataaaagaaagagcctgttacctatccataaacccccaaaaggatgagacgctagagacagagaaagctcagtactacctgcctgatggcagcaccattgagattggtccttcccgattccgggcccctgagttgctcttcaggccagatttgattggagaggagagtgaaggcatccacgaggtcctggtgttcgccattcagaagtcagacatggacctgcggcgcacgcttttctctaacattgtcctctcaggaggctctaccctgttcaaaggttttggtgacaggctcctgagtgaagtgaagaaactagctccaaaagatgtgaagatcaggatatctgcacctcaggagagactgtattccacgtggattgggggctccatccttgcctccctggacacctttaagaagatgtgggtctccaaaaaggaatatgaggaagacggtgcccgatccatccacagaaaaaccttctaatgtcgggacatcatcttcacctctctctgaagttaactccactttaaaactcgctttcttgagtcggagtgtttgcgaggaactgcctgtgtgtgagtgcgtgtgtggatatgagtgtgtgcgcacatgcgagtgccgtgtggccctgggaccctgggcccagaaaggacgatgaactacccgcagtggtgatggcctgaggcctggggttgaccactaactggctcctgacagggaagagcgctggcagaggctgtgctccctcctcaggtggcctctggctggctgtgggggactccgtttactaccacagggagacagagggaggtaagccatcccccgggagaccttgctgctgaccatcctaggctgggctggccccaccctcacccccacccccagggtgccctgaggccccaggcagctgctgcctccactatcgatgcctcctgactgcacactgaggactgggactggggttgagttctgtctggttttgttgccattttggtttgggaggctggaaaagcaccccaagagctattacagagactggagtcaggagagagcaggaggccctcatgttcaccagggaacaggaccacaccggccactggaggagggcaggagcagtcctccctctgaatggctgcagagttaatgttcccagcccagtcccctttcgggggccttgggagagtttaaggcacctgctggttccaggacctcgctttccatctgttcttgttgcaatgccatcttcaaaccgttttatttattgaagtgtttgttcagttaggggctggagagagggagcttgctgcctcctgccttgctacactaatgtttacagcacctaagcttagcctccagggccccacctctcccagctgatggtgagctgacagtgtccacaggttccaggaccatttgagattggaagctacactcaaagacactcccaccaggctctttctcccttttcctcttgctcactgccctggaatcaacaggctggttgctggttagattttctgaaacaggaggtaaaatttttctttggcagaggcccctaagcaagggaggggtgttggagagccagtgcccttaagactggagaaagctgcaatttaccaagttgccttttgccactgtagctgaccaggggactaggttgtagaggtgggaaggccccctctgggctgatcttgtgccattcttgaccttggacctgcttggttaaggagggagtgggccagaccagagtgccaggagctaatggagccaggcctgactcctaggagtggtccaaaggccttcagcctagatggtgcaaagctggggccagcctgtcttcaccggcaccctcacctgtgacaccaagacccaccccaatcccagacttcacacagtattctcccccacgccgtcctatgaccaaaggcccctgccaggtgtgggccacagcagcaggtatgtgtgaaagcaacgtagcgccccgcggactgcagtgcgcttaaccaactcacctcccttctcttagcccaagcctgtccctcgcacagcctcgcacaaaccacattgcctggtggggcccagtgtactgaaataaagtcgttccgatagacacgtca

SEQ ID NO: 312195 - DNA, 2564 bp, Homo sapiens
tcctggtttttttatttttatttttttaacatccttgaagaagtcataatacatttaaaacatttgtctttgtaagtaaactgaaacctcctgccacctgtggctatagggaaaactcgagctgggtaggaccagaaccatatgagtggtagaaggagaaagatgcctgggcctgggctgaacttaggttgtggtctcagacctaggatccaggggccaagtttccaagcttgcccatcaggaaggtggagcggttaagaactcatatgctaaatgccacccagtgaaggccaacagagacctcactgcccctgcttctgggcagcagctatagtgaccattggggccatcacaacgtttagacaggtttgtgcagcagcacattcctcccctgggcctttgactggatgtgcaccagatttcctgccagcctgactgtcttgcttggatctgcagagagcctgttacctatccataaacccccaaaaggatgagacgctagagacagagaaagctcagtactacctgcctgatggcagcaccattgagattggtccttcccgattccgggcccctgagttgctcttcaggccagatttgattggagaggagagtgaaggcatccacgaggtcctggtgttcgccattcagaagtcagacatggacctgcggcgcacgcttttctctaacattgtcctctcaggaggctctaccctgttcaaaggttttggtgacaggctcctgagtgaagtgaagaaactagctccaaaagatgtgaagatcaggatatctgcacctcaggagagactgtattccacgtggattgggggctccatccttgcctccctggacacctttaagaagatgtgggtctccaaaaaggaatatgaggaagacggtgcccgatccatccacagaaaaaccttctaatgtcgggacatcatcttcacctctctctgaagttaactccactttaaaactcgctttcttgagtcggagtgtttgcgaggaactgcctgtgtgtgagtgcgtgtgtggatatgagtgtgtgcgcacatgcgagtgccgtgtggccctgggaccctgggcccagaaaggacgatgaactacccgcagtggtgatggcctgaggcctggggttgaccactaactggctcctgacagggaagagcgctggcagaggctgtgctccctcctcaggtggcctctggctggctgtgggggactccgtttactaccacagggagacagagggaggtaagccatcccccgggagaccttgctgctgaccatcctaggctgggctggccccaccctcacccccacccccagggtgccctgaggccccaggcagctgctgcctccactatcgatgcctcctgactgcacactgaggactgggactggggttgagttctgtctggttttgttgccattttggtttgggaggctggaaaagcaccccaagagctattacagagactggagtcaggagagagcaggaggccctcatgttcaccagggaacaggaccacaccggccactggaggagggcaggagcagtcctccctctgaatggctgcagagttaatgttcccagcccagtcccctttcgggggccttgggagagtttaaggcacctgctggttccaggacctcgctttccatctgttcttgttgcaatgccatcttcaaaccgttttatttattgaagtgtttgttcagttaggggctggagagagggagcttgctgcctcctgccttgctacactaatgtttacagcacctaagcttagcctccagggccccacctctcccagctgatggtgagctgacagtgtccacaggttccaggaccatttgagattggaagctacactcaaagacactcccaccaggctctttctcccttttcctcttgctcactgccctggaatcaacaggctggttgctggttagattttctgaaacaggaggtaaaatttttctttggcagaggcccctaagcaagggaggggtgttggagagccagtgcccttaagactggagaaagctgcaatttaccaagttgccttttgccactgtagctgaccaggggactaggttgtagaggtgggaaggccccctctgggctgatcttgtgccattcttgaccttggacctgcttggttaaggagggagtgggccagaccagagtgccaggagctaatggagccaggcctgactcctaggagtggtccaaaggccttcagcctagatggtgcaaagctggggccagcctgtcttcaccggcaccctcacctgtgacaccaagacccaccccaatcccagacttcacacagtattctcccccacgccgtcctatgaccaaaggcccctgccaggtgtgggccacagcagcaggtatgtgtgaaagcaacgtagcgccccgcggactgcagtgcgcttaaccaactcacctcccttctcttagcccaagcctgtccctcgcacagcctcgcacaaaccacattgcctggtggggcccagtgtactgaaataaagtcgttccgatagacacgtca

SEQ ID NO: 312196 - DNA, 1715 bp, Homo sapiens
cgctccctcgccgccctgaaccggcggctagactgcgcatgcgtgtcagtggcgctagcggcggacccggctgggcagttccttccccagaaggagagattcctctgccatggagtcctacgatgtgatcgccaaccagcctgtcgtgatcgacaacggatccggtgtgattaaagctggttttgctggtgatcagatccccaaatactgctttccaaactatgtgggccgacccaagcacgttcgtgtcatggcaggagcccttgaaggcgacatcttcattggccccaaagctgaggagcaccgagggctgctttcaatccgctatcccatggagcatggcatcgtcaaggattggaacgacatggaacgcatttggcaatatgtctattctaaggaccagctgcagactttctcagaggagcatcctgtgctcctgactgaggcgcctttaaacccacgaaaaaaccgggaacgagctgccgaagttttcttcgagaccttcaatgtgcccgctcttttcatctccatgcaagctgtactcagcctttacgctacaggcaggaccacaggggtggtgctggattctggggatggagtcacccatgctgtgcccatctatgagggctttgccatgccccactccatcatgcgcatcgacatcgcgggccgggacgtctctcgcttcctgcgcctctacctgcgtaaggagggctacgacttccactcatcctctgagtttgagattgtcaaggccataaaagaaagagcctgttacctatccataaacccccaaaaggatgagacgctagagacagagaaagctcagtactacctgcctgatggcagcaccattgagattggtccttcccgattccgggcccctgagttgctcttcaggccagatttgattggagaggagagtgaaggcatccacgaggtcctggtgttcgccattcagaagtcagacatggacctgcggcgcacgcttttctctaacattgtcctctcaggaggctctaccctgttcaaaggttttggtgacaggctcctgagtgaagtgaagaaactagctccaaaagatgtgaagatcaggatatctgcacctcaggagagactgtattccacgtggattgggggctccatccttgcctccctggacacctttaagaagatgtgggtctccaaaaaggaatatgaggaagacggtgcccgatccatccacagaaaaaccttctaatgtcgggacatcatcttcacctctctctgaagttaactccactttaaaactcgctttcttgagtcggagtgtttgcgaggaactgcctgtgtgtgagtgcgtgtgtggatatgagtgtgtgcgcacatgcgagtgccgtgtggccctgggaccctgggcccagaaaggacgatgaactacccgcagtggtgatggcctgaggcctggggttgaccactaactggctcctgacagggaagagcgctggcagaggctgtgctccctcctcaggtggcctctggctggctgtgggggactccgtttactaccagcaggtatgtgtgaaagcaacgtagcgccccgcggactgcagtgcgcttaaccaactcacctcccttctcttagcccaagcctgtccctcgcacagcctcgcacaaaccacattgcctggtggggcccagtgtactgaaataaagtcgttccgatagacacgtca

SEQ ID NO: 312197 - DNA, 1445 bp, Homo sapiens
  misc_feature (1370)..(1370): n is a, c, g, or t
cgctccctcgccgccctgaaccggcggctagactgcgcatgcgtgtcagtggcgctagcggcggacccggctgggcagttccttccccagaaggagagattcctctgccatggagtcctacgatgtgatcgccaaccagcctgtcgtgatcgacaacggatccggtgtgattaaagctggttttgctggtgatcagatccccaaatactgctttccaaactatgtgggccgacccaagcacgttcgtgtcatggcaggagcccttgaaggcgacatcttcattggccccaaagctgaggagcaccgagggctgctttcaatccgctatcccatggagcatggcatcgtcaaggattggaacgacatggaacgcatttggcaatatgtctattctaaggaccagctgcagactttctcagaggagcatcctgtgctcctgactgaggcgcctttaaacccacgaaaaaaccgggaacgagctgccgaagttttcttcgagaccttcaatgtgcccgctcttttcatctccatgcaagctgtactcagcctttacgctacaggcaggaccacaggggtggtgctggattctggggatggagtcacccatgctgtgcccatctatgagggctttgccatgccccactccatcatgcgcatcgacatcgcgggccgggacgtctctcgcttcctgcgcctctacctgcgtaaggagggctacgacttccactcatcctctgagtttgagattgtcaaggccataaaagaaagagcctgttacctatccataaacccccaaaaggatgagacgctagagacagagaaagctcagtactacctgcctgatggcagcaccattgagattggtccttcccgattccgggcccctgagttgctcttcaggccagatttgattggagaggagagtgaaggcatccacgaggtcctggtgttcgccattcagaagtcagacatggacctgcggcgcacgcttttctctaacattgtcctctcaggaggctctaccctgttcaaaggttttggtgacaggctcctgagtgaagtgaagaaactagctccaaaagatgtgaagatcaggatatctgcacctcaggagagactgtattccacgtggattgggggctccatccttgcctccctggacacctttaagaagatgtgggtctccaaaaaggaatatgaggaagacggtgcccgatccatccacagaaaaaccttctaatgtcgggacatcatcttcacctctctctgaagttaactccactttaaaactcgctttcttgagtcggagtgtttgcgaggaactgcctgtgtgtgagtgcgtgtgtggatatgagtgtgtgcactgcggnctgaccacaggcttcgtgccatgtatgtgggtgaagtgtccccacacccttcggggggcctgggcacccggaccg

SEQ ID NO: 312198 - DNA, 1206 bp, Homo sapiens
cgctccctcgccgccctgaaccggcggctagactgcgcatgcgtgtcagtggcgctagcggcggacccggctgggcagttccttccccagaaggagagattcctctgccatggagtcctacgatgtgatcgccaaccagcctgtcgtgatcgacaacggatccggtgtgattaaagctggttttgctggtgatcagatccccaaatactgctttccaaactatgtgggccgacccaagcacgttcgtgtcatggcaggagcccttgaaggcgacatcttcattggccccaaagctgaggagcaccgagggctgctttcaatccgctatcccatggagcatggcatcgtcaaggattggaacgacatggaacgcatttggcaatatgtctattctaaggaccagctgcagactttctcagaggagcatcctgtgctcctgactgaggcgcctttaaacccacgaaaaaaccgggaacgagctgccgaagttttcttcgagaccttcaatgtgcccgctcttttcatctccatgcaagctgtactcagcctttacgctacaggcaggaccacaggggtggtgctggattctggggatggagtcacccatgctgtgcccatctatgagggctttgccatgccccactccatcatgcgcatcgacatcgcgggccgggacgtctctcgcttcctgcgcctctacctgcgtaaggagggctacgacttccactcatcctctgagtttgagattgtcaaggccataaaagaaagagcctgttacctatccataaacccccaaaaggatgagacgctagagacagagaaagctcagtactacctgcctgatggcagcaccattgaggtaggtggcctgccttctttcttcggtccccttaggtccacaaaagctctgggcccaaccagaattctccatcagggtctggagtctggcaggccagtccctttacaccaagcttgtccaacccctggcccatgggctgcacgtggcccaggatggctttcagtaaggcccaacacaaagtcgtaaactttcttaaaacattatgagattcttttgcaatttttttttttagctcagcagctgtcattagtgttagtgtatattatgtgtggcccaagacaattcttcttccaatgtggcccagggaagccaaaagactggacaccccagccttacaccctctctct

SEQ ID NO: 312199 - DNA, 852 bp, Homo sapiens
cgctccctcgccgccctgaaccggcggctagactgcgcatgcgtgtcagtggcgctagcggcggacccggctgggcagttccttccccagaaggagagattcctctgccatggagtcctacgatgtgatcgccaaccagcctgtcgtgatcgacaacggatccggtgtgattaaagctggttttgctggtgatcagatccccaaatactgctttccaaactatgtgggccgacccaagcacgttcgtgtcatggcaggagcccttgaaggcgacatcttcattggccccaaagctgaggagcaccgagggctgctttcaatccgctatcccatggagcatggcatcgtcaaggattggaacgacatggaacgcatttggcaatatgtctattctaaggaccagctgcagactttctcagaggagcatcctgtgctcctgactgaggcgcctttaaacccacgaaaaaaccgggaacgagctgccgaagttttcttcgagaccttcaatgtgcccgctcttttcatctccatgcaagctgtactcagcctttacgctacaggcaggaccacaggggtggtgctggattctggggatggagtcacccatgctgtgcccatctatgagggctttgccatgccccactccatcatgcgcatcgacatcgcgggccgggacgtctctcgcttcctgcgcctctacctgcgtaaggagggctacgacttccactcatcctctgagtttgagattgtcaaggccataaaagaagtaagtgctgccccctgggcctagggatggagtgggggttgggagcatagcacccaggaccttggtgacctgccagtgaagccagg

SEQ ID NO: 312200 - DNA, 647 bp, Homo sapiens
taaggcacctgctggttgcaggacctcgctttccatctgttcttgttgcaatgccatcttcaagtggcgctagcggcggacccggctgggcagttccttccccagaaggagagattcctctgccatggagtcctacgatgtgatcgccaaccagcctgtcgtgatcgacaacggatccggtgtgattaaagctggttttgctggtgatcagatccccaaatactgctttccaaactatgtgggccgacccaagcacgttcgtgtcatggcaggagcccttgaaggcgacatcttcattggccccaaagctgaggagcaccgagggctgctttcaatccgctatcccatggagcatggcatcgtcaaggattggaacgacatggaacgcatttggcaatatgtctattctaaggaccagctgcagactttctcagaggagcatcctgtgctcctgactgaggcgcctttaaacccacgaaaaaaccgggaacgagctgccgaagttttcttcgagaccttcaatgtgcccgctcttttcatctccatgcaagctgtactcagcctttacgctacaggcaggaccacaggatgctcctctgagaaagtctgcagctggtccttagaatagacatattgccaaatgcgtt

SEQ ID NO: 312201 - DNA, 465 bp, Homo sapiens
aagcaccaggctgtggcctcccacatctcccgcctgccatgtcctgctgaggcctcccattggccagggatgctgtgggtgggcctgttcaggttcttgacatctgtgcacgaaataatttgggagcaagtccaaagtaagagtgggcaaagaagtttatggtgcaaagctggggccagcctgtcttcaccggcaccctcacctgtgacaccaagacccaccccaatcccagacttcacacagtattctcccccacgccgtcctatgaccaaaggcccctgccaggtgtgggccacagcagcaggtatgtgtgaaagcaacgtagcgccccgcggactgcagtgcgcttaaccaactcacctcccttctcttagcccaagcctgtccctcgcacagcctcgcacaaaccacattgcctggtggggcccagtgtactgaaataaagtcgttccgatagacacgtca

SEQ ID NO: 312202 - DNA, 2380 bp, Homo sapiens
cgctccctcgccgccctgaaccggcggctagactgcgcatgcgtgtcagtggcgctagcggcggacccggctgggcagttccttccccagaaggagagattcctctgccatggagtcctacgatgtgatcgccaaccagcctgtcgtgatcgacaacggatccggtgtgattaaagctggttttgctggtgatcagatccccaaatactgctttccaaactatgtgggccgacccaagcacgttcgtgtcatggcaggagcccttgaaggcgacatcttcattggccccaaagctgaggagcaccgagggctgctttcaatccgctatcccatggagcatggcatcgtcaaggattggaacgacatggaacgcatttggcaatatgtctattctaaggaccagctgcagactttctcagaggagcatcctgtgctcctgactgaggcgcctttaaacccacgaaaaaaccgggaacgagctgccgaagttttcttcgagaccttcaatgtgcccgctcttttcatctccatgcaagctgtactcagcctttacgctacaggcaggaccacaggggtggtgctggattctggggatggagtcacccatgctgtgcccatctatgagggctttgccatgccccactccatcatgcgcatcgacatcgcgggccgggacgtctctcgcttcctgcgcctctacctgcgtaaggagggctacgacttccactcatcctctgagtttgagattgtcaaggccataaaagaaagagcctgttacctatccataaacccccaaaaggatgagacgctagagacagagaaagctcagtactacctgcctgatggcagcaccattgagattggtccttcccgattccgggcccctgagttgctcttcaggccagatttgattggagaggagagtgaaggcatccacgaggtcctggtgttcgccattcagaagtcagacatggacctgcggcgcacgcttttctctaacattgtcctctcaggaggctctaccctgttcaaaggttttggtgacaggctcctgagtgaagtgaagaaactagctccaaaagatgtgaagatcaggatatctgcacctcaggagagactgtattccacgtggattgggggctccatccttgcctccctggacacctttaagaagatgtgggtctccaaaaaggaatatgaggaagacggtgcccgatccatccacagaaaaaccttctaatgtcgggacatcatcttcacctctctctgaagttaactccactttaaaactcgctttcttgagtcggagtgtttgcgaggaactgcctgtgtgtgagtgcgtgtgtggatatgagtgtgtgcgcacatgcgagtgccgtgtggccctgggaccctgggcccagaaaggacgatgaactacccgcagtggtgatggcctgaggcctggggttgaccactaactggctcctgacagggaagagcgctggcagaggctgtgctccctcctcaggtggcctctggctggctgtgggggactccgtttactaccacagggagacagagggaggtaagccatcccccgggagaccttgctgctgaccatcctaggctgggctggccccaccctcacccccacccccagggtgccctgaggccccaggcagctgctgcctccactatcgatgcctcctgactgcacactgaggactgggactggggttgagttctgtctggttttgttgccattttggtttgggaggctggttgctggttagattttctgaaacaggaggtaaaatttttctttggcagaggcccctaagcaagggaggggtgttggagagccagtgcccttaagactggagaaagctgcaatttaccaagttgccttttgccactgtagctgaccaggggactaggttgtagaggtgggaaggccccctctgggctgatcttgtgccattcttgaccttggacctgcttggttaaggagggagtgggccagaccagagtgccaggagctaatggagccaggcctgactcctaggagtggtccaaaggccttcagcctagatggtgcaaagctggggccagcctgtcttcaccggcaccctcacctgtgacaccaagacccaccccaatcccagacttcacacagtattctcccccacgccgtcctatgaccaaaggcccctgccaggtgtgggccacagcagcaggtatgtgtgaaagcaacgtagcgccccgcggactgcagtgcgcttaaccaactcacctcccttctcttagcccaagcctgtccctcgcacagcctcgcacaaaccacattgcctggtggggcccagtgtactgaaataaagtcgttccgatagacacgtca

SEQ ID NO: 312203 - DNA, 2798 bp, Homo sapiens
cgctccctcgccgccctgaaccggcggctagactgcgcatgcgtgtcagtggcgctagcggcggacccggctgggcagttccttccccagaaggagagattcctctgccatggagtcctacgatgtgatcgccaaccagcctgtcgtgatcgacaacggatccggtgtgattaaagctggttttgctggtgatcagatccccaaatactgctttccaaactatgtgggccgacccaagcacgttcgtgtcatggcaggagcccttgaaggcgacatcttcattggccccaaagctgaggagcaccgagggctgctttcaatccgctatcccatggagcatggcatcgtcaaggattggaacgacatggaacgcatttggcaatatgtctattctaaggaccagctgcagactttctcagaggagcatcctgtgctcctgactgaggcgcctttaaacccacgaaaaaaccgggaacgagctgccgaagttttcttcgagaccttcaatgtgcccgctcttttcatctccatgcaagctgtactcagcctttacgctacaggcaggaccacaggggtggtgctggattctggggatggagtcacccatgctgtgcccatctatgagggctttgccatgccccactccatcatgcgcatcgacatcgcgggccgggacgtctctcgcttcctgcgcctctacctgcgtaaggagggctacgacttccactcatcctctgagtttgagattgtcaaggccataaaagaaagagcctgttacctatccataaacccccaaaaggatgagacgctagagacagagaaagctcagtactacctgcctgatggcagcaccattgagattggtccttcccgattccgggcccctgagttgctcttcaggccagatttgattggagaggagagtgaaggcatccacgaggtcctggtgttcgccattcagaagtcagacatggacctgcggcgcacgcttttctctaacattgtcctctcaggaggctctaccctgttcaaaggttttggtgacaggctcctgagtgaagtgaagaaactagctccaaaagatgtgaagatcaggatatctgcacctcaggagagactgtattccacgtggattgggggctccatccttgcctccctggacacctttaagaagatgtgggtctccaaaaaggaatatgaggaagacggtgcccgatccatccacagaaaaaccttctaatgtcgggacatcatcttcacctctctctgaagttaactccactttaaaactcgctttcttgagtcggagtgtttgcgaggaactgcctgtgtgtgagtgcgtgtgtggatatgagtgtgtgcgcacatgcgagtgccgtgtggccctgggaccctgggcccagaaaggacgatgaactacccgcagtggtgatggcctgaggcctggggttgaccactaactggctcctgacagggaagagcgctggcagaggctgtgctccctcctcaggtggcctctggctggctgtgggggactccgtttactaccacagggagacagagggaggtaagccatcccccgggagaccttgctgctgaccatcctaggctgggctggccccaccctcacccccacccccagggtgccctgaggccccaggcagctgctgcctccactatcgatgcctcctgactgcacactgaggactgggactggggttgagttctgtctggttttgttgccattttggtttgggaggctggaaaagcaccccaagagctattacagagactggagtcaggagagagcaggaggccctcatgttcaccagggaacaggaccacaccggccactggaggagggcaggagcagtcctccctctgaatggctgcagagttaatgttcccagcccagtcccctttcgggggccttgggagagtttaaggcacctgctggttccaggacctcgctttccatctgttcttgttgcaatgccatcttcaaaccgttttatttattgaagtgtttgttcagttaggggctggagagagggagcttgctgcctcctgccttgctacactaatgtttacagcacctaagcttagcctccagggccccacctctcccagctgatggtgagctgacagtgtccacaggttccaggaccatttgagattggaagctacactcaaagacactcccaccaggctctttctcccttttcctcttgctcactgccctggaatcaacaggctggttgctggttagattttctgaaacaggaggtaaaatttttctttggcagaggcccctaagcaagggaggggtgttggagagccagtgcccttaagactggagaaagctgcaatttaccaagttgccttttgccactgtagctgaccaggggactaggttgtagaggtgggaaggccccctctgggctgatcttgtgccattcttgaccttggacctgcttggttaaggagggagtgggccagaccagagtgccagcctgtcttcaccggcaccctcacctgtgacaccaagacccaccccaatcccagacttcacacagtattctcccccacgccgtcctatgaccaaaggcccctgccaggtgtgggccacagcagcaggtatgtgtgaaagcaacgtagcgccccgcggactgcagtgcgcttaaccaactcacctcccttctcttagcccaagcctgtccctcgcacagcctcgcacaaaccacattgcctggtggggcccagtgtactgaaataaagtcgttccgatagacacgtca

SEQ ID NO: 312204 - DNA, 2824 bp, Homo sapiens
taaggcacctgctggttgcaggacctcgctttccatctgttcttgttgcaatgccatcttcaagtggcgctagcggcggacccggctgggcagttccttccccagaaggagagattcctctgccatggagtcctacgatgtgatcgccaaccagcctgtcgtgatcgacaactgtgggccgacccaagcacgttcgtgtcatggcaggagcccttgaaggcgacatcttcattggccccaaagctgaggagcaccgagggctgctttcaatccgctatcccatggagcatggcatcgtcaaggattggaacgacatggaacgcatttggcaatatgtctattctaaggaccagctgcagactttctcagaggagcatcctgtgctcctgactgaggcgcctttaaacccacgaaaaaaccgggaacgagctgccgaagttttcttcgagaccttcaatgtgcccgctcttttcatctccatgcaagctgtactcagcctttacgctacaggcaggaccacaggggtggtgctggattctggggatggagtcacccatgctgtgcccatctatgagggctttgccatgccccactccatcatgcgcatcgacatcgcgggccgggacgtctctcgcttcctgcgcctctacctgcgtaaggagggctacgacttccactcatcctctgagtttgagattgtcaaggccataaaagaaagagcctgttacctatccataaacccccaaaaggatgagacgctagagacagagaaagctcagtactacctgcctgatggcagcaccattgagattggtccttcccgattccgggcccctgagttgctcttcaggccagatttgattggagaggagagtgaaggcatccacgaggtcctggtgttcgccattcagaagtcagacatggacctgcggcgcacgcttttctctaacattgtcctctcaggaggctctaccctgttcaaaggttttggtgacaggctcctgagtgaagtgaagaaactagctccaaaagatgtgaagatcaggatatctgcacctcaggagagactgtattccacgtggattgggggctccatccttgcctccctggacacctttaagaagatgtgggtctccaaaaaggaatatgaggaagacggtgcccgatccatccacagaaaaaccttctaatgtcgggacatcatcttcacctctctctgaagttaactccactttaaaactcgctttcttgagtcggagtgtttgcgaggaactgcctgtgtgtgagtgcgtgtgtggatatgagtgtgtgcgcacatgcgagtgccgtgtggccctgggaccctgggcccagaaaggacgatgaactacccgcagtggtgatggcctgaggcctggggttgaccactaactggctcctgacagggaagagcgctggcagaggctgtgctccctcctcaggtggcctctggctggctgtgggggactccgtttactaccacagggagacagagggaggtaagccatcccccgggagaccttgctgctgaccatcctaggctgggctggccccaccctcacccccacccccagggtgccctgaggccccaggcagctgctgcctccactatcgatgcctcctgactgcacactgaggactgggactggggttgagttctgtctggttttgttgccattttggtttgggaggctggaaaagcaccccaagagctattacagagactggagtcaggagagagcaggaggccctcatgttcaccagggaacaggaccacaccggccactggaggagggcaggagcagtcctccctctgaatggctgcagagttaatgttcccagcccagtcccctttcgggggccttgggagagtttaaggcacctgctggttccaggacctcgctttccatctgttcttgttgcaatgccatcttcaaaccgttttatttattgaagtgtttgttcagttaggggctggagagagggagcttgctgcctcctgccttgctacactaatgtttacagcacctaagcttagcctccagggccccacctctcccagctgatggtgagctgacagtgtccacaggttccaggaccatttgagattggaagctacactcaaagacactcccaccaggctctttctcccttttcctcttgctcactgccctggaatcaacaggctggttgctggttagattttctgaaacaggaggtaaaatttttctttggcagaggcccctaagcaagggaggggtgttggagagccagtgcccttaagactggagaaagctgcaatttaccaagttgccttttgccactgtagctgaccaggggactaggttgtagaggtgggaaggccccctctgggctgatcttgtgccattcttgaccttggacctgcttggttaaggagggagtgggccagaccagagtgccaggagctaatggagccaggcctgactcctaggagtggtccaaaggccttcagcctagatggtgcaaagctggggccagcctgtcttcaccggcaccctcacctgtgacaccaagacccaccccaatcccagacttcacacagtattctcccccacgccgtcctatgaccaaaggcccctgccaggtgtgggccacagcagcaggtatgtgtgaaagcaacgtagcgccccgcggactgcagtgcgcttaaccaactcacctcccttctcttagcccaagcctgtccctcgcacagcctcgcacaaaccacattgcctggtggggcccagtgtactgaaataaagtcgttccgatagacacgtca

SEQ ID NO: 312205 - DNA, 2637 bp, Homo sapiens
cgctccctcgccgccctgaaccggcggctagactgcgcatgcgtgtcagtggcgctagcggcggacccggctgggcagttccttccccagaaggagagattcctctgccatggagtcctacgatgtgatcgccaaccagcctgtcgtgatcgacaacggatccggtgtgattaaagctggttttgctggtgatcagatccccaaatactgctttccaaactatgtgggccgacccaagcacgttcgtgtcatggcaggagcccttgaaggcgacatcttcattggccccaaagctgaggagcaccgagggctgctttcaatccgctatcccatggagcatggcatcgtcaaggattggaacgacatggaacgcatttggcaatatgtctattctaaggaccagctgcagactttctcagaggagcatcctgtgctcctgactgaggcgcctttaaacccacgaaaaaaccgggaacgagctgccgaagttttcttcgagaccttcaatgtgcccgctcttttcatctccatgcaagctgtactcagcctttacgctacaggcaggaccacaggggtggtgctggattctggggatggagtcacccatgctgtgcccatctatgagggctttgccatgccccactccatcatgcgcatcgacatcgcgggccgggacgtctctcgcttcctgcgcctctacctgcgtaaggagggctacgacttccactcatcctctgagtttgagattgtcaaggccataaaagaaagagcctgttacctatccataaacccccaaaaggatgagacgctagagacagagaaagctcagtactacctgcctgatggcagcaccattgagatatctgcacctcaggagagactgtattccacgtggattgggggctccatccttgcctccctggacacctttaagaagatgtgggtctccaaaaaggaatatgaggaagacggtgcccgatccatccacagaaaaaccttctaatgtcgggacatcatcttcacctctctctgaagttaactccactttaaaactcgctttcttgagtcggagtgtttgcgaggaactgcctgtgtgtgagtgcgtgtgtggatatgagtgtgtgcgcacatgcgagtgccgtgtggccctgggaccctgggcccagaaaggacgatgaactacccgcagtggtgatggcctgaggcctggggttgaccactaactggctcctgacagggaagagcgctggcagaggctgtgctccctcctcaggtggcctctggctggctgtgggggactccgtttactaccacagggagacagagggaggtaagccatcccccgggagaccttgctgctgaccatcctaggctgggctggccccaccctcacccccacccccagggtgccctgaggccccaggcagctgctgcctccactatcgatgcctcctgactgcacactgaggactgggactggggttgagttctgtctggttttgttgccattttggtttgggaggctggaaaagcaccccaagagctattacagagactggagtcaggagagagcaggaggccctcatgttcaccagggaacaggaccacaccggccactggaggagggcaggagcagtcctccctctgaatggctgcagagttaatgttcccagcccagtcccctttcgggggccttgggagagtttaaggcacctgctggttccaggacctcgctttccatctgttcttgttgcaatgccatcttcaaaccgttttatttattgaagtgtttgttcagttaggggctggagagagggagcttgctgcctcctgccttgctacactaatgtttacagcacctaagcttagcctccagggccccacctctcccagctgatggtgagctgacagtgtccacaggttccaggaccatttgagattggaagctacactcaaagacactcccaccaggctctttctcccttttcctcttgctcactgccctggaatcaacaggctggttgctggttagattttctgaaacaggaggtaaaatttttctttggcagaggcccctaagcaagggaggggtgttggagagccagtgcccttaagactggagaaagctgcaatttaccaagttgccttttgccactgtagctgaccaggggactaggttgtagaggtgggaaggccccctctgggctgatcttgtgccattcttgaccttggacctgcttggttaaggagggagtgggccagaccagagtgccaggagctaatggagccaggcctgactcctaggagtggtccaaaggccttcagcctagatggtgcaaagctggggccagcctgtcttcaccggcaccctcacctgtgacaccaagacccaccccaatcccagacttcacacagtattctcccccacgccgtcctatgaccaaaggcccctgccaggtgtgggccacagcagcaggtatgtgtgaaagcaacgtagcgccccgcggactgcagtgcgcttaaccaactcacctcccttctcttagcccaagcctgtccctcgcacagcctcgcacaaaccacattgcctggtggggcccagtgtactgaaataaagtcgttccgatagacacgtca

SEQ ID NO: 312206 - DNA, 1736 bp, Homo sapiens
cgctccctcgccgccctgaaccggcggctagactgcgcatgcgtgtcagtggcgctagcggcggacccggctgggcagttccttccccagaaggagagattcctctgccatggagtcctacgatgtgatcgccaaccagcctgtcgtgatcgacaacggatccggtgtgattaaagctggttttgctggtgatcagatccccaaatactgctttccaaactatgtgggccgacccaagcacgttcgtgtcatggcaggagcccttgaaggcgacatcttcattggccccaaagctgaggagcaccgagggctgctttcaatccgctatcccatggagcatggcatcgtcaaggattggaacgacatggaacgcatttggcaatatgtctattctaaggaccagctgcagactttctcagaggagcatcctgtgctcctgactgaggcgcctttaaacccacgaaaaaaccgggaacgagctgccgaagttttcttcgagaccttcaatgtgcccgctcttttcatctccatgcaagctgtactcagcctttacgctacaggcaggaccacaggggtggtgctggattctggggatggagtcacccatgctgtgcccatctatgagggctttgccatgccccactccatcatgcgcatcgacatcgcgggccgggacgtctctcgcttcctgcgcctctacctgcgtaaggagggctacgacttccactcatcctctgagtttgagattgtcaaggccataaaagaaagagcctgttacctatccataaacccccaaaaggatgagacgctagagacagagaaagctcagtactacctgcctgatggcagcaccattgagattggtccttcccgattccgggcccctgagttgctcttcaggccagatttgattggagaggagagtgaaggcatccacgaggtcctggtgttcgccattcagaagtcagacatggacctgcggcgcacgcttttctctaacattgtcctctcaggaggctctaccctgttcaaaggttttggtgacaggctcctgagtgaagtgaagaaactagctccaaaagatgtgaagatcaggatatctgcacctcaggagagactgtattccacgtggattgggggctccatccttgcctccctggacacctttaagaagatgtgggtctccaaaaaggaatatgaggaagacggtgcccgatccatccacagaaaaaccttctaatgtcgggacatcatcttcacctctctctgaagttaactccactttaaaactcgctttcttgagtcggagtgtttgcgaggaactgcctgtgtgtgagtgcgtgtgtggatatgagtgtgtgcgcacatgcgagtgccgtgtggccctgggaccctgggcccagaaaggacgatgaactacccgcagtggtgatggcctgaggcctggggttgaccactaactggctcctgacagggaagagcgctggcagaggctgtgctccctcctcaggtggcctctggctggctgtgggggactccgtttactaccacagggagacagagggaggtaagccatcccccgggagaccttgctgctgaccatgtacgagaatctcgtacatggtcttctcgtaaacggttttctcgtacatggtctctctccatgttggtcaggctggtctcaaactcctgacctcaagtgatccgcccgcctcgccttccaaagtggtgcagta

SEQ ID NO: 312207 - DNA, 2060 bp, Homo sapiens
ggctctaagtacttaccctgcccctgaatgggcagcaccattgagattggtccttcccgattccgggcccctgagttgctcttcaggccagatttgattggagaggagagtgaaggcatccacgaggtcctggtgttcgccattcagaagtcagacatggacctgcggcgcacgcttttctctaacattgtcctctcaggaggctctaccctgttcaaaggttttggtgacaggctcctgagtgaagtgaagaaactagctccaaaagatgtgaagatcaggatatctgcacctcaggagagactgtattccacgtggattgggggctccatccttgcctccctggacacctttaagaagatgtgggtctccaaaaaggaatatgaggaagacggtgcccgatccatccacagaaaaaccttctaatgtcgggacatcatcttcacctctctctgaagttaactccactttaaaactcgctttcttgagtcggagtgtttgcgaggaactgcctgtgtgtgagtgcgtgtgtggatatgagtgtgtgcgcacatgcgagtgccgtgtggccctgggaccctgggcccagaaaggacgatgaactacccgcagtggtgatggcctgaggcctggggttgaccactaactggctcctgacagggaagagcgctggcagaggctgtgctccctcctcaggtggcctctggctggctgtgggggactccgtttactaccacagggagacagagggaggtaagccatcccccgggagaccttgctgctgaccatcctaggctgggctggccccaccctcacccccacccccagggtgccctgaggccccaggcagctgctgcctccactatcgatgcctcctgactgcacactgaggactgggactggggttgagttctgtctggttttgttgccattttggtttgggaggctggaaaagcaccccaagagctattacagagactggagtcaggagagagcaggaggccctcatgttcaccagggaacaggaccacaccggccactggaggagggcaggagcagtcctccctctgaatggctgcagagttaatgttcccagcccagtcccctttcgggggccttgggagagtttaaggcacctgctggttccaggacctcgctttccatctgttcttgttgcaatgccatcttcaaaccgttttatttattgaagtgtttgttcagttaggggctggagagagggagcttgctgcctcctgccttgctacactaatgtttacagcacctaagcttagcctccagggccccacctctcccagctgatggtgagctgacagtgtccacaggttccaggaccatttgagattggaagctacactcaaagacactcccaccaggctctttctcccttttcctcttgctcactgccctggaatcaacaggctggttgctggttagattttctgaaacaggaggtaaaatttttctttggcagaggcccctaagcaagggaggggtgttggagagccagtgcccttaagactggagaaagctgcaatttaccaagttgccttttgccactgtagctgaccaggggactaggttgtagaggtgggaaggccccctctgggctgatcttgtgccattcttgaccttggacctgcttggttaaggagggagtgggccagaccagagtgccaggagctaatggagccaggcctgactcctaggagtggtccaaaggccttcagcctagatggtgcaaagctggggccagcctgtcttcaccggcaccctcacctgtgacaccaagacccaccccaatcccagacttcacacagtattctcccccacgccgtcctatgaccaaaggcccctgccaggtgtgggccacagcagcaggtatgtgtgaaagcaacgtagcgccccgcggactgcagtgcgcttaaccaactcacctcccttctcttagcccaagcctgtccctcgcacagcctcgcacaaaccacattgcctggtggggcccagtgtactgaaataaagtcgttccgatagacacgtca

SEQ ID NO: 312208 - DNA, 2511 bp, Homo sapiens
taaggcacctgctggttgcaggacctcgctttccatctgttcttgttgcaatgccatcttcaagtggcgctagcggcggacccggctgggcagttccttccccagaaggagagattcctctgccatggagtcctacgatgtgatcgccaaccagcctgtcgtgatcgacaacgagcaccgagggctgctttcaatccgctatcccatggagcatggcatcgtcaaggattggaacgacatggaacgcatttggcaatatgtctattctaaggaccagctgcagactttctcagaggagcatcctgtgctcctgactgaggcgcctttaaacccacgaaaaaaccgggaacgagctgccgaagttttcttcgagaccttcaatgtgcccgctcttttcatctccatgcaagctgtactcagcctttacgctacaggcaggaccacaggggtggtgctggattctggggatggagtcacccatgctgtgcccatctatgagggctttgccatgccccactccatcatgcgcatcgacatcgcgggccgggacgtctctcgcttcctgcgcctctacctgcgtaaggagggctacgacttccactcatcctctgagtttgagattgtcaaggccataaaagaaagagcctgttacctatccataaacccccaaaaggatgagacgctagagacagagaaagctcagtactacctgcctgatggcagcaccattgagatatctgcacctcaggagagactgtattccacgtggattgggggctccatccttgcctccctggacacctttaagaagatgtgggtctccaaaaaggaatatgaggaagacggtgcccgatccatccacagaaaaaccttctaatgtcgggacatcatcttcacctctctctgaagttaactccactttaaaactcgctttcttgagtcggagtgtttgcgaggaactgcctgtgtgtgagtgcgtgtgtggatatgagtgtgtgcgcacatgcgagtgccgtgtggccctgggaccctgggcccagaaaggacgatgaactacccgcagtggtgatggcctgaggcctggggttgaccactaactggctcctgacagggaagagcgctggcagaggctgtgctccctcctcaggtggcctctggctggctgtgggggactccgtttactaccacagggagacagagggaggtaagccatcccccgggagaccttgctgctgaccatcctaggctgggctggccccaccctcacccccacccccagggtgccctgaggccccaggcagctgctgcctccactatcgatgcctcctgactgcacactgaggactgggactggggttgagttctgtctggttttgttgccattttggtttgggaggctggaaaagcaccccaagagctattacagagactggagtcaggagagagcaggaggccctcatgttcaccagggaacaggaccacaccggccactggaggagggcaggagcagtcctccctctgaatggctgcagagttaatgttcccagcccagtcccctttcgggggccttgggagagtttaaggcacctgctggttccaggacctcgctttccatctgttcttgttgcaatgccatcttcaaaccgttttatttattgaagtgtttgttcagttaggggctggagagagggagcttgctgcctcctgccttgctacactaatgtttacagcacctaagcttagcctccagggccccacctctcccagctgatggtgagctgacagtgtccacaggttccaggaccatttgagattggaagctacactcaaagacactcccaccaggctctttctcccttttcctcttgctcactgccctggaatcaacaggctggttgctggttagattttctgaaacaggaggtaaaatttttctttggcagaggcccctaagcaagggaggggtgttggagagccagtgcccttaagactggagaaagctgcaatttaccaagttgccttttgccactgtagctgaccaggggactaggttgtagaggtgggaaggccccctctgggctgatcttgtgccattcttgaccttggacctgcttggttaaggagggagtgggccagaccagagtgccaggagctaatggagccaggcctgactcctaggagtggtccaaaggccttcagcctagatggtgcaaagctggggccagcctgtcttcaccggcaccctcacctgtgacaccaagacccaccccaatcccagacttcacacagtattctcccccacgccgtcctatgaccaaaggcccctgccaggtgtgggccacagcagcaggtatgtgtgaaagcaacgtagcgccccgcggactgcagtgcgcttaaccaactcacctcccttctcttagcccaagcctgtccctcgcacagcctcgcacaaaccacattgcctggtggggcccagtgtactgaaataaagtcgttccgatagacacgtca

SEQ ID NO: 312209 - DNA, 944 bp, Homo sapiens
  misc_feature (841)..(841): n is a, c, g, or t
cgctccctcgccgccctgaaccggcggctagactgcgcatgcgtgtcagtggcgctagcggcggacccggctgggcagttccttccccagaaggagagattcctctgccatggagtcctacgatgtgatcgccaaccagcctgtcgtgatcgacaacggatccggtgtgattaaagctggttttgctggtgatcagatccccaaatactgctttccaaactatgtgggccgacccaagcacgttcgtgtcatggcaggagcccttgaaggcgacatcttcattggccccaaagctgaggagcaccgagggctgctttcaatccgctatcccatggagcatggcatcgtcaaggattggaacgacatggaacgcatttggcaatatgtctattctaaggaccagctgcagactttctcagaggagcatcctgtgctcctgactgaggcgcctttaaacccacgaaaaaaccgggaacgagctgccgaagttttcttcgagaccttcaatgtgcccgctcttttcatctccatgcaagctgtactcagcctttacgctacaggcaggaccacaggggtggtgctggattctggggatggagtcacccatgctgtgcccatctatgagggctttgccatgccccactccatcatgcgcatcgacatcgcgggccgggacgtctctcgcttcctgcgcctctacctgcgtaaggagggctacgacttccactcatcctctgagtttgagattgtcaaggccataaaagaaagagcctgttacctatccataaacccccaaaaggatgagacgctagagacagagaaagctcagtactactgctgngggggcccattgggatgggccttccgttcgggccctggttgtttcggccattgatgggggaggggggtcccagccgggtgccccaatcggcgggggccgctct

SEQ ID NO: 312210 - DNA, 860 bp, Homo sapiens
cgctccctcgccgccctgaaccggcggctagactgcgcatgcgtgtcagtggcgctagcggcggacccggctgggcagttccttccccagaaggagagattcctctgccatggagtcctacgatgtgatcgccaaccagcctgtcgtgatcgacaacggatccggtgtgattaaagctggttttgctggtgatcagatccccaaatactgctttccaaactatgtgggccgacccaagcacgttcgtgtcatggcaggagcccttgaaggcgacatcttcattggccccaaagctgaggagcaccgagggctgctttcaatccgctatcccatggagcatggcatcgtcaaggattggaacgacatggaacgcatttggcaatatgtctattctaaggaccagctgcagactttctcagaggagcatcctgtgctcctgactgaggcgcctttaaacccacgaaaaaaccgggaacgagctgccgaagttttcttcgagaccttcaatgtgcccgctcttttcatctccatgcaagctgtactcagcctttacgctacaggcaggaccacaggggtggtgctggattctggggatggagtcacccatgctgtgcccatctatgagggctttgccatgccccactccatcatgcgccttacatcttcgcccggacctttctactttctgaactctacctggtatgaaggcttcacttccactatcccttattttaaatgtactgccttaaataaaccttgtccttcctaacctccaaagatttacctttatccagttaatcttccttcttatgtatccctttgaatggtccttctatatcgtccttaattgttctaccctg

SEQ ID NO: 312211 - DNA, 265 bp, Homo sapiens
ctggcaaggagagctaattagctttacagggagaagaaaacctgaatttccacaatgtcaataaatattagaaattaatggaatgtcaaattgctttctataatagaaaaaataatgagaaaactacactaccttttgttgttgtttctcattaactaaccatcacttcctgcctcatcatgatagggcctcaccacagcctgcatccagccagcaaatgagaaaaaggagaatagaagtagttgatttccttcttaaaatccat

SEQ ID NO: 312212 - DNA, 1069 bp, Homo sapiens
taattcttcagctaaaacagcggaagaggtgatttattatatggttgttacactcggccacaaataaacacagaaatagtccagaatgtcacaggtccagggcagagaaccacactttatataaagtagtttttgcatttgtttattgaatgatgcatcttcttcggtgaaatatttatatgcataaatggcaaaggaaagaaataatatatatttttatgtcattgagcaatattttttaatgtgtacctgtcttatggaagaaatatgcaggtatataagaccacgattttctaaagtgcatattagaatttttgtttttgtaaatggttaaatacatttcctgggtaacttaggaaattaagtttttcataaggcaacagatggttaaactgattgtcatgaatacccaaagatcatgtatataatcgaagtgtattagtaccatcccaaggtgtttttctcatttaacatatttgtttcataattcagcaagtacagatgcaagcgcattgcacactttttcctttctaaacttaaagacaagtcaaaaagccattcttagaactagaggatttaagagggtaggaattagggtttgtatatatgtatatatgggacattttatcttctggcccaaagtcagaactttataaaaatcttgagtttgttcactaatgtgaaataagctatgtgtccagggtattgctcccctgagtgtatatgagtgctgagtagtattgcagagaatgtgatgagttattcactgtcacaactttttctatagaaaacaggggctgctttttaaactctcactatgggcactttaccaaaatacttccatatcaattatttgaactcggtagttgtttgacctagttagatgtggtgtttattcaagtttgtatgaaatcatgtttgacaatactgtaaattaggttaattttgtaagtcttagcatcatcatattgtgctgttttggataacacgtttgttacaagcatttaaactgtttcatttggtagtacctttacattgaaataaattgtgtttgtgcctccaaacaaaa

SEQ ID NO: 312213 - DNA, 2527 bp, Homo sapiens
tggggggatgctgtgtgggtttcaagaagacgccacgcctccgccgccgccacgcccccgccgcctccaccgccggctgccgcgcccggaggaggtcgggatgttatcacttccgccggggcttctcactgcgtccgggtcagctgctgccgccgacgccgtaccgctgcggccgggggattgggccggggtctccaccgccgaccgaggggagcgggctccgctcggccctgctttttgcgacctggccgtcagccccacgtcgccggcctggaggggcgaagaggacgagggggccaaggcttcctccggggacattggctccctggattatcaagagtttgtagttgacattgaatccaggctgaggatggaaggtgtggaacttaaagaagaatggcaagatgaagattttccgatacctttaccagaagatgatagtattgaagcagatatactagctataactggaccagaggaccagcctggctcactagaagttaatggaaataaagtgagaaagaaactaatggctccagacattagcctgacactggatcctagtgatggctctgtattgtcagatgatttggatgaaagtggggagattgacttagatggcttagacacaccgtcagagaatagtaatgagtttgagtgggaagatgatcttccaaaacccaagactactgaagtaattaggaaaggctcaattactgaatacacagcagcagaggaaaaagaagatggacgacgctggcgtatgttcaggattggagaacaggaccacagggttgatatgaaggcaattgaaccctataaaaaagttatcagccatgggggatattatggggatggattaaatgccattgttgtgtttgctgtctgtttcatgcctgaaagtagtcagcctaactatagatacctgatggacaatctttttaaatatgttattggcactttggagctattagtagcagaaaactacatgatagtttatttaaatggtgcaacaactcgaagaaaaatgcccagtctgggatggctcaggaaatgttatcagcaaattgatagaaggttacggaaaaatctaaaatccctaatcattgtacatccttcttggtttatcagaacacttctggctgttacaagaccatttattagctcgaaattcagccaaaaaattagatacgtgtttaatttggcagaactagcagaacttgtccccatggaatacgttggcataccagaatgcataaaacaagttgatcaagaacttaatggaaaacaagatgaaccgaaaaatgaacagtaagtttggcatctagtccaaacaagactgaagaatgtgctgatggagcagtgctgtttctgcattcataatgcatttattggcccatatttttatgtaacctgttacaaaatagacttgactttttcataatggacttttgtattatacaagggactgttcactgctgtactggtttgcaaatttcttgaatttagctctttaatagctaactgtattattatcgttttatattttatattgctaaatagagaaccacactttatataaagtagtttttgcatttgtttattgaatgatgcatcttcttcggtgaaatatttatatgcataaatggcaaaggaaagaaataatatatatttttatgtcattgagcaatattttttaatgtgtacctgtcttatggaagaaatatgcaggtatataagaccacgattttctaaagtgcatattagaatttttgtttttgtaaatggttaaatacatttcctgggtaacttaggaaattaagtttttcataaggcaacagatggttaaactgattgtcatgaatacccaaagatcatgtatataatcgaagtgtattagtaccatcccaaggtgtttttctcatttaacatatttgtttcataattcagcaagtacagatgcaagcgcattgcacactttttcctttctaaacttaaagacaagtcaaaaagccattcttagaactagaggatttaagagggtaggaattagggtttgtatatatgtatatatgggacattttatcttctggcccaaagtcagaactttataaaaatcttgagtttgttcactaatgtgaaataagctatgtgtccagggtattgctcccctgagtgtatatgagtgctgagtagtattgcagagaatgtgatgagttattcactgtcacaactttttctatagaaaacaggggctgctttttaaactctcactatgggcactttaccaaaatacttccatatcaattatttgaactcggtagttgtttgacctagttagatgtggtgtttattcaagtttgtatgaaatcatgtttgacaatactgtaaattaggttaattttgtaagtcttagcatcatcatattgtgctgttttggataacacgtttgttacaagcatttaaactgtttcatttggtagtacctttacattgaaataaattgtgtttgtgcctccaaacaaaa

SEQ ID NO: 312214 - DNA, 2563 bp, Homo sapiens
tggggggatgctgtgtgggtttcaagaagacgccacgcctccgccgccgccacgcccccgccgcctccaccgccggctgccgcgcccggaggaggtcgggatgttatcacttccgccggggcttctcactgcgtccgggtcagctgctgccgccgacgccgtaccgctgcggccgggggattgggccggggtctccaccgccgaccgaggggagcgggctccgctcggccctgctttttgcgacctggccgtcagccccacgtcgccggcctggaggggcgaagaggacgagggggccaaggcttcctccggggacattggctccctggattatcaagagtttgtagttgacattgaatccaggctgaggatggaaggtgtggaacttaaagaagaatggcaagatgaagattttccgatacctttaccagaagatgatagtattgaagcagatatactagctataactggaccagaggaccagcctggctcactagaagttaatggaaataaagtgagaaagaaactaatggctccagacattagcctgacactggatcctagtgatggctctgtattgtcagatgatttggatgaaagtggggagattgacttagatggcttagacacaccgtcagagaatagtaatgagtttgagtgggaagatgatcttccaaaacccaagactactgaagtaattaggaaaggctcaattactgaatacacagcagcagaggaaaaagaagatggacgacgctggcgtatgttcaggattggagaacaggaccacagggttgatatgaaggcaattgaaccctataaaaaagttatcagccatgggggatattatggggatggattaaatgccattgttgtgtttgctgtctgtttcatgcctgaaagtagtcagcctaactatagatacctgatggacaatctttttaaatatgttattggcactttggagctattagtagcagaaaactacatgatagtttatttaaatggtgcaacaactcgaagaaaaatgcccagtctgggatggctcaggaaatgttatcagcaaattgatagaaggttacggaaaaatctaaaatccctaatcattgtacatccttcttggtttatcagaacacttctggctgttacaagaccatttattagctcgaaattcagccaaaaaattagatacgtgtttaatttggcagaactagcagaacttgtccccatggaatacgttggcataccagaatgcataaaacagtatgaagaagaaaagtttaaaaagaaacaaaaaagagttgatcaagaacttaatggaaaacaagatgaaccgaaaaatgaacagtaagtttggcatctagtccaaacaagactgaagaatgtgctgatggagcagtgctgtttctgcattcataatgcatttattggcccatatttttatgtaacctgttacaaaatagacttgactttttcataatggacttttgtattatacaagggactgttcactgctgtactggtttgcaaatttcttgaatttagctctttaatagctaactgtattattatcgttttatattttatattgctaaatagagaaccacactttatataaagtagtttttgcatttgtttattgaatgatgcatcttcttcggtgaaatatttatatgcataaatggcaaaggaaagaaataatatatatttttatgtcattgagcaatattttttaatgtgtacctgtcttatggaagaaatatgcaggtatataagaccacgattttctaaagtgcatattagaatttttgtttttgtaaatggttaaatacatttcctgggtaacttaggaaattaagtttttcataaggcaacagatggttaaactgattgtcatgaatacccaaagatcatgtatataatcgaagtgtattagtaccatcccaaggtgtttttctcatttaacatatttgtttcataattcagcaagtacagatgcaagcgcattgcacactttttcctttctaaacttaaagacaagtcaaaaagccattcttagaactagaggatttaagagggtaggaattagggtttgtatatatgtatatatgggacattttatcttctggcccaaagtcagaactttataaaaatcttgagtttgttcactaatgtgaaataagctatgtgtccagggtattgctcccctgagtgtatatgagtgctgagtagtattgcagagaatgtgatgagttattcactgtcacaactttttctatagaaaacaggggctgctttttaaactctcactatgggcactttaccaaaatacttccatatcaattatttgaactcggtagttgtttgacctagttagatgtggtgtttattcaagtttgtatgaaatcatgtttgacaatactgtaaattaggttaattttgtaagtcttagcatcatcatattgtgctgttttggataacacgtttgttacaagcatttaaactgtttcatttggtagtacctttacattgaaataaattgtgtttgtgcctccaaacaaaa

SEQ ID NO: 312215 - DNA, 3758 bp, Homo sapiens
tggggggatgctgtgtgggtttcaagaagacgccacgcctccgccgccgccacgcccccgccgcctccaccgccggctgccgcgcccggaggaggtcgggatgttatcacttccgccggggcttctcactgcgtccgggtcagctgctgccgccgacgccgtaccgctgcggccgggggattgggccggggtctccaccgccgaccgaggggagcgggctccgctcggccctgctttttgcgacctggccgtcagccccacgtcgccggcctggaggggcgaagaggacgagggggccaaggcttcctccggggacattggctccctggattatcaagagtttgtagttgacattgaatccaggctgaggatggaaggtgtggaacttaaagaagaatggcaagatgaagattttccgatacctttaccagaagatgatagtattgaagcagatatactagctataactggaccagaggaccagcctggctcactagaagttaatggaaataaagtgagaaagaaactaatggctccagacattagcctgacactggatcctagtgatggctctgtattgtcagatgatttggatgaaagtggggagattgacttagatggcttagacacaccgtcagagaatagtaatgagtttgagtgggaagatgatcttccaaaacccaagactactgaagtaattaggaaaggctcaattactgaatacacagcagcagaggaaaaagaagatggacgacgctggcgtatgttcaggattggagaacaggaccacagggttgatatgaaggcaattgaaccctataaaaaagttatcagccatgggggatattatggggatggattaaatgccattgttgtgtttgctgtctgtttcatgcctgaaagtagtcagcctaactatagatacctgatggacaatctttttaaatatgttattggcactttggagctattagtagcagaaaactacatgatagtttatttaaatggtgcaacaactcgaagaaaaatgcccagtctgggatggctcaggaaatgttatcagcaaattgatagaaggttacggaaaaatctaaaatccctaatcattgtacatccttcttggtttatcagaacacttctggctgttacaagaccatttattagctcgaaattcagccaaaaaattagatacgtgtttaatttggcagaactagcagaacttgtccccatggaatacgttggcataccagaatgcataaaacaagttgatcaagaacttaatggaaaacaagatgaaccgaaaaatgaacagtaagtttggcatctagtccaaacaagactgaagaatgtgctgatggagcagtgctgtttctgcattcataatgcatttattggcccatatttttatgtaacctgttacaaaatagacttgactttttcataatggacttttgtattatacaagggactgttcactgctgtactggtttgcaaatttcttgaatttagctctttaatagctaactgtattattatcgttttatattttatattgctaaatagagaaccacactttatataaagtagtttttgcatttgtttattgaatgatgcatcttcttcggtgaaatatttatatgcataaatggcaaaggaaagaaataatatatatttttatgtcattgagcaatattttttaatgtgtacctgtcttatggaagaaatatgcaggtatataagaccacgattttctaaagtgcatattagaatttttgtttttgtaaatggttaaatacatttcctgggtaacttaggaaattaagtttttcataaggcaacagatggttaaactgattgtcatgaatacccaaagatcatgtatataatcgaagtgtattagtaccatcccaaggtgtttttctcatttaacatatttgtttcataattcagcaagtacagatgcaagcgcattgcacactttttcctttctaaacttaaagacaagtcaaaaagccattcttagaactagaggatttaagagggtaggaattagggtttgtatatatgtatatatgggacattttatcttctggcccaaagtcagaactttataaaaatcttgagtttgttcactaatgtgaaataagctatgtgtccagggtattgctcccctgagtgtatatgagtgctgagtagtattgcagagaatgtgatgagttattcactgtcacaactttttctatagaaaacaggggctgctttttaaactctcactatgggcactttaccaaaatacttccatatcaattatttgaactcggtagttgtttgacctagttagatgtggtgtttattcaagtttgtatgaaatcatgtttgacaatactgtaaattaggttaattttgtaagtcttagcatcatcatattgtgctgttttggataacacgtttgttacaagcatttaaactgtttcatttggtagtacctttacattgaaataaattgtgtttgtgcctccaaacaaaaagtttaattaccgacaaaattatttctaaaacaacagattgatctgatattgtgtcatatacttgaaaggctcatacacagctggtaagcataataccttccaaatttgaaggtcatggctactcttcaacccttcctgtaaggtattttacaaaacagtggcctagagtagcaaaattgaagtggatgtgagctaacctttcaagatttagtctatcctagattgaacacacatgtggctgtgaccattctcatgtacttacaaaccttctgttacaaaagggaactttcctatattttttgtcctcctcagtcctaaacttggcatgctaacttaaaaccagttataggagagagatgctggaggattcccaggatgaaacattcctcagcagcctcctgacttaactcagatccagcagctcttggcagatcctgaactaatgtcattacagtgaattgagccaaaacgattattgcttgctcacattttaggaacactttttgttgaagaagcaaactaacaataacaagttaggcattccttctgaatttaccatataaggattatgtataaacaattatattgaatttgtcattagattctatatttgtagacgatttaacgtagtctttcatctgtacatctttatcttgttcaaaatgggctgaggtttttaataggtggttttctaccacattaagtacttggttcttcattttaaaaaatatgaagaataacttcaactcttttttgcattattttgatttttgattttgcagtcattgctcctaactgtagatacatgttgcaaaagtgatgtttttctgaattttttttaaaagtagaagactattctgttaaacattaaaattcagagacaacagtgataacacctgggatataatgaaaatgaggtgctgtgaatcagtaaactaaagggatacctgctttaacctgcaccttaatggaatctggtatagagatgtacccacaataaatgttttataagatttaagatcataatagtaggttagaggaagagcatttattaagtctgttgtttctaatctatagctaagttaacatctcccatattattccattttaatttcccattactgaccaaggtgaaagtatatgtgactgtacttttatctttctgttgggatcatggatctaatttaactggcttaatttgatgcttctgtcactaggctctaagtgccc

SEQ ID NO: 312216 - DNA, 2407 bp, Homo sapiens
gtttgtatttggcagtttggccccccaccccgtcgcttttccgtttctggtagttgtgctcgggatggaaccttgcccctcctccgctcccccacccttttaccctggtgtgggtgaagtggctgggctacgatggttcagtatttatgaccagcgtccgtcctggtacagaacaaagaaacttggacttctggacattggctccctggattatcaagagtttgtagttgacattgaatccaggctgaggatggaaggtgtggaacttaaagaagaatggcaagatgaagattttccgatacctttaccagaagatgatagtattgaagcagatatactagctataactggaccagaggaccagcctggctcactagaagttaatggaaataaagtgagaaagaaactaatggctccagacattagcctgacactggatcctagtgatggctctgtattgtcagatgatttggatgaaagtggggagattgacttagatggcttagacacaccgtcagagaatagtaatgagtttgagtgggaagatgatcttccaaaacccaagactactgaagtaattaggaaaggctcaattactgaatacacagcagcagaggaaaaagaagatggacgacgctggcgtatgttcaggattggagaacaggaccacagggttgatatgaaggcaattgaaccctataaaaaagttatcagccatgggggatattatggggatggattaaatgccattgttgtgtttgctgtctgtttcatgcctgaaagtagtcagcctaactatagatacctgatggacaatctttttaaatatgttattggcactttggagctattagtagcagaaaactacatgatagtttatttaaatggtgcaacaactcgaagaaaaatgcccagtctgggatggctcaggaaatgttatcagcaaattgatagaaggttacggaaaaatctaaaatccctaatcattgtacatccttcttggtttatcagaacacttctggctgttacaagaccatttattagctcgaaattcagccaaaaaattagatacgtgtttaatttggcagaactagcagaacttgtccccatggaatacgttggcataccagaatgcataaaacaagttgatcaagaacttaatggaaaacaagatgaaccgaaaaatgaacagtaagtttggcatctagtccaaacaagactgaagaatgtgctgatggagcagtgctgtttctgcattcataatgcatttattggcccatatttttatgtaacctgttacaaaatagacttgactttttcataatggacttttgtattatacaagggactgttcactgctgtactggtttgcaaatttcttgaatttagctctttaatagctaactgtattattatcgttttatattttatattgctaaatagagaaccacactttatataaagtagtttttgcatttgtttattgaatgatgcatcttcttcggtgaaatatttatatgcataaatggcaaaggaaagaaataatatatatttttatgtcattgagcaatattttttaatgtgtacctgtcttatggaagaaatatgcaggtatataagaccacgattttctaaagtgcatattagaatttttgtttttgtaaatggttaaatacatttcctgggtaacttaggaaattaagtttttcataaggcaacagatggttaaactgattgtcatgaatacccaaagatcatgtatataatcgaagtgtattagtaccatcccaaggtgtttttctcatttaacatatttgtttcataattcagcaagtacagatgcaagcgcattgcacactttttcctttctaaacttaaagacaagtcaaaaagccattcttagaactagaggatttaagagggtaggaattagggtttgtatatatgtatatatgggacattttatcttctggcccaaagtcagaactttataaaaatcttgagtttgttcactaatgtgaaataagctatgtgtccagggtattgctcccctgagtgtatatgagtgctgagtagtattgcagagaatgtgatgagttattcactgtcacaactttttctatagaaaacaggggctgctttttaaactctcactatgggcactttaccaaaatacttccatatcaattatttgaactcggtagttgtttgacctagttagatgtggtgtttattcaagtttgtatgaaatcatgtttgacaatactgtaaattaggttaattttgtaagtcttagcatcatcatattgtgctgttttggataacacgtttgttacaagcatttaaactgtttcatttggtagtacctttacattgaaataaattgtgtttgtgcctccaaacaaaa

SEQ ID NO: 312217 - DNA, 3272 bp, Homo sapiens
tggggggatgctgtgtgggtttcaagaagacgccacgcctccgccgccgccacgcccccgccgcctccaccgccggctgccgcgcccggaggaggtcgggatgttatcacttccgccggggcttctcactgcgtccgggtcagctgctgccgccgacgccgtaccgctgcggccgggggattgggccggggtctccaccgccgaccgaggggagcgggctccgctcggccctgctttttgcgacctggccgtcagccccacgtcgccggcctggaggggcgaagaggacgagggggccaaggcttcctccggggacattggctccctggattatcaagagtttgtagttgacattgaatccaggctgaggatggaaggtgtggaacttaaagaagaatggcaagatgaagattttccgatacctttaccagaagatgatagtattgaagcagatatactagctataactggaccagaggaccagcctggctcactagaagttaatggaaataaagtgagaaagaaactaatggctccagacattagcctgacactggatcctagtgatggctctgtattgtcagatgatttggatgaaagtggggagattgacttagatggcttagacacaccgtcagagaatagtaatgagtttgagtgggaagtcatttcctggaaggatattttccgttaacagctttgtcttggaaacaactaacatgcagtaggtttccccctccccccatcttttggtaaggactataatactgaaattttgaaaattattactacattgaaaatcagctaaactgcaatctcaaaacataaattacacttaatcattggtgcttatgctttggctaatgctaatttaaatagacttctgcatgtatacttcaaagtattataaatacatttctgctttataaactgatcaaatgagaagtgatcattgagtagttaaccacttcctatctggtattacagttaatttatgtgctcaacaacaacaaaattggctcccagatagctacttgaagtaacctatagtcataactgccagggagaatattgtcacaagttgaatctggaaaggcattgtaaggccagtgtactaagattttgatgactctacaaattatattttctgaacttgtggatacacgtttcactatgattaggtggtttttgctaaattgggcaataaaagttaaagaaccatgatttccaaagacataaaacagcctcatgttaagaataagccttttcctcctttatggaagagagattgaaaattgtgcagatggtataatgaaaattctctgtaaaatctaggtagtaaagtggttaacgtataatttgatttttgttgtgtaacaatttgtgattcaaaaactttgtattttgacaatgatcttccaaaacccaagactactgaagtaattaggaaaggctcaattactgaatacacagcagcagaggaaaaagaagatggacgacgctggcgtatgttcaggattggagaacaggaccacagggttgatatgaaggcaattgaaccctataaaaaagttatcagccatgggggatattatggggatggattaaatgccattgttgtgtttgctgtctgtttcatgcctgaaagtagtcagcctaactatagatacctgatggacaatctttttaaatatgttattggcactttggagctattagtagcagaaaactacatgatagtttatttaaatggtgcaacaactcgaagaaaaatgcccagtctgggatggctcaggaaatgttatcagcaaattgatagaaggttacggaaaaatctaaaatccctaatcattgtacatccttcttggtttatcagaacacttctggctgttacaagaccatttattagctcgaaattcagccaaaaaattagatacgtgtttaatttggcagaactagcagaacttgtccccatggaatacgttggcataccagaatgcataaaacaagttgatcaagaacttaatggaaaacaagatgaaccgaaaaatgaacagtaagtttggcatctagtccaaacaagactgaagaatgtgctgatggagcagtgctgtttctgcattcataatgcatttattggcccatatttttatgtaacctgttacaaaatagacttgactttttcataatggacttttgtattatacaagggactgttcactgctgtactggtttgcaaatttcttgaatttagctctttaatagctaactgtattattatcgttttatattttatattgctaaatagagaaccacactttatataaagtagtttttgcatttgtttattgaatgatgcatcttcttcggtgaaatatttatatgcataaatggcaaaggaaagaaataatatatatttttatgtcattgagcaatattttttaatgtgtacctgtcttatggaagaaatatgcaggtatataagaccacgattttctaaagtgcatattagaatttttgtttttgtaaatggttaaatacatttcctgggtaacttaggaaattaagtttttcataaggcaacagatggttaaactgattgtcatgaatacccaaagatcatgtatataatcgaagtgtattagtaccatcccaaggtgtttttctcatttaacatatttgtttcataattcagcaagtacagatgcaagcgcattgcacactttttcctttctaaacttaaagacaagtcaaaaagccattcttagaactagaggatttaagagggtaggaattagggtttgtatatatgtatatatgggacattttatcttctggcccaaagtcagaactttataaaaatcttgagtttgttcactaatgtgaaataagctatgtgtccagggtattgctcccctgagtgtatatgagtgctgagtagtattgcagagaatgtgatgagttattcactgtcacaactttttctatagaaaacaggggctgctttttaaactctcactatgggcactttaccaaaatacttccatatcaattatttgaactcggtagttgtttgacctagttagatgtggtgtttattcaagtttgtatgaaatcatgtttgacaatactgtaaattaggttaattttgtaagtcttagcatcatcatattgtgctgttttggataacacgtttgttacaagcatttaaactgtttcatttggtagtacctttacattgaaataaattgtgtttgtgcctccaaacaaaa

SEQ ID NO: 312218 - DNA, 2373 bp, Homo sapiens
gtttgtatttggcagtttggccccccaccccgtcgcttttccgtttctggtagttgtgctcgggatggaaccttgcccctcctccgctcccccacccttttaccctggtgtgggtgaagtggctgggctacgatggttcagtatttatgaccagcgtccgtcctggtacagaacaaagaaacttggacttctggacattggctccctggattatcaagagtttgtagttgacattgaatccaggctgaggatggaaggtgtggaacttaaagaagaatggcaagatgaagattttccgatacctttaccagaagatgatagtattgaagcagatatactagctataactggaccagaggaccagcctggctcactagaagttaatggaaataaagtgagaaagaaactaatggctccagacattagcctgacactggatcctagtgatggctctgtattgtcagatgatttggatgaaagtggggagattgacttagatggcttagacacaccgtcagagaatagtaatgagtttgagtgggaagatgatcttccaaaacccaagactactgaagtaattaggaaaggctcaattactgaatacacagcagcagaggaaaaagaagatggacgacgctggcgtatgttcaggattggagaacaggaccacagggttgatatgaaggcaattgaaccctataaaaaagttatcagccatgggggtttgctgtctgtttcatgcctgaaagtagtcagcctaactatagatacctgatggacaatctttttaaatatgttattggcactttggagctattagtagcagaaaactacatgatagtttatttaaatggtgcaacaactcgaagaaaaatgcccagtctgggatggctcaggaaatgttatcagcaaattgatagaaggttacggaaaaatctaaaatccctaatcattgtacatccttcttggtttatcagaacacttctggctgttacaagaccatttattagctcgaaattcagccaaaaaattagatacgtgtttaatttggcagaactagcagaacttgtccccatggaatacgttggcataccagaatgcataaaacaagttgatcaagaacttaatggaaaacaagatgaaccgaaaaatgaacagtaagtttggcatctagtccaaacaagactgaagaatgtgctgatggagcagtgctgtttctgcattcataatgcatttattggcccatatttttatgtaacctgttacaaaatagacttgactttttcataatggacttttgtattatacaagggactgttcactgctgtactggtttgcaaatttcttgaatttagctctttaatagctaactgtattattatcgttttatattttatattgctaaatagagaaccacactttatataaagtagtttttgcatttgtttattgaatgatgcatcttcttcggtgaaatatttatatgcataaatggcaaaggaaagaaataatatatatttttatgtcattgagcaatattttttaatgtgtacctgtcttatggaagaaatatgcaggtatataagaccacgattttctaaagtgcatattagaatttttgtttttgtaaatggttaaatacatttcctgggtaacttaggaaattaagtttttcataaggcaacagatggttaaactgattgtcatgaatacccaaagatcatgtatataatcgaagtgtattagtaccatcccaaggtgtttttctcatttaacatatttgtttcataattcagcaagtacagatgcaagcgcattgcacactttttcctttctaaacttaaagacaagtcaaaaagccattcttagaactagaggatttaagagggtaggaattagggtttgtatatatgtatatatgggacattttatcttctggcccaaagtcagaactttataaaaatcttgagtttgttcactaatgtgaaataagctatgtgtccagggtattgctcccctgagtgtatatgagtgctgagtagtattgcagagaatgtgatgagttattcactgtcacaactttttctatagaaaacaggggctgctttttaaactctcactatgggcactttaccaaaatacttccatatcaattatttgaactcggtagttgtttgacctagttagatgtggtgtttattcaagtttgtatgaaatcatgtttgacaatactgtaaattaggttaattttgtaagtcttagcatcatcatattgtgctgttttggataacacgtttgttacaagcatttaaactgtttcatttggtagtacctttacattgaaataaattgtgtttgtgcctccaaacaaaa

SEQ ID NO: 312219 - DNA, 1469 bp, Homo sapiens
acatttcttgccagtgtcctcctgcctttaaaaattctcttttctggttggggaaatgatgtttggtaactgtttttactatgtctgcttctttgcaaagctttgtctttaacagagtaatattctatgctaaaatagtcattatttttagaaagaaaattgttcagttgctggtttcttattttatatattcttcattaaacagagttgatcaagaacttaatggaaaacaagatgaaccgaaaaatgaacagtaagtttggcatctagtccaaacaagactgaagaatgtgctgatggagcagtgctgtttctgcattcataatgcatttattggcccatatttttatgtaacctgttacaaaatagacttgactttttcataatggacttttgtattatacaagggactgttcactgctgtactggtttgcaaatttcttgaatttagctctttaatagctaactgtattattatcgttttatattttatattgctaaatagagaaccacactttatataaagtagtttttgcatttgtttattgaatgatgcatcttcttcggtgaaatatttatatgcataaatggcaaaggaaagaaataatatatatttttatgtcattgagcaatattttttaatgtgtacctgtcttatggaagaaatatgcaggtatataagaccacgattttctaaagtgcatattagaatttttgtttttgtaaatggttaaatacatttcctgggtaacttaggaaattaagtttttcataaggcaacagatggttaaactgattgtcatgaatacccaaagatcatgtatataatcgaagtgtattagtaccatcccaaggtgtttttctcatttaacatatttgtttcataattcagcaagtacagatgcaagcgcattgcacactttttcctttctaaacttaaagacaagtcaaaaagccattcttagaactagaggatttaagagggtaggaattagggtttgtatatatgtatatatgggacattttatcttctggcccaaagtcagaactttataaaaatcttgagtttgttcactaatgtgaaataagctatgtgtccagggtattgctcccctgagtgtatatgagtgctgagtagtattgcagagaatgtgatgagttattcactgtcacaactttttctatagaaaacaggggctgctttttaaactctcactatgggcactttaccaaaatacttccatatcaattatttgaactcggtagttgtttgacctagttagatgtggtgtttattcaagtttgtatgaaatcatgtttgacaatactgtaaattaggttaattttgtaagtcttagcatcatcatattgtgctgttttggataacacgtttgttacaagcatttaaactgtttcatttggtagtacctttacattgaaataaattgtgtttgtgcctccaaacaaaa

SEQ ID NO: 312220 - DNA, 1830 bp, Homo sapiens
attatttccggttgtgattcatgttatacttttatagactacttataatctaagagatgatttctctaattgatcagtactaaagagcattctccaaacttgaacatagtgctcaacaaatttgagtaaactgatcatcaatattattattgaataatcatattgctaaataaataaaaatatttaaatcatcataaccttaatgttttccagtgactgaaattctgttctgattatcagattcacattcttccatgtaacttcttggacttggtagaaggctgttaacataaataactgagtattacaatgcatgtggaaaagtttctttgttctgctcacctgaggttttagtctatttaatgtatgaaagtcagatttattaagtaaatttttactttctacatcatgtagtaaatatttttggttttgctggaaaatttaaatgagtttatttttagtagcttttttcaagtttttattcattttcataacatgtatatttactgaaataactcttccctacaaaggtatgaagaagaaaagtttaaaaagaaacaaaaaagagttgatcaagaacttaatggaaaacaagatgaaccgaaaaatgaacagtaagtttggcatctagtccaaacaagactgaagaatgtgctgatggagcagtgctgtttctgcattcataatgcatttattggcccatatttttatgtaacctgttacaaaatagacttgactttttcataatggacttttgtattatacaagggactgttcactgctgtactggtttgcaaatttcttgaatttagctctttaatagctaactgtattattatcgttttatattttatattgctaaatagagaaccacactttatataaagtagtttttgcatttgtttattgaatgatgcatcttcttcggtgaaatatttatatgcataaatggcaaaggaaagaaataatatatatttttatgtcattgagcaatattttttaatgtgtacctgtcttatggaagaaatatgcaggtatataagaccacgattttctaaagtgcatattagaatttttgtttttgtaaatggttaaatacatttcctgggtaacttaggaaattaagtttttcataaggcaacagatggttaaactgattgtcatgaatacccaaagatcatgtatataatcgaagtgtattagtaccatcccaaggtgtttttctcatttaacatatttgtttcataattcagcaagtacagatgcaagcgcattgcacactttttcctttctaaacttaaagacaagtcaaaaagccattcttagaactagaggatttaagagggtaggaattagggtttgtatatatgtatatatgggacattttatcttctggcccaaagtcagaactttataaaaatcttgagtttgttcactaatgtgaaataagctatgtgtccagggtattgctcccctgagtgtatatgagtgctgagtagtattgcagagaatgtgatgagttattcactgtcacaactttttctatagaaaacaggggctgctttttaaactctcactatgggcactttaccaaaatacttccatatcaattatttgaactcggtagttgtttgacctagttagatgtggtgtttattcaagtttgtatgaaatcatgtttgacaatactgtaaattaggttaattttgtaagtcttagcatcatcatattgtgctgttttggataacacgtttgttacaagcatttaaactgtttcatttggtagtacctttacattgaaataaattgtgtttgtgcctccaaacaaaa

SEQ ID NO: 312221 - DNA, 1746 bp, Homo sapiens
attatttccggttgtgattcatgttatacttttatagactacttataatctaagagatgatttctctaattgatcagtactaaagagcattctccaaacttgaacatagtgctcaacaaatttgagtaaactgatcatcaatattattattgaataatcatattgctaaataaataaaaatatttaaatcatcataaccttaatgttttccagtgactgaaattctgttctgattatcagattcacattcttccatgtaacttcttggacttggtagaaggctgttaacataaataactgagtattacaatgcatgtggaaaagtttctttgttctgctcacctgaggttttagtctatttaatgtatgaaagtcagatttattaagtaaatttttactttctacatcatgtagtaaatatttttggttttgctggaaaatttaaatgagtttatttttagtagcttttttcaagtttttattcattttcataacatgtatatttactgaaataactcttccctacaaaggtatgaagaagaaaagtttaaaaagaaacaaaaaagagttgatcaagaacttaatggaaaacaagatgaaccgaaaaatgaacagtaagtttggcatctagtccaaacaagactgaagaatgtgctgatggagcagtgctgtttctgcattaagggactgttcactgctgtactggtttgcaaatttcttgaatttagctctttaatagctaactgtattattatcgttttatattttatattgctaaatagagaaccacactttatataaagtagtttttgcatttgtttattgaatgatgcatcttcttcggtgaaatatttatatgcataaatggcaaaggaaagaaataatatatatttttatgtcattgagcaatattttttaatgtgtacctgtcttatggaagaaatatgcaggtatataagaccacgattttctaaagtgcatattagaatttttgtttttgtaaatggttaaatacatttcctgggtaacttaggaaattaagtttttcataaggcaacagatggttaaactgattgtcatgaatacccaaagatcatgtatataatcgaagtgtattagtaccatcccaaggtgtttttctcatttaacatatttgtttcataattcagcaagtacagatgcaagcgcattgcacactttttcctttctaaacttaaagacaagtcaaaaagccattcttagaactagaggatttaagagggtaggaattagggtttgtatatatgtatatatgggacattttatcttctggcccaaagtcagaactttataaaaatcttgagtttgttcactaatgtgaaataagctatgtgtccagggtattgctcccctgagtgtatatgagtgctgagtagtattgcagagaatgtgatgagttattcactgtcacaactttttctatagaaaacaggggctgctttttaaactctcactatgggcactttaccaaaatacttccatatcaattatttgaactcggtagttgtttgacctagttagatgtggtgtttattcaagtttgtatgaaatcatgtttgacaatactgtaaattaggttaattttgtaagtcttagcatcatcatattgtgctgttttggataacacgtttgttacaagcatttaaactgtttcatttggtagtacctttacattgaaataaattgtgtttgtgcctccaaacaaaa

SEQ ID NO: 312222 - DNA, 1064 bp, Homo sapiens
aagcagtggtatcaacgcagagggcccattacggccgggaagcagtggtatcaacgcagagtgcccattacggccgggtatattttatattgctaaatagagaaccacactttatataaagtagtttttgcatttgtttattgaatgatgcatcttcttcggtgaaatatttatatgcataaatggcaaaggaaagaaataatatatatttttatgtcattgagcaatattttttaatgtgtacctgtcttatggaagaaatatgcaggtatataagaccacgattttctaaagtgcatattagaatttttgtttttgtaaatggttaaatacatttcctgggtaacttaggaaattaagtttttcataaggcaacagatggttaaactgattgtcatgaatacccaaagatcatgtatataatcgaagtgtattagtaccatcccaaggtgtttttctcatttaacatatttgtttcataattcagcaagtacagatgcaagcgcattgcacactttttcctttctaaacttaaagacaagtcaaaaagccattcttagaactagaggatttaagagggtaggaattagggtttgtatatatgtatatatgggacattttatcttctggcccaaagtcagaactttataaaaatcttgagtttgttcactaatgtgaaataagctatgtgtccagggtattgctcccctgagtgtatatgagtgctgagtagtattgcagagaatgtgatgagttattcactgtcacaactttttctatagaaaacaggggctgctttttaaactctcactatgggcactttaccaaaatacttccatatcaattatttgaactcggtagttgtttgacctagttagatgtggtgtttattcaagtttgtatgaaatcatgtttgacaatactgtaaattaggttaattttgtaagtcttagcatcatcatattgtgctgttttggataacacgtttgttacaagcatttaaactgtttcatttggtagtacctttacattgaaataaattgtgtttgtgcctccaaacaaaa

SEQ ID NO: 312223 - DNA, 354 bp, Homo sapiens
tgtgtgtgtgtgttttttttttaaactccaggttacggaaaaatctaaaatccctaatcattgtacatccttcttggtttatcagaacacttctggctgttacaagaccatttattaggtaatttttgagagccattgactttaattttattttttttatttatttatttttagttaacacataataactatacatacttatgggatacagagctatattttgatatgtgtatacattgtataatgatcaaacctgggtgattagtacatccatcacctcagacatttatcatctttttgtgttttgaacattcaaaatgacatgatttttgtatcttgtaaacattgtatcca

SEQ ID NO: 312224 - DNA, 644 bp, Homo sapiens
agaggaaacccagagagttacccttggtagggggagccatagaacctgctcgggaggtgcttcctggatccccgccctgcttaggtccccgcccttggcttgggtcctgtttgtatttggcagtttggccccccaccccgtcgcttttccgtttctggtagttgtgctcgggatggaaccttgcccctcctccgctcccccacccttttaccctggtgtgggtgaagtggctgggctacgatggttcagtatttatgaccagcgtccgtcctggtacagaacaaagaaacttggacttctggtatgcctcgtaaccgcggggaatagacacggaagcagcataagtaatcagggctttaatagatcttccctagtacgctaaaccaaatacagagtgtgtacgtcaaaagccgagtccccgcgtgaatctagacacaaccctttctgtttaaatacctggcaaaatggtttggatttctggatgcatttcatgccgctggagagttacttgtctgtgtcttgtgagctctttgacgaaacagcttttccggtgttgcatcaagatagttacggtgcctcctatttatttaattgaataaactatgtgattgcattttagtgttgcttttttcattctcaccttc

SEQ ID NO: 312225 - DNA, 2301 bp, Homo sapiens
tggggggatgctgtgtgggtttcaagaagacgccacgcctccgccgccgccacgcccccgccgcctccaccgccggctgccgcgcccggaggaggtcgggatgttatcacttccgccggggcttctcactgcgtccgggtcagctgctgccgccgacgccgtaccgctgcggccgggggattgggccggggtctccaccgccgaccgaggggagcgggctccgctcggccctgctttttgcgacctggccgtcagccccacgtcgccggcctggaggggcgaagaggacgagggggccaaggcttcctccggggacattggctccctggattatcaagagtttgtagttgacattgaatccaggctgaggatggaaggtgtggaacttaaagaagaatggcaagatgaagattttccgatacctttaccagaagatgatagtattgaagcagatatactagctataactggaccagaggaccagcctggctcactagaagttaatggaaataaagtgagaaagaaactaatggctccagacattagcctgacactggatcctagtgatggctctgtattgtcagatgatttggatgaaagtggggagattgacttagatggcttagacacaccgtcagagaatagtaatgagtttgagtgggaagatgatcttccaaaacccaagactactgaagtaattaggaaaggctcaattactgaatacacagcagcagaggaaaaagaagatggacgacgctggcgtatgttcaggattggagaacaggaccacagggttgatatgaaggcaattgaaccctataaaaaagttatcagccatgggggatattatggggatggattaaatgccattgttgtgtttgctgtctgtttcatgcctgaaagtagtcagcctaactatagatacctgatggacaatctttttaaatatgttattggcactttggagctattagtagcagaaaactacatgatagtttatttaaatggtgcaacaactcgaagaaaaatgcccagtctgggatggctcaggaaatgttatcagcaaattgatagaaggttacggaaaaatctaaaatccctaatcattgtacatccttcttggtttatcagaacacttctggctgttacaagaccatttattagctcgaaattcagccaaaaaattagatacgtgtttaatttggcagaactagcagaacttgtccccatggaatacgttggcataccagaatgcataaaacaagttgatcaagaacttaatggaaaacaagatgaaccgaaaaatgaacagtaagtttggcatctagtccaaacaagactgaagaatgtgctgatggagcagtgctgtttctgcattcataatgcatttattggcccatatttttatgtaacctgttacaaaatagacttgactttttcataatggacttttgtattatacaagggactgttcactgctgtactggtttgcaaatttcttgaatttagctctttaatagctaactgtattattatcgtttaatttttgtttttgtaaatggttaaatacatttcctgggtaacttaggaaattaagtttttcataaggcaacagatggttaaactgattgtcatgaatacccaaagatcatgtatataatcgaagtgtattagtaccatcccaaggtgtttttctcatttaacatatttgtttcataattcagcaagtacagatgcaagcgcattgcacactttttcctttctaaacttaaagacaagtcaaaaagccattcttagaactagaggatttaagagggtaggaattagggtttgtatatatgtatatatgggacattttatcttctggcccaaagtcagaactttataaaaatcttgagtttgttcactaatgtgaaataagctatgtgtccagggtattgctcccctgagtgtatatgagtgctgagtagtattgcagagaatgtgatgagttattcactgtcacaactttttctatagaaaacaggggctgctttttaaactctcactatgggcactttaccaaaatacttccatatcaattatttgaactcggtagttgtttgacctagttagatgtggtgtttattcaagtttgtatgaaatcatgtttgacaatactgtaaattaggttaattttgtaagtcttagcatcatcatattgtgctgttttggataacacgtttgttacaagcatttaaactgtttcatttggtagtacctttacattgaaataaattgtgtttgtgcctccaaacaaaa

SEQ ID NO: 312226 - DNA, 3363 bp, Homo sapiens
  misc_feature (2950)..(2950): n is a, c, g, or t
tggggggatgctgtgtgggtttcaagaagacgccacgcctccgccgccgccacgcccccgccgcctccaccgccggctgccgcgcccggaggaggtcgggatgttatcacttccgccggggcttctcactgcgtccgggtcagctgctgccgccgacgccgtaccgctgcggccgggggattgggccggggtctccaccgccgaccgaggggagcgggctccgctcggccctgctttttgcgacctggccgtcagccccacgtcgccggcctggaggggcgaagaggacgagggggccaaggcttcctccggggacattggctccctggattatcaagagtttgtagttgacattgaatccaggctgaggatggaaggtgtggaacttaaagaagaatggcaagatgaagattttccgatacctttaccagaagatgatagtattgaagcagatatactagctataactggaccagaggaccagcctggctcactagaagttaatggaaataaagtgagaaagaaactaatggctccagacattagcctgacactggatcctagtgatggctctgtattgtcagatgatttggatgaaagtggggagattgacttagatggcttagacacaccgtcagagaatagtaatgagtttgagtgggaagatgatcttccaaaacccaagactactgaagtaattaggaaaggctcaattactgaatacacagcagcagaggaaaaagaagatggacgacgctggcgtatgttcaggattggagaacaggaccacagggttgatatgaaggcaattgaaccctataaaaaagttatcagccatgggggatattatggggatggattaaatgccattgttgtgtttgctgtctgtttcatgcctgaaagtagtcagcctaactatagatacctgatggacaatctttttaaatatgttattggcactttggagctattagtagcagaaaactacatgatagtttatttaaatggtgcaacaactcgaagaaaaatgcccagtctgggatggctcaggaaatgttatcagcaaattgatagaaggttacggaaaaatctaaaatccctaatcattgtacatccttcttggtttatcagaacacttctggctgttacaagaccatttattagctcgaaattcagccaaaaaattagatacgtgtttaatttggcagaactagcagaacttgtccccatggaatacgttggcataccagaatgcataaaacaagttgatcaagaacttaatggaaaacaagatgaaccgaaaaatgaacagtaagtttggcatctagtccaaacaagactgaagaatgtgctgatggagcagtgctgtttctgcattcataatgcatttattggcccatatttttatgtaacctgttacaaaatagacttgactttttcataatggacttttgtattatacaagggactgttcactgctgtactggtttgcaaatttcttgaatttagctctttaatagctaactgtattattatcgttttatattttatattgctaaatagagaaccacactttatataaagtagtttttgcatttgtttattgaatgatgcatcttcttcggtgaaatatttatatgcataaatggcaaaggaaagaaataatatatatttttatgtcattgagcaatattttttaatgtgtacctgtcttatggaagaaatatgcaggtatataagaccacgattttctaaagtgcatattagaatttttgtttttgtaaatggttaaatacatttcctgggtaacttaggaaattaagtttttcataaggcaacagatggttaaactgattgtcatgaatacccaaagatcatgtatataatcgaagtgtattagtaccatcccaaggtgtttttctcatttaacatatttgtttcataattcagcaagtacagatgcaagcgcattgcacactttttcctttctaaacttaaagacaagtcaaaaagccattcttagaactagaggatttaagagggtaggaattagggtttgtatatatgtatatatgggacattttatcttctggcccaaagtcagaactttataaaaatcttgagtttgttcactaatgtgaaataagctatgtgtccagggtattgctcccctgagtgtatatgagtgctgagtagtattgcagagaatgtgatgagttattcactgtcacaactttttctatagaaaacaggggctgctttttaaactctcactatgggcactttaccaaaatacttccatatcaattatttgaactcggtagttgtttgacctagttagatgtggtgtttattcaagtttgtatgaaatcatgtttgacaatactgtaaattaggttaattttgtaagtcttagcatcatcatattgtgctgttttggataacacgtttgttacaagcatttaaactgtttcatttggtagtacctttacattgaaataaattgtgtttgtgcctccaaacaaaaaaaaaaaaaaaaaaaaaaaaaaaaaaaaaaaaccgcggggcgctttttttgtggggggcggcgaaaaagagggcgttattgtgaggtgggcgcccgtgtggtccttcgcgtgtgtttcccttggccccatttttttgtgtccagcggtgggtaataacttcgtgcgcgggctccccctattttgtgggaggcgctcgatattaattttgccgatttagcgccccggtgttctcccccctgcttattattagtatcttcccgtcttacctccccccggggcattactacttctccccccgtccctgctagcacggcgcgcattatctctgtgtgtatccccaacgagaacttcttttcagcaataaccccttttcattctctctggcggacgatcaaatcctctgcgttgcgtcgtcggcccanagcacaacacagccccgccggcttttaccggcgcggtgtggtgtttttggtattgccgggacacacactcacgtctgcccaccacctattttatctcgcgaggaggtactctgttgtttcttcgaactcgactcgcgatgtttatccatactctccgtggtctctctcttgttgttaccccgggtatttacgtcgccccaccattttagacacactttctttgtagccccgcgttatatattactatcgagctctggattatctagtggtcccaccagtggtgacttccgcccagtcgcataactcgtttcttcaccggcgtcgccactaacacgatgcctagtgcggaacagcgccagcgctggacaacggggcttctaccttcccccttttcatctactattacgcgtgta

SEQ ID NO: 312227 - DNA, 2614 bp, Homo sapiens
tggggggatgctgtgtgggtttcaagaagacgccacgcctccgccgccgccacgcccccgccgcctccaccgccggctgccgcgcccggaggaggtcgggatgttatcacttccgccggggcttctcactgcgtccgggtcagctgctgccgccgacgccgtaccgctgcggccgggggattgggccggggtctccaccgccgaccgaggggagcgggctccgctcggccctgctttttgcgacctggccgtcagccccacgtcgccggcctggaggggcgaagaggacgagggggccaaggcttcctccggggacattggctccctggattatcaagagtttgtagttgacattgaatccaggctgaggatggaaggtgtggaacttaaagaagaatggcaagatgaagattttccgatacctttaccagaagatgatagtattgaagcagatatactagctataactggaccagaggaccagcctggctcactagaagttaatggaaataaagtgagaaagaaactaatggctccagacattagcctgacactggatcctagtgatggctctgtattgtcagatgatttggatgaaagtggggagattgacttagatggcttagacacaccgtcagagaatagtaatgagtttgagtgggaagtcatttcctggaaggatattttccgttaacagctttgtcttggaaacaactaacatgcagtaggtttccccctccccccatcttttgatgatcttccaaaacccaagactactgaagtaattaggaaaggctcaattactgaatacacagcagcagaggaaaaagaagatggacgacgctggcgtatgttcaggattggagaacaggaccacagggttgatatgaaggcaattgaaccctataaaaaagttatcagccatgggggatattatggggatggattaaatgccattgttgtgtttgctgtctgtttcatgcctgaaagtagtcagcctaactatagatacctgatggacaatctttttaaatatgttattggcactttggagctattagtagcagaaaactacatgatagtttatttaaatggtgcaacaactcgaagaaaaatgcccagtctgggatggctcaggaaatgttatcagcaaattgatagaaggttacggaaaaatctaaaatccctaatcattgtacatccttcttggtttatcagaacacttctggctgttacaagaccatttattagctcgaaattcagccaaaaaattagatacgtgtttaatttggcagaactagcagaacttgtccccatggaatacgttggcataccagaatgcataaaacaagttgatcaagaacttaatggaaaacaagatgaaccgaaaaatgaacagtaagtttggcatctagtccaaacaagactgaagaatgtgctgatggagcagtgctgtttctgcattcataatgcatttattggcccatatttttatgtaacctgttacaaaatagacttgactttttcataatggacttttgtattatacaagggactgttcactgctgtactggtttgcaaatttcttgaatttagctctttaatagctaactgtattattatcgttttatattttatattgctaaatagagaaccacactttatataaagtagtttttgcatttgtttattgaatgatgcatcttcttcggtgaaatatttatatgcataaatggcaaaggaaagaaataatatatatttttatgtcattgagcaatattttttaatgtgtacctgtcttatggaagaaatatgcaggtatataagaccacgattttctaaagtgcatattagaatttttgtttttgtaaatggttaaatacatttcctgggtaacttaggaaattaagtttttcataaggcaacagatggttaaactgattgtcatgaatacccaaagatcatgtatataatcgaagtgtattagtaccatcccaaggtgtttttctcatttaacatatttgtttcataattcagcaagtacagatgcaagcgcattgcacactttttcctttctaaacttaaagacaagtcaaaaagccattcttagaactagaggatttaagagggtaggaattagggtttgtatatatgtatatatgggacattttatcttctggcccaaagtcagaactttataaaaatcttgagtttgttcactaatgtgaaataagctatgtgtccagggtattgctcccctgagtgtatatgagtgctgagtagtattgcagagaatgtgatgagttattcactgtcacaactttttctatagaaaacaggggctgctttttaaactctcactatgggcactttaccaaaatacttccatatcaattatttgaactcggtagttgtttgacctagttagatgtggtgtttattcaagtttgtatgaaatcatgtttgacaatactgtaaattaggttaattttgtaagtcttagcatcatcatattgtgctgttttggataacacgtttgttacaagcatttaaactgtttcatttggtagtacctttacattgaaataaattgtgtttgtgcctccaaacaaaa

SEQ ID NO: 312228 - DNA, 1400 bp, Homo sapiens
tggggggatgctgtgtgggtttcaagaagacgccacgcctccgccgccgccacgcccccgccgcctccaccgccggctgccgcgcccggaggaggtcgggatgttatcacttccgccggggcttctcactgcgtccgggtcagctgctgccgccgacgccgtaccgctgcggccgggggattgggccggggtctccaccgccgaccgaggggagcgggctccgctcggccctgctttttgcgacctggccgtcagccccacgtcgccggcctggaggggcgaagaggacgagggggccaaggcttcctccggggacattggctccctggattatcaagagtttgtagttgacattgaatccaggctgaggatggaaggtgtggaacttaaagaagaatggcaagatgaagattttccgatacctttaccagaagatgatagtattgaagcagatatactagctataactggaccagaggaccagcctggctcactagaagttaatggaaataaagtgagaaagaaactaatggctccagacattagcctgacactggatcctagtgatggctctgtattgtcagatgatttggatgaaagtggggagattgacttagatggcttagacacaccgtcagagaatagtaatgagtttgagtgggaagatgatcttccaaaacccaagactactgaagtaattaggaaaggctcaattactgaatacacagcagcagaggaaaaagaagatggacgacgctggcgtatgttcaggattggagaacaggaccacagggttgatatgaaggcaattgaaccctataaaaaagttatcagccatgggggatattatggggatggattaaatgccattgttgtgtttgctgtctgtttcatgcctgaaagtagtcagcctaactatagatacctgatggacaatctttttaaatatgttattggcactttggagctattagtagcagaaaactacatgatagtttatttaaatggtgcaacaactcgaagaaaaatgcccagtctgggatggctcaggaaatgttatcagcaaattgatagaaggttacggaaaaatctaaaatccctaatcattgtacatccttcttggtttatcagaacacttctggctgttacaagaccatttattagctcgaaattcagccaaaaaattagatacgtgtttaatttggcagaactagcagaacttgtccccatggaatacgttggcataccagaatgcataaaacagtatgttttgttttatttccttaattgtattggatcttaacattttgatgtgcaatggataatacttttcaatactcattctttatgtattatattttataactgtgcgcgcgcgcgcgtgtgtgtgtgtgtgtaac

SEQ ID NO: 312229 - DNA, 1136 bp, Homo sapiens
agaaaggctttaggcaggccaagggagaaacctggctgatacgtggccccagacttggcttggcatgatgagccgtgtgacatcagacaagcccctcctcctgcctggctccatctcccaaaatgggatgggggaggagtgacggaggcagaatgcaaggttggctgtacgtggctgtgcgtggggcactggctgggaactttgcaagctctcttgtctgactctgcagtaacctgggagagggtctgatcccactttataggggacagagagggtcaaagaggctgaaaatctgcctggggccaagagggagaagcagagcagtcagcccaggtcctcctctggtgcccggtgcccctgaccttgctgagcactgagagcaaactgagttaacacgtagggaagcagaacgtgctgagtaacacacaacacataccagttccctgcctgttactcattttgccctcagccttgcacttccctcaggctcaagacaagggatgtggcatgtatgaggtgacaaagtcgtcaccaagtgagctactgccagctgtctgctttgtccaaagtactgtctctctctcatttagttttgctttcatctaactcagggctccatctggaagcagttgctcccaggcatgagcccagagatgtgtgaccaccccttgggtgcacagcaatgacaggtcctgcctcctccagccctcagctattaaggagggagtgatatattccacttaactgatggggaagctgaggctcagagatgtggcccacttgtgcccacaggcctgatttcctgcctcacacccaggctctagggcagtaggcttgttgctgacagcctgggcctaaccccatctgctcacctcatgttgcctgatctgctgatgcagggtggtaagttgagtgcagcccaacaggtggatggggactcctaaatatcccccaaatgctggactcactgccacccccacaaggacacatgggcatcctgtactgagactgcaagcacagcatatgggggacctctaagggccctaaggctgtgctgtccactatgaatgcactatgtaaattaaattcaaatgaacaaaaattaaaatttaaaatttgtccttcaatcacactgg

SEQ ID NO: 312230 - DNA, 2065 bp, Homo sapiens
agaaaggctttaggcaggccaagggagaaacctggctgatacgtggccccagacttggcttggcatgatgagccgtgtgacatcagacaagcccctcctcctgcctggctccatctcccaaaatgggatgggggaggagtgacggaggcagaatgcaaggttggctgtacgtggctgtgcgtggggcactggctgggaactttgcaagctctcttgtctgactctgcagtaacctgggagagggtctgatcccactttataggggacagagagggtcaaagaggctgaaaatctgcctggggccaagagggagaagcagagcagtcagcccaggtcctcctctggtgcccggtgcccctgaccttgctgagcactgagagcaaactgagttaacacgtagggaagcagaacgtgctgagtaacacacaacacataccagttccctgcctgttactcattttgccctcagccttgcacttccctcaggctcaagacaagggatgtggcatgtatgaggtgacaaagtcgtcaccaagtgagctactgccagctgtctgctttgtccaaagtactgtctctctctcatttagttttgctttcatctaactcagggctccatctggaagcagttgctcccaggcatgagcccagagatgtgtgaccaccccttgggtgcacagcaatgacaggtcctgcctcctccagccctcagctattaaggagggagtgatatattccacttaactgatggggaagctgaggctcagagatgtggcccacttgtgcccacaggcctgatttcctgcctcacacccaggctctagggcagtaggcttgttgctgacagcctgggcctaaccccatctgctcacctcatgttgcctgatctgctgatgcagggtggtaagttgagtgcagcccaacaggtggatggggactcctaaatatcccccaaatgctggactcactgccacccccacaaggacacatgggcatcctgtactgagactgcaagcacagcatatggggtctgtctccaagccctgtttccttctcaggcctactgcctccccagtgcctctgcctgtgtggtccacccttgggttcagcgctatgcctatgcagttggctccctccaatcctcaagctgagtgggtaaattacgctttgcagagtgagggttgccaccttcctaagcctggaacagactggacttgtatgcttgtaaatcacctggtcctcctttccctaggcgtgagtcgcctctgaagctttgccagtggggcattctggctccatctctgctcctccattttcttatccataaaatgtagataataatagtgctcccaaagggacaaaatgtagacctactctatgtgaggctctggcaccgttgcatacctccaggagtggggtgctcaccagcatccaggcagccccatctattgtggggtggcatcataggagcaacttgttttaggggaggagggagaaagccaaggaagggttaacccaggatctcaacaaatgtctggcaatgggattttcccacaatacggccaactgaaggccccttgagaactaagagttttcccatcctggagcttctcagccatctggccttaggaaaccacagtctttcctgcctcctggcttttgcaagctcttccatcactcccgcctgcacacaccttctattggaagtcctctcagattattcaggtcaaaaccaactctacatttatgggttcacccagttctggtcctcttgtgttacctcagcagcagcagcatgtgtgattttcctaaatccttgaggcactgaaggatgaagaaaaggacagtgggtgtggcactggggaagtggcttccagtcattagccacccagagctaacctcctctcttccctgaacttcagtttccccatcttccaaatgtgaaaatcgggcttggggacctctaagggccctaaggctgtgctgtccactatgaatgcactatgtaaattaaattcaaatgaacaaaaattaaaatttaaaatttgtccttcaatcacactgg

SEQ ID NO: 312231 - DNA, 1344 bp, Homo sapiens
  misc_feature (1)..(1): n is a, c, g, or t
  misc_feature (12)..(12): n is a, c, g, or t
  misc_feature (26)..(26): n is a, c, g, or t
  misc_feature (55)..(55): n is a, c, g, or t
ncctcccccctncccttttcgtcttnccgttaaggtggaggaggtcaccgatgtnaccattgtgcccacaggcctgatttcctgcctcacacccaggctctagggcagtaggcttgttgctgacagcctgggcctaaccccatctgctcacctcatgttgcctgatctgctgatgcagggtggtaagttgagtgcagcccaacaggtggatggggactcctaaatatcccccaaatgctggactcactgccacccccacaaggacacatgggcatcctgtactgagactgcaagcacagcatatggggtctgtctccaagccctgtttccttctcaggcctactgcctccccagtgcctctgcctgtgtggtccacccttgggttcagcgctatgcctatgcagttggctccctccaatcctcaagctgagtgggtaaattacgctttgcagagtgagggttgccaccttcctaagcctggaacagactggacttgtatgcttgtaaatcacctggtcctcctttccctaggcgtgagtcgcctctgaagctttgccagtggggcattctggctccatctctgctcctccattttcttatccataaaatgtagataataatagtgctcccaaagggacaaaatgtagacctactctatgtgaggctctggcaccgttgcatacctccaggagtggggtgctcaccagcatccaggcagccccatctattgtggggtggcatcataggagcaacttgttttaggggaggagggagaaagccaaggaagggttaacccaggatctcaacaaatgtctggcaatgggattttcccacaatacggccaactgaaggccccttgagaactaagagttttcccatcctggagcttctcagccatctggccttaggaaaccacagtctttcctgcctcctggcttttgcaagctcttccatcactcccgcctgcacacaccttctattggaagtcctctcagattattcaggtcaaaaccaactctacatttatgggttcacccagttctggtcctcttgtgttacctcagcagcagcagcatgtgtgattttcctaaatccttgaggcactgaaggatgaagaaaaggacagtgggtgtggcactggggaagtggcttccagtcattagccacccagagctaacctcctctcttccctgaacttcagtttccccatcttccaaatgtgaaaatcgggcttggggacctctaagggccctaaggctgtgctgtccactatgaatgcactatgtaaattaaattcaaatgaacaaaaattaaaatttaaaatttgtccttcaatcacactgg

SEQ ID NO: 312232 - DNA, 694 bp, Homo sapiens
  misc_feature (576)..(576): n is a, c, g, or t
  misc_feature (581)..(581): n is a, c, g, or t
  misc_feature (606)..(606): n is a, c, g, or t
  misc_feature (610)..(610): n is a, c, g, or t
  misc_feature (613)..(613): n is a, c, g, or t
  misc_feature (630)..(630): n is a, c, g, or t
  misc_feature (632)..(632): n is a, c, g, or t
  misc_feature (644)..(644): n is a, c, g, or t
  misc_feature (649)..(649): n is a, c, g, or t
  misc_feature (651)..(651): n is a, c, g, or t
ccccgactagcccgacaggcgcggtggtcggacgacagaccgtgtgtttccaaaatggcggcagcgatggatgtggataccccgagcggcaccaacagcggcgcgggcaagaagcgctttgaagtgaaaaagtggaatgcagtagccctctgggcctgggatattgtggttgataactgtgccatctgcaggaaccacattatggatctttgcatagaatgtcaagctaaccaggcgtccgctacttcagaagagtgtactgtcgcatggggagtctgtaaccatgcttttcacttccactgcatctctcgctggctcaaaacacgacaggtgtgtccattggacaacagagagtgggaattccaaaagtatgggcactaggaaaagacttcttccatcaagcttaattgttttgttattcatttaatgactttccctgctgttacctaattacaaattggatggaactgtgtttttttctgctttgttttttcagtttgctgtttctgtagccatattgtattctgtgtcaaataaagtccagttggattctaaaaaaaacaactgctttttttncctancattcagtgattactgtcaggctgntttncanacttggattttgacttngngctttagaaatncgggngnatgctgtgtccccgtgagcttaggggggttctggtggcgtacc

SEQ ID NO: 312233 - DNA, 637 bp, Homo sapiens
  misc_feature (636)..(636): n is a, c, g, or t
ccccgactagcccgacaggcgcggtggtcggacgacagaccgtgtgtttccaaaatggcggcagcgatggatgtggataccccgagcggcaccaacagcggcgcgggcaagaagcgctttgaagtgaaaaagtggaatgcagtagccctctgggcctgggatattgtggttgataactgtgccatctgcaggaaccacattatggatctttgcatagaatgtcaagctaaccaggcgtccgctacttcagaagagtgtactgtcgcatggggagtctgtaaccatgcttttcacttccactgcatctctcgctggctcaaaacacgacaggtgtgtccattggacaacagagagtgggaattccaaaagtatgggcactaggaaaagacttcttccatcaagcttaattgttttgttattcatttaatgactttccctgctgttacctaattacaaattggatggaactgtgtttttttctgctttgttttttcagtttgctgtttctgtagccatattgtattctgtgtcaaataaagtccagttggattctaaaaaaaaactatctctctcccgacacttgcagccgctctacctctcgttccccgcgtcgtgtcttgccactctgtcccaaana

SEQ ID NO: 312234 - DNA, 1794 bp, Homo sapiens
gtaaatgttcaggggtgctgtcacctccctgacacctcctttacagcccccttttccccagcgcgtggtatgctctgacttagttgggctctaccaggacaccgtactgctgcaaagtgctcagtgggtgaggtgggagagggagaagctgtcgaatacccttcggtgagcccgaccccaacacctgatggttaagaaaaatgtctctgctttctgccttttggaaattttgctctttctctttttcacagtgagttatacaagagtcagctgaaaagggatcttccaaaaggctgtcactctaagagaatatttgtcctcttgggtatccctagtgtactagctgtggattccactcttagttactgaattatatttttgtctttgtcaaaaaacatttcacaagataataatccatattatataatcccttaagttccatacatactttgggagacgtaccgaccagatttcagttgttattaaatgaagcttgtaaagcttttgttgttttgttagggtgagtaatttctgcccgtgccccaccacagtgcaccaatcacagacgaaatgaaggaagcacttgctgcgtctgtcctaatacgcacatgagcagggggagaagtgctcattgcagaagcattgtgattagcatctgcatgtcatgagcccacgccaaaaaactgcatgcagattgtccttttcccaaatctaagcagacttctagctccctgtcagttaccagtgttcttgatactcttgtctttttacttcttgtcttgattatgaaataagccttttgatgctctttaggctgcttgtgtgccgtttgtccctcataagaatacttccttttaccccaattttcttttatctcattccctaagacaaagtccctcacccattaaaggcacgtgaagtactgagctcttgtaatatcaatatgtctgtgaataaatctagaaataaagtttctttgaccagagctgagctgggtgtggggaggttggggaagtgcccgtctcagttctgggtgggcggcagtgaccatgcacttctctaccaagggctggggagaaggctctgctcctacaggtcgcattctccaggggcaggagggtgggagggaagctagagacccagaatggggatatttgaaatctgcattgatgaggggcctcctttcccaaagaaagtggaagtatccccttacaggctgaatgggaccaaggagccacattccacgttctcttaaatagaagagagctcagtgctggcacatactcctgtgcttcctgaatgatttcctttagtagtaatgacatttctaacaaatgctttgttggaaatacccttgcatctaaccaagatataatcagttgttgaacttttgcctctcgttgtcttcttttcttttcttgcccactatatgtcacccatgccactaccctgtgggacctgttgtcgctcgatggctgagcctgcatagagttatttttaataaaatatatgttttctttcagcatgcttttcacttccactgcatctctcgctggctcaaaacacgacaggtgtgtccattggacaacagagagtgggaattccaaaagtatgggcactaggaaaagacttcttccatcaagcttaattgttttgttattcatttaatgactttccctgctgttacctaattacaaattggatggaactgtgtttttttctgctttgttttttcagtttgctgtttctgtagccatattgtattctgtgtcaaataaagtccagttggattct

SEQ ID NO: 312235 - DNA, 474 bp, Homo sapiens
ccccgactagcccgacaggcgcggtggtcggacgacagaccgtgtgtttccaaaatggcggcagcgatggatgtggataccccgagcggcaccaacagcggcgcgggcaagaagcgctttgaagtgaaaaaggcatagaatgtcaagctaaccaggcgtccgctacttcagaagagtgtactgtcgcatggggagtctgtaaccatgcttttcacttccactgcatctctcgctggctcaaaacacgacaggtgtgtccattggacaacagagagtgggaattccaaaagtatgggcactaggaaaagacttcttccatcaagcttaattgttttgttattcatttaatgactttccctgctgttacctaattacaaattggatggaactgtgtttttttctgctttgttttttcagtttgctgtttctgtagccatattgtattctgtgtcaaataaagtccagttggattct

SEQ ID NO: 312236 - DNA, 656 bp, Homo sapiens
  misc_feature (538)..(538): n is a, c, g, or t
  misc_feature (543)..(543): n is a, c, g, or t
  misc_feature (568)..(568): n is a, c, g, or t
  misc_feature (572)..(572): n is a, c, g, or t
  misc_feature (575)..(575): n is a, c, g, or t
  misc_feature (592)..(592): n is a, c, g, or t
  misc_feature (594)..(594): n is a, c, g, or t
  misc_feature (606)..(606): n is a, c, g, or t
  misc_feature (611)..(611): n is a, c, g, or t
  misc_feature (613)..(613): n is a, c, g, or t
ccccgggctgcaggattcggcacgagcgatggatgtggataccccgagcggcaccaacagcggcgcgggcaagaagcgctttgaagtgaaaaagtggaatgcagtagccctctgggcctgggatattgtggttgataactgtgccatctgcaggaaccacattatggatctttgcatagaatgtcaagctaaccaggcgtccgctacttcagaagagtgtactgtcgcatggggagtctgtaaccatgcttttcacttccactgcatctctcgctggctcaaaacacgacaggtgtgtccattggacaacagagagtgggaattccaaaagtatgggcactaggaaaagacttcttccatcaagcttaattgttttgttattcatttaatgactttccctgctgttacctaattacaaattggatggaactgtgtttttttctgctttgttttttcagtttgctgtttctgtagccatattgtattctgtgtcaaataaagtccagttggattctaaaaaaaacaactgctttttttncctancattcagtgattactgtcaggctgntttncanacttggattttgacttngngctttagaaatncgggngnatgctgtgtccccgtgagcttaggggggttctggtggcgtacc

SEQ ID NO: 312237 - DNA, 256 bp, Homo sapiens
ccccgggctgcaggattcggcacgagacgacaggtgtgtccattggacaacagagagtgggaattccaaaagtatgggcactaggaaaagacttcttccatcaagcttaattgttttgttattcatttaatgactttccctgctgttacctaattacaaattggatggaactgtgtttttttctgctttgttttttcagtttgctgtttctgtagccatattgtattctgtgtcaaataaagtccagttggattct

SEQ ID NO: 312238 - DNA, 600 bp, Homo sapiens
actggagttcaggtgaaaataggccgccatgatcagggcagcccgaaagttcaaactgtctgagcccctgttgggagtgagcaggcggagctccctttcacaaccaccaatgacttttccctctcacctccctaataccaccaggcagctactggcacctgtcaggtgggcatggttgagtcagagggagagcctgtccctaagagggggcagtaggcaagaagtcctgtaagatggggaggggaaaggggaatcacagcgacagccaagctagtgtcagtgtcgtcacctaatcctggagcacactgtgatcacttaggttctaactaaagttgcttatgtgtttaagcaggttttatgtctcaaacaggaaattatcttggaattaatcagagtaatttactttgtctttcaggtatgggcactaggaaaagacttcttccatcaagcttaattgttttgttattcatttaatgactttccctgctgttacctaattacaaattggatggaactgtgtttttttctgctttgttttttcagtttgctgtttctgtagccatattgtattctgtgtcaaataaagtccagttggattct

SEQ ID NO: 312239 - DNA, 889 bp, Homo sapiens
tggccaaagagatgataactgcagctgcagcctgaggtcctaaagagtatgtgtgtgtgttacaagcagaatgcactgttccctctttttgtctttgcagtggaatgcagtagccctctgggcctgggatattgtggttgataactgtgccatctgcaggaaccacattatggatctttgtaagtaattggaggaggatgggaggaagttgagaaggttgcagagattgtggctatcttgatgtgactgattttcttcttcacacgaggagatagcaagcctactctgagcactcggtcttctgtatctagtctgttggtgtgtttgaaatagagtagtttttttatgatgtcctggaggcatacccagctctcagaataaatctactcaatctaaagatggcagggacacatttagaattaattgtggacgacaggcactgttgatttttcctgcatatcttccatcttgtacctagactcaaaggtagaaatagtgaaaggagaattgcttgaacctgggaggcagaggtggcagtgagccgagatcacaccactgcactacaacctgggcgacacagcaagactcaaagtctcaaaaaaaaaaaaaagtctatctgatctaatttttgctggtcattgtttacaaaggaaagaagcgttaaggagtgaggattttgtatgttaggcccaaacataataaaaaggaaatcattgccaacatctaaataaataattaattgcactaaagaaatttcatttaaatctccacatattttattacatgtagtggtcagcacatagtgatctgattatagtctttgatgaactgatttcctgtccttacagtagaagggacaagaatgttgatcacaccaggaacagttgag

SEQ ID NO: 312240 - DNA, 609 bp, Homo sapiens
ccccgactagcccgacaggcgcggtggtcggacgacagaccgtgtgtttccaaaatggcggcagcgatggatgtggataccccgagcggcaccaacagcggcgcgggcaagaagcgctttgaagtgaaaaagtggaatgcagtagccctctgggcctgggatattgtggttgataactgtgccatctgcaggaaccacattatggatctttgcatagaatgtcaagctaaccaggcgtccgctacttcagaagagtgtactgtcgcatggggagtctgtaaccatgcttttcacttccactgcatctctcgctggctcaaaacacgacaggtgtgtccattggacaacagagagtgggaattccaaaagtatgggcactaggaaaagacttcttccatcaagcttaattgttttgttattcatttaatgactttccctgctgttacctaattacaaattggatggaactgtgtttttttctgctttgttttttcagtttgctgtttctgtagccatattgtattctgtgtcaaataaagtccagttggattctaaaaaaaaaaaaaaaaacaaaaaaaaaaaaagaaaaaaaaaaaacaacaaagaaga

SEQ ID NO: 312241 - DNA, 606 bp, Homo sapiens
ccccgactagcccgacaggcgcggtggtcggacgacagaccgtgtgtttccaaaatggcggcagcgatggatgtggataccccgagcggcaccaacagcggcgcgggcaagaagcgctttgaagtgaaaaagtggaatgcagtagccctctgggcctgggatattgtggttgataactgtgccatctgcaggaaccacattatggatctttgcatagaatgtcaagctaaccaggcgtccgctacttcagaagagtgtactgtcgcatggggagtctgtaaccatgcttttcacttccactgcatctctcgctggctcaaaacacgacaggtgtgtccattggacaacagagagtgggaattccaaaagtatgggcactaggaaaagacttcttccatcaagcttaattgttttgttattcatttaatgactttccctgctgttacctaattacaaattggatggaactgtgtttttttctgctttgttttttcagtttgctgtttctgtagccatattgtattctgtgtcaaataaagtccagttggattctcccggagcggccagacaacctaaataaaaaaggaagaaaaatataaataatat

SEQ ID NO: 312242 - DNA, 634 bp, Homo sapiens
ccccgggctgcaggattcggcacgagcgatggatgtggataccccgagcggcaccaacagcggcgcgggcaagaagcgctttgaagtgaaaaaggttgggtctcgccagcgccttcctcagggaagctagagaggcgcggatctggctggcaggcccgaggatggtcgaggcgcggagtaaagggtttcatttcagggcgttcctgggaccggtggaatgcagtagccctctgggcctgggatattgtggttgataactgtgccatctgcaggaaccacattatggatctttgcatagaatgtcaagctaaccaggcgtccgctacttcagaagagtgtactgtcgcatggggagtctgtaaccatgcttttcacttccactgcatctctcgctggctcaaaacacgacaggtgtgtccattggacaacagagagtgggaattccaaaagtatgggcactaggaaaagacttcttccatcaagcttaattgttttgttattcatttaatgactttccctgctgttacctaattacaaattggatggaactgtgtttttttctgctttgttttttcagtttgctgtttctgtagccatattgtattctgtgtcaaataaagtccagttggattct

SEQ ID NO: 312243 - DNA, 463 bp, Homo sapiens
gcgggagccaagcgcttgagctgtcactggagtggttgagagtggaatgcagtagccctctgggcctgggatattgtggttgataactgtgccatctgcaggaaccacattatggatctttgcatagaatgtcaagctaaccaggcgtccgctacttcagaagagtgtactgtcgcatggggagtctgtaaccatgcttttcacttccactgcatctctcgctggctcaaaacacgacaggtgtgtccattggacaacagagagtgggaattccaaaagtatgggcactaggaaaagacttcttccatcaagcttaattgttttgttattcatttaatgactttccctgctgttacctaattacaaattggatggaactgtgtttttttctgctttgttttttcagtttgctgtttctgtagccatattgtattctgtgtcaaataaagtccagttggattct

SEQ ID NO: 312244 - DNA, 691 bp, Homo sapiens
tgaggaagccagagttgaatgaatgaaattctgttaaactcttactggaattattatcttaatagaagagtctaaacatataaaagttgagaacatcagtttattttatgtggaatgcagtagccctctgggcctgggatattgtggttgataactgtgccatctgcaggaaccacattatggatctttagacgggatctcgctttgttgcccaggctggtctcgaactggcttcaagtgatcctcccactttggccttccaaaatgttgcgattataggcgtgagccactgtggctggcctgaaattttctagtatccacattcataaagtaaaaagaaaataaaaaggcatagaatgtcaagctaaccaggcgtccgctacttcagaagagtgtactgtcgcatggggagtctgtaaccatgcttttcacttccactgcatctctcgctggctcaaaacacgacaggtgtgtccattggacaacagagagtgggaattccaaaagtatgggcactaggaaaagacttcttccatcaagcttaattgttttgttattcatttaatgactttccctgctgttacctaattacaaattggatggaactgtgtttttttctgctttgttttttcagtttgctgtttctgtagccatattgtattctgtgtcaaataaagtccagttggattct

SEQ ID NO: 312245 - DNA, 1559 bp, Homo sapiens
actggagttcaggtgaaaataggccgccatgatcagggcagcccgaaagttcaaactgtctgagcccctgttgggagtgagcaggcggagctccctttcacaaccaccaatgacttttccctctcacctccctaataccaccaggcagctactggcacctgtcaggtgggcatggttgagtcagagggagagcctgtccctaagagggggcagtaggcaagaagtcctgtaagatggggaggggaaaggggaatcacagcgacagccaagctagtgtcagtgtcgtcacctaatcctggagcacactgtgatcacttaggttctaactaaagttgcttatgtgtttaagcaggttttatgtctcaaacaggaaattatcttggaattaatcagagtaatttactttgtctttcaggtatgggcactaggaaaagacttcttccatcaagcttaattgttttgttattcatttaatgactttccctgctgttacctaattacaaattggatggaactgtgtttttttctgctttgttttttcagtttgctgtttctgtagccatattgtattctgtgtcaaataaagtccagttggattctggaacggatgctctctcttgtgtatgtgaacaaagtgaacataaatgaagagtctccccttccaaggctgaaaactcagcttttgaaagtgaaatgtttgttcatcggggccagagcagggttgtcctctgagcgcatcacttagtgacgaggaatccaacagctcaaggcagagtgtggatcaccggctcccgaaaacagcagtcagcccttctttctcctgtgtgacagcagtgggcagctgaaagagggaagaatgtgggattcagtcatcaaacccagttctgagtcctggttccacagcttgggtactgatggcaatcttggccaagttgtctctctactctggaactttcctcctctgtactgtgggcttctgaggactaagtggcatcatgtgggcacagagagaagctttgtaaaatgtaaaaccgctatacaaatgtgacctttggttgtgtatgacagcagtccccaacctttttgccaccagggattggtttcatggaagacgatttttccatggaccgggggtggggcgggggtgtgcttggggatggttttggaactgttccacctgagatcatgaggcagtagatggaccgcgcaacctagatccctcacatgcacggttcgccaatagggttgaagctcctatgagaatctaacgctgccgctgatgtgacaggcagagctcaggcggtaatgctcggtcaccaccctgctcacctcttgctgtacagccgggttcctagcaggccatggactggcatccactccgcagctcaagggttagggaagcctggtgtatgacatgttgctttctcttcttagcttagaaaaataaagatatatataatcttggctggcaaagggacaatttaagaactcaagttaaaaattgatattggctgggtatggtggctcatgcctataatcaggcgattacaaggtgagga

SEQ ID NO: 312246 - DNA, 1512 bp, Homo sapiens
ccccgactagcccgacaggcgcggtggtcggacgacagaccgtgtgtttccaaaatggcggcagcgatggatgtggataccccgagcggcaccaacagcggcgcgggcaagaagcgctttgaagtgaaaaagtggaatgcagtagccctctgggcctgggatattgtggttgataactgtgccatctgcaggaaccacattatggatctttgcatagaatgtcaagctaaccaggcgtccgctacttcagaagagtgtactgtcgcatggggagtctgtaaccatgcttttcacttccactgcatctctcgctggctcaaaacacgacaggtgtgtccattggacaacagagagtgggaattccaaaagtatgggcactaggaaaagacttcttccatcaagcttaattgttttgttattcatttaatgactttccctgctgttacctaattacaaattggatggaactgtgtttttttctgctttgttttttcagtttgctgtttctgtagccatattgtattctgtgtcaaataaagtccagttggattctggaacggatgctctctcttgtgtatgtgaacaaagtgaacataaatgaagagtctccccttccaaggctgaaaactcagcttttgaaagtgaaatgtttgttcatcggggccagagcagggttgtcctctgagcgcatcacttagtgacgaggaatccaacagctcaaggcagagtgtggatcaccggctcccgaaaacagcagtcagcccttctttctcctgtgtgacagcagtgggcagctgaaagagggaagaatgtgggattcagtcatcaaacccagttctgagtcctggttccacagcttgggtactgatggcaatcttggccaagttgtctctctactctggaactttcctcctctgtactgtgggcttctgaggactaagtggcatcatgtgggcacagagagaagctttgtaaaatgtaaaaccgctatacaaatgtgacctttggttgtgtatgacagcagtccccaacctttttgccaccagggattggtttcatggaagacgatttttccatggaccgggggtggggcgggggtgtgcttggggatggttttggaactgttccacctgagatcatgaggcagtagatggaccgcgcaacctagatccctcacatgcacggttcgccaatagggttgaagctcctatgagaatctaacgctgccgctgatgtgacaggcagagctcaggcggtaatgctcggtcaccaccctgctcacctcttgctgtacagccgggttcctagcaggccatggactggcatccactccgcagctcaagggttagggaagcctggtgtatgacatgttgctttctcttcttagcttagaaaaataaagatatatataatcttggctggcaaagggacaatttaagaactcaagttaaaaattgatattggctgggtatggtggctcatgcctataatcaggcgattacaaggtgagga

SEQ ID NO: 312247 - DNA, 553 bp, Homo sapiens
ccccgactagcccgacaggcgcggtggtcggacgacagaccgtgtgtttccaaaatggcggcagcgatggatgtggataccccgagcggcaccaacagcggcgcgggcaagaagcgctttgaagtgaaaaagtggaatgcagtagccctctgggcctgggatattgtggttgataactgtgccatctgcaggaaccacattatggatctttgcatagaatgtcaagctaaccaggcgtccgctacttcagaagagtgtactgtcgcatggggagtctgtaaccatgcttttcacttccactgcatctctcgctggctcaaaacacgacaggtgtgtccattggacaacagagagtgggaattccaaaagtatgggcactaggaaaagacttcttccatcaagcttaattgttttgttattcatttaatgactttccctgctgttacctaattacaaattggatggaactgtgtttttttctgctttgttttttcagtttgctgtttctgtagccatattgtattctgtgtcaaataaagtccagttggattct

SEQ ID NO: 312248 - DNA, 713 bp, Homo sapiens
ccccgactagcccgacaggcgcggtggtcggacgacagaccgtgtgtttccaaaatggcggcagcgatggatgtggataccccgagcggcaccaacagcggcgcgggcaagaagcgctttgaagtgaaaaagtggaatgcagtagccctctgggcctgggatattgtggttgataactgtgccatctgcaggaaccacattatggatctttagacgggatctcgctttgttgcccaggctggtctcgaactggcttcaagtgatcctcccactttggccttccaaaatgttgcgattataggcgtgagccactgtggctggcctgaaattttctagtatccacattcataaagtaaaaagaaaataaaaaggcatagaatgtcaagctaaccaggcgtccgctacttcagaagagtgtactgtcgcatggggagtctgtaaccatgcttttcacttccactgcatctctcgctggctcaaaacacgacaggtgtgtccattggacaacagagagtgggaattccaaaagtatgggcactaggaaaagacttcttccatcaagcttaattgttttgttattcatttaatgactttccctgctgttacctaattacaaattggatggaactgtgtttttttctgctttgttttttcagtttgctgtttctgtagccatattgtattctgtgtcaaataaagtccagttggattct

SEQ ID NO: 312249 - DNA, 955 bp, Homo sapiens
  misc_feature (659)..(659): n is a, c, g, or t
  misc_feature (720)..(720): n is a, c, g, or t
ccccgactagcccgacaggcgcggtggtcggacgacagaccgtgtgtttccaaaatggcggcagcgatggatgtggataccccgagcggcaccaacagcggcgcgggcaagaagcgctttgaagtgaaaaagtggaatgcagtagccctctgggcctgggatattgtggttgataactgtgccatctgcaggaaccacattatggatctttgcatagaatgtcaagctaaccaggcgtccgctacttcagaagagtgtactgtcgcatggggagtctgtaaccatgcttttcacttccactgcatctctcgctggctcaaaacacgacaggtgtgtccattggacaacagagagtgggaattccaaaagtatgggcactaggaaaagacttcttccatcaagcttaattgttttgttattcatttaatgactttccctgctgttacctaattacaaattggatggaactgtgtttttttctgctttgttttttcagtttgctgtttctgtagccatattgtattctgtgtcaaataaagtccagttggattctaaaaaaaaaaaaaaaaacaaaaaaaaaaaaattgcgggggcatttatgggcgggggggggaaaaaggggtaatgaaaggggccaaggggccaaacgcgtgtcccgngacccagtttccttgtgcacagagggggaaaactcggcggggacccccaaaagggagcgcngaatataaatcggaaaacccgggtaaccgggattagacaccatcagaacacgaaaggacccaccacacagcgcaggacacagagagagagaagaaaaaaacaaacagagagagcacaaaagcagagcacagaaaaaacaataacaatagagagaccaacacacaaaacgagcagacagaacagaaaacaacaagacatacacaacacagagaaaaaaaaaaaacaacaaagaaga

SEQ ID NO: 312250 - DNA, 467 bp, Homo sapiens
ccccgactagcccgacaggcgcggtggtcggacgacagaccgtgtgtttccaaaatggcggcagcgatggatgtggataccccgagcggcaccaacagcggcgcgggcaagaagcgctttgaagtgaaaaagtggaatgcagtagccctctgggcctgggatattgtggttgataactgtgccatctgcaggaaccacattatggatctttgcatagaatgtcaagctaaccaggcgtccgctacttcagaagagtgtactgtcgcatggggagtctgtaacgtatgggcactaggaaaagacttcttccatcaagcttaattgttttgttattcatttaatgactttccctgctgttacctaattacaaattggatggaactgtgtttttttctgctttgttttttcagtttgctgtttctgtagccatattgtattctgtgtcaaataaagtccagttggattct

SEQ ID NO: 312251 - DNA, 1544 bp, Homo sapiens
gtgacgtcgtggcgggtcactcactcggggatcgccgattgcgatcgtaggggtcttccttctctaacttgcctccaggagagaggacctggcctgcgctgctaatgggtagtccgttcgcagcaggaccagccctggcctaaggaaacaggaaagagtttgagacttccttctaaaggagccacgtttgagaaatgggatgcaggcctaagttaagaatgctacagaaaaatatcgatccctaagcgtatttactgttatgtgaatgtgtgtgtcaaaggacttaggtgctttgggggagaggagggtgaagacaggaatttattcattgagcgaatagttattaagcgcccactctattccagacaccgttctaggcattaggtgaacagcagtgaacaaaacagacggaaatctgtgtctacttgtagctcacattttagagaggaaggcacatactaagcaaagtaattagaaacatactgtattttaggtcgtgatagtcctgaagagaaacgtaaagcagggaagaagggtataaagtgacacaggaaggtcttgctgaaaagatgacttttaagtaaagggctgacagaagtgggagatttaaccacgcgaatatcttgggaaagtgcagtcagacagagggaccagccattgcagaggtcatgaagcagaaacgtgctagaatagcaaggaggcctgtagggcagagttgagtgaagggtttagtccttcactggagattaaatcaaggcgagcaggtcatgaagatcttgaggacatctaacttttattctaaatgaaataggactttggagcgttttgagcagtagagtgatgggctctgacttccttttaagagggtcactctttaaggaaaatacacagaggaggacgtggtaggagaaaggagaccaataagaagagttttgcaataatccagaggaagcataatggtggtttgactatgggtggtaagaaatggccagttatattcttgatgcacttaatttggatatgtaagagtattatagatgacagggttaattttatttaattaggctttggaggacacttgaaaaatgaattccagtgtgagtttcagagtggcaaacacaagttaaaatcatggctttgctatgtggtacttgaagggattcagataagtcatgtaattttcctggatctgtctataaaatggaaatcatatctgtcaagattgcaaaggttagggtatattataggtatttaatgacaaggtatgtaatgggtctagtctgcaaatcttaaccaggtaaaagatggccttattgtgaggtaagagggtcatgggaggccaaggcatactcctttttaaattttatggactctttactggggaggaaagtttttgtgttaatgacgatggtatttagaaatgcatggactggcctctcatagctgtccaccctatagtcattccttatagccatcctttaaaccctccaggaccccctatgtcctcatcagtaaagggaaagcaggctgtctggtaagggaaa

SEQ ID NO: 312252 - DNA, 2583 bp, Homo sapiens
ctgctatagtacgcgggtggctggacctacatgcttcctgctgtggctgtctcggaacccgtggtcctccgcttcatgattttctgccgtctcttggcaaaaatggcaaataatgatgctgttctgaagagactggagcagaagggtgcagaggcagatcaaatcattgaatatcttaagcagcaagtttctctacttaaggagaaagcaattttgcaggcaactttgagggaagagaagaaacttcgagttgaaaatgctaaactgaagaaagaaattgaagaactgaaacaagagctaattcaggcagaaattcaaaatggagtgaagcaaataccatttccatctggtactccactgcacgctaattctatggtttctgaaaatgtgatacagtctacagcagtaacaaccgtatcttctggtaccaaagaacagataaaaggaggaacaggagacgaaaagaaagcgaaagagaaaattgaaaagaaaggagagaagaaggagaaaaaacagcaatcaatagctggaagtgccgactctaagccaatagatgtttcccgtctggatcttcgaattggttgcatcataactgctagaaaacaccctgatgcagattctttgtatgtggaagaagtagatgtcggagaaatagccccaaggacagttgtcagtggcctggtgaatcatgttcctcttgaacagatgcaaaatcggatggtgattttactttgtaacctgaaacctgcaaagatgaggggagtattatctcaagcaatggtcatgtgtgctagttcaccagagaaaattgaaatcttggctcctccaaatgggtctgttcctggagacagaattacttttgatgctttcccaggagagcctgacaaggagctgaatcctaagaagaagatttgggagcagatccagcctgatcttcacactaatgatgagtgtgtggctacatacaaaggagttccctttgaggtgaaagggaagggagtatgtagggctcaaaccatgagcaacagtggaatcaaataaaatgcttccactaccaaaagacattagagaaaaccttaaaagtaataaagagaaatatatttgtcacttatacctaaaatatgagtggctcatttttgcattactctcttctagacttgactagtcatttacttggtatatattgttttcattgattggggaaacactagatttttacctcggtttttgatcatttataatggagagaggaagttgcctatgttttgtaataatttattttttagcaggaatattgattagcagcttttttttctttatacacatagataactaactagattaatgtttagtttcttatttgtaggcacaggatgcatgaaatttcaagctctgggattttttgtatattgtgtatctgtatcaaaaatatcctctccttttcaaaaatgacaggttggaaaatgtttgtcagacttattaactggtcatattataataatactgataatgaccaactgctcattctgaaagccaaacataaaagctaggagaagtggcatctgaacatttttgctttgctgccagagtaaccctgactaataatacaataacagcaatttttttaaaaaactgagatttcctactggcttgaagtttttctatttagcaaaataattagtaataagttttgactaggtctaaagaatgaacacattgtaaacagttgccacagtagtttctaataaattgatcataaaagcagctatcctttttttttttaattctagcttctttttaaagattatttgggtacctaataaaggataatttatatctttattacagactgatattttgctttttcatgtgtcatcatactgtcagtatattaaaagaaattacagcctaaaacttaacatataccatacatatatattaaggtgtcaaatagctattctcactcatcttacaaatattgtaagagcaataaaaattaattgaggaattataagcctacaggtcatcagccttgaggtgattactgatgatttgggcttacacacatgtcagcaagatagggagtgtggataggggagggctggtagctaacaaggggcctcacagagaaatattagtgactttaaccaggtttcagaatctgggccttacctttacaggttcaacaaaagaatggcatcaatagaggcagaagtatagacattgttttaaaaatacacacatgcacacacacacaaaacattttagcattatagctgtctgaatccttcaataagaaggagaggcacacacaaatacacacactcacacaaaactcaacaaccataaaacaaccctgcatgttataaaaggcagaattaaattttatttatttaaatccatggaactctggtaggccaggatatattatagtaccattatcaatgtgatattctgaaaatatgaactgagcgtcattaacaattgttggtacctaaacacaaaatgaatttcaaaagttactttgttctcaagatatgtcattcttttgggaataaatacttctggtgacaaaaaaaaaaa

SEQ ID NO: 312253 - DNA, 1840 bp, Homo sapiens
ctgctatagtacgcgggtggctggacctacatgcttcctgctgtggctgtctcggaacccgtggtcctccgcttcatgattttctgccgtctcttggcaaaaatggcaaataatgatgctgttctgaagagactggagcagaagggtgcagaggcagatcaaatcattgaatatcttaagcagcaagtttctctacttaaggagaaagcaattttgcaggcaactttgagggaagagaagaaacttcgagttgaaaatgctaaactgaagaaagaaattgaagaactgaaacaagagctaattcaggcagaaattcaaaatggagtgaagcaaataccatttccatctggtactccactgcacgctaattctatggtttctgaaaatgtgatacagtctacagcagtaacaaccgtatcttctggtaccaaagaacagataaaaggaggaacaggagacgaaaagaaagcgaaagagaaaattgaaaagaaaggagagaagaaggagaaaaaacagcaatcaatagctggaagtgccgactctaagccaatagatgtttcccgtctggatcttcgaattggttgcatcataactgctagaaaacaccctgatgcagattctttgtatgtggaagaagtagatgtcggagaaatagccccaaggacagttgtcagtggcctggtgaatcatgttcctcttgaacagatgcaaaatcggatggtgattttactttgtaacctgaaacctgcaaagatgaggggagtattatctcaagcaatggtcatgtgtgctagttcaccagagaaaattgaaatcttggctcctccaaatgggtctgttcctggagacagaattacttttgatgctttcccaggagagcctgacaaggagctgaatcctaagaagaagatttgggagcagatccagcctgatcttcacactaatgatgagtgtgtggctacatacaaaggagttccctttgaggtgaaagggaagggagtatgtagggctcaaaccatgagcaacagtggaatcaaataaaatgcttccactaccaaaagacattagagaaaaccttaaaagtaataaagagaaatatatttgtcacttatacctaaaatatgagtggctcatttttgcattactctcttctagacttgactagtcatttacttggtatatattgttttcattgattggggaaacactagatttttacctcggtttttgatcatttataatggagagaggaagttgcctatgttttgtaataatttattttttagcaggaatattgattagcagcttttttttctttatacacatagataactaactagattaatgtttagtttcttatttgtaggcacaggatgcatgaaatttcaagctctgggattttttgtatattgtgtatctgtatcaaaaatatcctctccttttcaaaaatgacaggttggaaaatgtttgtcagacttattaactggtcatattataataatactgataatgaccaactgctcattctgaaagccaaacataaaagctaggagaagtggcatctgaacatttttgctttgctgccagagtaaccctgactaataatacaataacagcaatttttttaaaaaactgagatttcctactggcttgaagtttttctatttagcaaaataattagtaataagttttgactaggtctaaagaatgaacacattgtaaacagttgccacagtagtttctaataaattgatcataaaagcagctatcctttttttttttaattctagcttctttttaaagattatttgggtacctaataaaggataatttatatctt

SEQ ID NO: 312254 - DNA, 2390 bp, Homo sapiens
gtgacgtcgtggcgggtcactcactcggggatcgccgattgcgatcgtaggggtcttccttctctaacttgcctccaggagagaggacctggcctgcgctgctaatgggtagtccgttcgcagcaggaccagccctggcctaaggaaacaggaaagagtttgagacttccttctaaaggagccacgtttgagaaatgggatgcaggcctaagattttctgccgtctcttggcaaaaatggcaaataatgatgctgttctgaagagactggagcagaagggtgcagaggcagatcaaatcattgaatatcttaagcagcaagtttctctacttaaggagaaagcaattttgcaggcaactttgagggaagagaagaaacttcgagttgaaaatgctaaactgaagaaagaaattgaagaactgaaacaagagctaattcaggcagaaattcaaaatggagtgaagcaaataccatttccatctggtactccactgcacgctaattctatggtttctgaaaatgtgatacagtctacagcagtaacaaccgtatcttctggtaccaaagaacagataaaaggaggaacaggagacgaaaagaaagcgaaagagaaaattgaaatcttggctcctccaaatgggtctgttcctggagacagaattacttttgatgctttcccaggagagcctgacaaggagctgaatcctaagaagaagatttgggagcagatccagcctgatcttcacactaatgatgagtgtgtggctacatacaaaggagttccctttgaggtgaaagggaagggagtatgtagggctcaaaccatgagcaacagtggaatcaaataaaatgcttccactaccaaaagacattagagaaaaccttaaaagtaataaagagaaatatatttgtcacttatacctaaaatatgagtggctcatttttgcattactctcttctagacttgactagtcatttacttggtatatattgttttcattgattggggaaacactagatttttacctcggtttttgatcatttataatggagagaggaagttgcctatgttttgtaataatttattttttagcaggaatattgattagcagcttttttttctttatacacatagataactaactagattaatgtttagtttcttatttgtaggcacaggatgcatgaaatttcaagctctgggattttttgtatattgtgtatctgtatcaaaaatatcctctccttttcaaaaatgacaggttggaaaatgtttgtcagacttattaactggtcatattataataatactgataatgaccaactgctcattctgaaagccaaacataaaagctaggagaagtggcatctgaacatttttgctttgctgccagagtaaccctgactaataatacaataacagcaatttttttaaaaaactgagatttcctactggcttgaagtttttctatttagcaaaataattagtaataagttttgactaggtctaaagaatgaacacattgtaaacagttgccacagtagtttctaataaattgatcataaaagcagctatcctttttttttttaattctagcttctttttaaagattatttgggtacctaataaaggataatttatatctttattacagactgatattttgctttttcatgtgtcatcatactgtcagtatattaaaagaaattacagcctaaaacttaacatataccatacatatatattaaggtgtcaaatagctattctcactcatcttacaaatattgtaagagcaataaaaattaattgaggaattataagcctacaggtcatcagccttgaggtgattactgatgatttgggcttacacacatgtcagcaagatagggagtgtggataggggagggctggtagctaacaaggggcctcacagagaaatattagtgactttaaccaggtttcagaatctgggccttacctttacaggttcaacaaaagaatggcatcaatagaggcagaagtatagacattgttttaaaaatacacacatgcacacacacacaaaacattttagcattatagctgtctgaatccttcaataagaaggagaggcacacacaaatacacacactcacacaaaactcaacaaccataaaacaaccctgcatgttataaaaggcagaattaaattttatttatttaaatccatggaactctggtaggccaggatatattatagtaccattatcaatgtgatattctgaaaatatgaactgagcgtcattaacaattgttggtacctaaacacaaaatgaatttcaaaagttactttgttctcaagatatgtcattcttttgggaataaatacttctggtgacaaaaaaaaaaa

SEQ ID NO: 312255 - DNA, 3527 bp, Homo sapiens
cacgaggagttgtgagatatttgtcattgcccacacttacacccacttagtcataacttaatcttgtcattatttcagttgagttatatatgcactattggcatatagttgttgagtgtaatttcccttttaaagatcatttagaagattatgattagcattagaatgaaaagttactgtgtatgtggggaaacaaagggtgatacaagataaaaatccagggctaaatttaaaagaagtctgtcaataaataatataggatgtgtctaagtaataagaaagcattgggtcagttgattcaatagtgttttttttcataatgtacataaaataatagagcttcttgggattgaagccattttacaattgatggcattttagatttcttgtatagtatttaaagcttccaacaaaaatgtaaatttttacctactgtaattctgaaatagggaaattagaggttttgagtagagacactttcaaatttgtgtagcgttcctatatagcataagaattctaaaattaaaagtctgcctgtaaaactttgatttcaaagtagtaacttacttatgtttgattcccaatgttgtcatcgtggggcagagattttgctttttcaaaaagattgcaggcaatttagatggtgtgggtggggaggactactgaggaaattgctcagtaaacaaaaatgatagtgaagatctcagaatctcaaaaatcatcttttgtgtgtgtattttaatgattaagatgtactataaattcatgtacagtatttgggattctgcattagaggcatcgtatgattaatggctttttaggtttgatgaagtatgataattaacattgagaaggacaaaattaatgtgaagggacagaatgatttagataatatgtttcaaaagcttttgtcctaaaaaatgcattattaccattttaatttagtaaaggaaaaagaaaaggtcttgatcctcaccaaacacaattaacatacttggtctacagttttctgtgcttctctcttcataaatgttttatattttcaattactgtgcatgtcattcttatatctattttaatctcacagtcttaatttttttacattttagtccagagacttaaactagcatttcctaaactgttttagagaatactagttcaaataaatgttaatagctgttcctgtgttaggattctgtcattaaatatattggaaaatgcttcgtaattatatcctttagagaaattatagctagagcattaaaagagctaactgcagcatcagacagacctgagtttcaatcctcgtttactatgtattacatgaggcaaattaattttaattcaagttttcttctctgtataatggagattattacagtattcgaaattgacttgtgtaaagcatttagccagccatagcgcatgttctacaaatatatgtagttgttattatcatctatgagaaactttatacatattagaaactctgaggatttaaaattttgaaggttgacttatactcaatgtaaaattgaaaaatcacaggggagtaattagcatagagattaatgaaatgagcactgggttgaatggtaaaagatttgtttgagctttaagcagtattgttgttaaactatcactgtgccctaagcgtaacattattttaaaaatgtcttcaactgtgtttcccccatttgtctgaaagcttagttagttcaaagaacatgtttatttttgttctctactataaacccagcacatgacacaaaatcagggagtgtaaagttggggtcatgaacttattttaggagcctggtaggtaatataaatggcagacaacagggagtagtaaagtgtctgtctgtcttacttaaagacattcacatcagttatttccaacactgttagccctggaaaagaaagctatccctgaactttgtcaggctagtttgtgatccctagaaaagattagtgattaagaccaaaccctgaagaacagcatcattaatgggacagattaaaaaaaaaaggagccctgaaaggaggtgacaaggaagtaggaggtgaaatcaggtacaagtaattttttaaattaagaaaagtatagccctctccctctccctctccctctccgcaccgtctccctctgatgccgagccgaggctggactgtactgccaccatcttgactcactgcaacctccctgcctgattctcctgcctcagtctgccgagttcctgggattgcaggtgcgcgccgccactcctgactggtttttgtattttttggtggagacggggtttcaccgtgttggccgggctggtctccagctcctgaccgcgagtgatctgccagcctcggcgtcctgaggtgccgggattgcagacggagtctcgctcactcagtgctcaatgttgcccatgctggagtgcagtggcgtgatcttggctcgctacaacctccacctcccagccgcctgccttggcctcccaaagtgccgagattgcagcctctgcccggccgccaccccgtctaggaagtgaggagcgtctttgcctggccgcccatcgtcggggatgtgaggagcccctctgcccggccgcccagtctgggaagtgaggagcacctcttcccggccgtcatcctgtctaggaagtgaggagcgtctctgcccagccgcccatcatctgggatgtggggagcatctctgccccgtcgccccgtctgagatgtgaagagcgcctctgcccggccgcgaccctgtctgggaactgaggagtgtctctgccccgccgccaccccgtctgggaggattttctgccgtctcttggcaaaaatggcaaataatgatgctgttctgaagagactggagcagaagggtgcagaggcagatcaaatcattgaatatcttaagcagcaagtttctctacttaaggagaaagcaattttgcaggcaactttgagggaagagaagaaacttcgagttgaaaatgctaaactgaagaaagaaattgaagaactgaaacaagagctaattcaggcagaaattcaaaatggagtgaagcaaataccatttccatctggtactccactgcacgctaattctatggtttctgaaaatgtgatacagtctacagcagtaacaaccgtatcttctggtaccaaagaacagataaaaggaggaacaggagacgaaaagaaagcgaaagagaaaattgaaatcttggctcctccaaatgggtctgttcctggagacagaattacttttgatgctttcccaggagagcctgacaaggagctgaatcctaagaagaagatttgggagcagatccagcctgatcttcacactaatgatgagtgtgtggctacatacaaaggagttccctttgaggtgaaagggaagggagtatgtagggctcaaaccatgagcaacagtggaatcaaataaaatgcttccactaccaaaagacattagagaaaaccttaaaagtaataaagagaaatatatttgtcacttataccta

SEQ ID NO: 312256 - DNA, 820 bp, Homo sapiens
gatcctgatcagagcatacccctctagcttctttttaaagattatttgggtacctaataaaggataatttatatctttattacagactgatattttgctttttcatgtgtcatcatactgtcagtatattaaaagaaattacagcctaaaacttaacatataccatacatatatattaaggtgtcaaatagctattctcactcatcttacaaatattgtaagagcaataaaaattaattgaggaattataagcctacaggtcatcagccttgaggtgattactgatgatttgggcttacacacatgtcagcaagatagggagtgtggataggggagggctggtagctaacaaggggcctcacagagaaatattagtgactttaaccaggtttcagaatctgggccttacctttacaggttcaacaaaagaatggcatcaatagaggcagaagtatagacattgttttaaaaatacacacatgcacacacacacaaaacattttagcattatagctgtctgaatccttcaataagaaggagaggcacacacaaatacacacactcacacaaaactcaacaaccataaaacaaccctgcatgttataaaaggcagaattaaattttatttatttaaatccatggaactctggtaggccaggatatattatagtaccattatcaatgtgatattctgaaaatatgaactgagcgtcattaacaattgttggtacctaaacacaaaatgaatttcaaaagttactttgttctcaagatatgtcattcttttgggaataaatacttctggtgacaaaaaaaaaaa

SEQ ID NO: 312257 - DNA, 1117 bp, Homo sapiens
ctgctatagtacgcgggtggctggacctacatgcttcctgctgtggctgtctcggaacccgtggtcctccgcttcatgattttctgccgtctcttggcaaaaatggcaaataatgatgctgttctgaagagactggagcagaagggtgcagaggcagatcaaatcattgaatatcttaagcagcaagtttctctacttaaggagaaagcaattttgcaggcaactttgagggaagagaagaaacttcgagttgaaaatgctaaactgaagaaagaaattgaagaactgaaacaagagctaattcaggcagaaattcaaaatggagtgaagcaaataccatttccatctggtactccactgcacgctaattctatggtttctgaaaatgtgatacagtctacagcagtaacaaccgtatcttctggtaccaaagaacagataaaaggaggaacaggagacgaaaagaaagcgaaagagaaaattgaaaagaaaggagagaagaaggagaaaaaacagcaatcaatagctggaagtgccgactctaagccaatagatgtttcccgtctggatcttcgaattggttgcatcataactgctagaaaacaccctgatgcagattctttgtatgtggaagaagtagatgtcggagaaatagccccaaggacagttgtcagtggcctggtgaatcatgttcctcttgaacagatgcaaaatcggatggtgattttactttgtaacctgaaacctgcaaagatgaggggagtattatctcaagcaatggtcatgtgtgctagttcaccagagaaaattgaaatcttggctcctccaaatgggtctgttcctggagacagaattacttttgatgctttcccaggagagcctgacaaggagctgaatcctaagaagaagatttgggagcagatccagcctgatcttcacactaatgatgagtgtgtggctacatacaaaggagttccctttgaggtgaaagggaagggagtatgtagggctcaaaccatgagcaacagtggaatcaaataaaatgcttccactaccaaaagacattagagaaaaccttaaaagtaataaagagaaatatatttgtcacttataccta

SEQ ID NO: 312258 - DNA, 1761 bp, Homo sapiens
ctgctatagtacgcgggtggctggacctacatgcttcctgctgtggctgtctcggaacccgtggtcctccgcttcatgattttctgccgtctcttggcaaaaatggcaaataatgatgctgttctgaagagactggagcagaagggtgcagaggcagatcaaatcattgaatatcttaagcagcaagtttctctacttaaggagaaagcaattttgcaggcaactttgagggaagagaagaaacttcgagttgaaaatgctaaactgaagaaagaaattgaagaactgaaacaagagctaattcaggcagaaattcaaaatggagtgaagcaaataccatttccatctggtactccactgcacgctaattctatggtttctgaaaatgtgatacagtctacagcagtaacaaccgtatcttctggtaccaaagaacagataaaaggaggaacaggagacgaaaagaaagcgaaagagaaaattgaaaagaaaggagagaagaaggagaaaaaacagcaatcaatagctggaagtgccgactctaagccaatagatgtttcccgtctggatcttcgaattggttgcatcataactgctagaaaacaccctgatgcagattctttgtatgtggaagaagtagatgtcggagaaatagccccaaggacagttgtcagtggcctggtgaatcatgttcctcttgaacagatgcaaaatcggatggtgattttactttgtaacctgaaacctgcaaagatgaggggagtattatctcaagcaatggtcatgtgtgctagttcaccagagaaaattgaaatcttggctcctccaaatgggtctgttcctggagacagaattacttttgatgctttcccaggagagcctgacaaggagctgaatcctaagaagaagatttgggagcagatccagcctgatcttcacactaatgatgagtgtgtggctacatacaaaggagttccctttgaggtgaaagggaagggagtatgtagggctcaaaccatgagcaacagtggaatcaaataaaatgcttccactaccaaaagacattagagaaaaccttaaaagtaataaagagaaatatatttgtcacttatacctaaaatatgagtggctcatttttgcattactctcttctagacttgactagtcatttacttggtatatattgttttcattgattggggaaacactagatttttacctcggtttttgatcatttataatggagagaggaagttgcctatgttttgtaataatttattttttagcaggaatattgattagcagcttttttttctttatacacatagataactaactagattaatgtttagtttcttatttgtaggcacaggatgcatgaaatttcaagctctgggattttttgtatattgtgtatctgtatcaaaaatatcctctccttttcaaaaatgacaggttggaaaatgtttgtcagacttattaactggtcatattataataatactgataatgaccaactgctcattctgaaagccaaacataaaagctaggagaagtggcatctgaacatttttgctttgctgccagagtaaccctgactaataatacaataacagcaatttttttaaaaaactgagatttcctactggcttgaagtttttctatttagcaaaataattagtaataagttttgactaggtctaaagaatgaacacattgtaaacagttgccacagtagtttctaataaattgatcataaaa

SEQ ID NO: 312259 - DNA, 5320 bp, Homo sapiens
cacgaggagttgtgagatatttgtcattgcccacacttacacccacttagtcataacttaatcttgtcattatttcagttgagttatatatgcactattggcatatagttgttgagtgtaatttcccttttaaagatcatttagaagattatgattagcattagaatgaaaagttactgtgtatgtggggaaacaaagggtgatacaagataaaaatccagggctaaatttaaaagaagtctgtcaataaataatataggatgtgtctaagtaataagaaagcattgggtcagttgattcaatagtgttttttttcataatgtacataaaataatagagcttcttgggattgaagccattttacaattgatggcattttagatttcttgtatagtatttaaagcttccaacaaaaatgtaaatttttacctactgtaattctgaaatagggaaattagaggttttgagtagagacactttcaaatttgtgtagcgttcctatatagcataagaattctaaaattaaaagtctgcctgtaaaactttgatttcaaagtagtaacttacttatgtttgattcccaatgttgtcatcgtggggcagagattttgctttttcaaaaagattgcaggcaatttagatggtgtgggtggggaggactactgaggaaattgctcagtaaacaaaaatgatagtgaagatctcagaatctcaaaaatcatcttttgtgtgtgtattttaatgattaagatgtactataaattcatgtacagtatttgggattctgcattagaggcatcgtatgattaatggctttttaggtttgatgaagtatgataattaacattgagaaggacaaaattaatgtgaagggacagaatgatttagataatatgtttcaaaagcttttgtcctaaaaaatgcattattaccattttaatttagtaaaggaaaaagaaaaggtcttgatcctcaccaaacacaattaacatacttggtctacagttttctgtgcttctctcttcataaatgttttatattttcaattactgtgcatgtcattcttatatctattttaatctcacagtcttaatttttttacattttagtccagagacttaaactagcatttcctaaactgttttagagaatactagttcaaataaatgttaatagctgttcctgtgttaggattctgtcattaaatatattggaaaatgcttcgtaattatatcctttagagaaattatagctagagcattaaaagagctaactgcagcatcagacagacctgagtttcaatcctcgtttactatgtattacatgaggcaaattaattttaattcaagttttcttctctgtataatggagattattacagtattcgaaattgacttgtgtaaagcatttagccagccatagcgcatgttctacaaatatatgtagttgttattatcatctatgagaaactttatacatattagaaactctgaggatttaaaattttgaaggttgacttatactcaatgtaaaattgaaaaatcacaggggagtaattagcatagagattaatgaaatgagcactgggttgaatggtaaaagatttgtttgagctttaagcagtattgttgttaaactatcactgtgccctaagcgtaacattattttaaaaatgtcttcaactgtgtttcccccatttgtctgaaagcttagttagttcaaagaacatgtttatttttgttctctactataaacccagcacatgacacaaaatcagggagtgtaaagttggggtcatgaacttattttaggagcctggtaggtaatataaatggcagacaacagggagtagtaaagtgtctgtctgtcttacttaaagacattcacatcagttatttccaacactgttagccctggaaaagaaagctatccctgaactttgtcaggctagtttgtgatccctagaaaagattagtgattaagaccaaaccctgaagaacagcatcattaatgggacagattaaaaaaaaaaggagccctgaaaggaggtgacaaggaagtaggaggtgaaatcaggtacaagtaattttttaaattaagaaaagtatagccctctccctctccctctccctctccgcaccgtctccctctgatgccgagccgaggctggactgtactgccaccatcttgactcactgcaacctccctgcctgattctcctgcctcagtctgccgagttcctgggattgcaggtgcgcgccgccactcctgactggtttttgtattttttggtggagacggggtttcaccgtgttggccgggctggtctccagctcctgaccgcgagtgatctgccagcctcggcgtcctgaggtgccgggattgcagacggagtctcgctcactcagtgctcaatgttgcccatgctggagtgcagtggcgtgatcttggctcgctacaacctccacctcccagccgcctgccttggcctcccaaagtgccgagattgcagcctctgcccggccgccaccccgtctaggaagtgaggagcgtctttgcctggccgcccatcgtcggggatgtgaggagcccctctgcccggccgcccagtctgggaagtgaggagcacctcttcccggccgtcatcctgtctaggaagtgaggagcgtctctgcccagccgcccatcatctgggatgtggggagcatctctgccccgtcgccccgtctgagatgtgaagagcgcctctgcccggccgcgaccctgtctgggaactgaggagtgtctctgccccgccgccaccccgtctgggaggattttctgccgtctcttggcaaaaatggcaaataatgatgctgttctgaagagactggagcagaagggtgcagaggcagatcaaatcattgaatatcttaagcagcaagtttctctacttaaggagaaagcaattttgcaggcaactttgagggaagagaagaaacttcgagttgaaaatgctaaactgaagaaagaaattgaagaactgaaacaagagctaattcaggcagaaattcaaaatggagtgaagcaaataccatttccatctggtactccactgcacgctaattctatggtttctgaaaatgtgatacagtctacagcagtaacaaccgtatcttctggtaccaaagaacagataaaaggaggaacaggagacgaaaagaaagcgaaagagaaaattgaaaagaaaggagagaagaaggagaaaaaacagcaatcaatagctggaagtgccgactctaagccaatagatgtttcccgtctggatcttcgaattggttgcatcataactgctagaaaacaccctgatgcagattctttgtatgtggaagaagtagatgtcggagaaatagccccaaggacagttgtcagtggcctggtgaatcatgttcctcttgaacagatgcaaaatcggatggtgattttactttgtaacctgaaacctgcaaagatgaggggagtattatctcaagcaatggtcatgtgtgctagttcaccagagaaaattgaaatcttggctcctccaaatgggtctgttcctggagacagaattacttttgatgctttcccaggagagcctgacaaggagctgaatcctaagaagaagatttgggagcagatccagcctgatcttcacactaatgatgagtgtgtggctacatacaaaggagttccctttgaggtgaaagggaagggagtatgtagggctcaaaccatgagcaacagtggaatcaaataaaatgcttccactaccaaaagacattagagaaaaccttaaaagtaataaagagaaatatatttgtcacttatacctaaaatatgagtggctcatttttgcattactctcttctagacttgactagtcatttacttggtatatattgttttcattgattggggaaacactagatttttacctcggtttttgatcatttataatggagagaggaagttgcctatgttttgtaataatttattttttagcaggaatattgattagcagcttttttttctttatacacatagataactaactagattaatgtttagtttcttatttgtaggcacaggatgcatgaaatttcaagctctgggattttttgtatattgtgtatctgtatcaaaaatatcctctccttttcaaaaatgacaggttggaaaatgtttgtcagacttattaactggtcatattataataatactgataatgaccaactgctcattctgaaagccaaacataaaagctaggagaagtggcatctgaacatttttgctttgctgccagagtaaccctgactaataatacaataacagcaatttttttaaaaaactgagatttcctactggcttgaagtttttctatttagcaaaataattagtaataagttttgactaggtctaaagaatgaacacattgtaaacagttgccacagtagtttctaataaattgatcataaaagcagctatcctttttttttttaattctagcttctttttaaagattatttgggtacctaataaaggataatttatatctttattacagactgatattttgctttttcatgtgtcatcatactgtcagtatattaaaagaaattacagcctaaaacttaacatataccatacatatatattaaggtgtcaaatagctattctcactcatcttacaaatattgtaagagcaataaaaattaattgaggaattataagcctacaggtcatcagccttgaggtgattactgatgatttgggcttacacacatgtcagcaagatagggagtgtggataggggagggctggtagctaacaaggggcctcacagagaaatattagtgactttaaccaggtttcagaatctgggccttacctttacaggttcaacaaaagaatggcatcaatagaggcagaagtatagacattgttttaaaaatacacacatgcacacacacacaaaacattttagcattatagctgtctgaatccttcaataagaaggagaggcacacacaaatacacacactcacacaaaactcaacaaccataaaacaaccctgcatgttataaaaggcagaattaaattttatttatttaaatccatggaactctggtaggccaggatatattatagtaccattatcaatgtgatattctgaaaatatgaactgagcgtcattaacaattgttggtacctaaacacaaaatgaatttcaaaagttactttgttctcaagatatgtcattcttttgggaataaatacttctggtgacaaaaaaaaaaa

SEQ ID NO: 312260 - DNA, 2717 bp, Homo sapiens
gtgacgtcgtggcgggtcactcactcggggatcgccgattgcgatcgtaggggtcttccttctctaacttgcctccaggagagaggacctggcctgcgctgctaatgggtagtccgttcgcagcaggaccagccctggcctaaggaaacaggaaagagtttgagacttccttctaaaggagccacgtttgagaaatgggatgcaggcctaagattttctgccgtctcttggcaaaaatggcaaataatgatgctgttctgaagagactggagcagaagggtgcagaggcagatcaaatcattgaatatcttaagcagcaagtttctctacttaaggagaaagcaattttgcaggcaactttgagggaagagaagaaacttcgagttgaaaatgctaaactgaagaaagaaattgaagaactgaaacaagagctaattcaggcagaaattcaaaatggagtgaagcaaataccatttccatctggtactccactgcacgctaattctatggtttctgaaaatgtgatacagtctacagcagtaacaaccgtatcttctggtaccaaagaacagataaaaggaggaacaggagacgaaaagaaagcgaaagagaaaattgaaaagaaaggagagaagaaggagaaaaaacagcaatcaatagctggaagtgccgactctaagccaatagatgtttcccgtctggatcttcgaattggttgcatcataactgctagaaaacaccctgatgcagattctttgtatgtggaagaagtagatgtcggagaaatagccccaaggacagttgtcagtggcctggtgaatcatgttcctcttgaacagatgcaaaatcggatggtgattttactttgtaacctgaaacctgcaaagatgaggggagtattatctcaagcaatggtcatgtgtgctagttcaccagagaaaattgaaatcttggctcctccaaatgggtctgttcctggagacagaattacttttgatgctttcccaggagagcctgacaaggagctgaatcctaagaagaagatttgggagcagatccagcctgatcttcacactaatgatgagtgtgtggctacatacaaaggagttccctttgaggtgaaagggaagggagtatgtagggctcaaaccatgagcaacagtggaatcaaataaaatgcttccactaccaaaagacattagagaaaaccttaaaagtaataaagagaaatatatttgtcacttatacctaaaatatgagtggctcatttttgcattactctcttctagacttgactagtcatttacttggtatatattgttttcattgattggggaaacactagatttttacctcggtttttgatcatttataatggagagaggaagttgcctatgttttgtaataatttattttttagcaggaatattgattagcagcttttttttctttatacacatagataactaactagattaatgtttagtttcttatttgtaggcacaggatgcatgaaatttcaagctctgggattttttgtatattgtgtatctgtatcaaaaatatcctctccttttcaaaaatgacaggttggaaaatgtttgtcagacttattaactggtcatattataataatactgataatgaccaactgctcattctgaaagccaaacataaaagctaggagaagtggcatctgaacatttttgctttgctgccagagtaaccctgactaataatacaataacagcaatttttttaaaaaactgagatttcctactggcttgaagtttttctatttagcaaaataattagtaataagttttgactaggtctaaagaatgaacacattgtaaacagttgccacagtagtttctaataaattgatcataaaagcagctatcctttttttttttaattctagcttctttttaaagattatttgggtacctaataaaggataatttatatctttattacagactgatattttgctttttcatgtgtcatcatactgtcagtatattaaaagaaattacagcctaaaacttaacatataccatacatatatattaaggtgtcaaatagctattctcactcatcttacaaatattgtaagagcaataaaaattaattgaggaattataagcctacaggtcatcagccttgaggtgattactgatgatttgggcttacacacatgtcagcaagatagggagtgtggataggggagggctggtagctaacaaggggcctcacagagaaatattagtgactttaaccaggtttcagaatctgggccttacctttacaggttcaacaaaagaatggcatcaatagaggcagaagtatagacattgttttaaaaatacacacatgcacacacacacaaaacattttagcattatagctgtctgaatccttcaataagaaggagaggcacacacaaatacacacactcacacaaaactcaacaaccataaaacaaccctgcatgttataaaaggcagaattaaattttatttatttaaatccatggaactctggtaggccaggatatattatagtaccattatcaatgtgatattctgaaaatatgaactgagcgtcattaacaattgttggtacctaaacacaaaatgaatttcaaaagttactttgttctcaagatatgtcattcttttgggaataaatacttctggtgacaaaaaaaaaaa

SEQ ID NO: 312261 - DNA, 1869 bp, Homo sapiens
tcatgaactaccattccaaacgatttgattggctgcataatcgggcgtcaaggcgccaaaatcaatgagatccgtcagatgtctggggcgcagatcaaaattgcgaacccagtggaaggatctactgataggcaggttaccatcactggatctgctgccagagagcctgacaaggagctgaatcctaagaagaagatttgggagcagatccagcctgatcttcacactaatgatgagtgtgtggctacatacaaaggagttccctttgaggtgaaagggaagggagtatgtagggctcaaaccatgagcaacagtggaatcaaataaaatgcttccactaccaaaagacattagagaaaaccttaaaagtaataaagagaaatatatttgtcacttatacctaaaatatgagtggctcatttttgcattactctcttctagacttgactagtcatttacttggtatatattgttttcattgattggggaaacactagatttttacctcggtttttgatcatttataatggagagaggaagttgcctatgttttgtaataatttattttttagcaggaatattgattagcagcttttttttctttatacacatagataactaactagattaatgtttagtttcttatttgtaggcacaggatgcatgaaatttcaagctctgggattttttgtatattgtgtatctgtatcaaaaatatcctctccttttcaaaaatgacaggttggaaaatgtttgtcagacttattaactggtcatattataataatactgataatgaccaactgctcattctgaaagccaaacataaaagctaggagaagtggcatctgaacatttttgctttgctgccagagtaaccctgactaataatacaataacagcaatttttttaaaaaactgagatttcctactggcttgaagtttttctatttagcaaaataattagtaataagttttgactaggtctaaagaatgaacacattgtaaacagttgccacagtagtttctaataaattgatcataaaagcagctatcctttttttttttaattctagcttctttttaaagattatttgggtacctaataaaggataatttatatctttattacagactgatattttgctttttcatgtgtcatcatactgtcagtatattaaaagaaattacagcctaaaacttaacatataccatacatatatattaaggtgtcaaatagctattctcactcatcttacaaatattgtaagagcaataaaaattaattgaggaattataagcctacaggtcatcagccttgaggtgattactgatgatttgggcttacacacatgtcagcaagatagggagtgtggataggggagggctggtagctaacaaggggcctcacagagaaatattagtgactttaaccaggtttcagaatctgggccttacctttacaggttcaacaaaagaatggcatcaatagaggcagaagtatagacattgttttaaaaatacacacatgcacacacacacaaaacattttagcattatagctgtctgaatccttcaataagaaggagaggcacacacaaatacacacactcacacaaaactcaacaaccataaaacaaccctgcatgttataaaaggcagaattaaattttatttatttaaatccatggaactctggtaggccaggatatattatagtaccattatcaatgtgatattctgaaaatatgaactgagcgtcattaacaattgttggtacctaaacacaaaatgaatttcaaaagttactttgttctcaagatatgtcattcttttgggaataaatacttctggtgacaaaaaaaaaaa

SEQ ID NO: 312262 - DNA, 1056 bp, Homo sapiens
ggaaaactagctgcatcatttgcagagtccagtacaaaatgaaaatgtggaggccttgttcaaaaattttagggatattggccaggcacggtggctcacgcctgtaatcccagcacttcgggaggccaaggtgggtggatcacgaggtcaagagatcaagaccagcctggccaacatggtgaaaccctgtctctactaaaaatacaaaacttagctgggcctagcggtgcatgcctgtagtcccagctactcgggagactgaggcaggagaatcgcttgaaccagggaggtggagttgtagtgagtcgagatcgcaccactgcactccagcctggtgacagagtgagactctgtctcaaaaaaaaaaaaaaaaaatttccaaggatttcaagatggcaacgcagagcacagaccctgcataatcccttctgagctcagagctgcacgcctgtaaagccagtcctattggaggggcaggtggagcctgtaacacactgcctcttcttcccttgctttctttcctaggcctgggcaatatttaagggaaagtataaggagggggacacaggaggtccagctgtctggaagactcgcctgcgctgtgcactcaacaagagttctgaatttaaggaggttcctgagaggggccgcatggatgttgctgagccctacaaggtgtatcagttgctgccaccaggaatcgtctctgctcacctctttgttcttcctgtctcctttgaagtagactcattcttcacacgattgacctgtcctctttgtgataattctcagtagttgtccgtgataatcgtgtcctgaaaatcctcgcacacactggctggtggagaactcaaggctaattttttatcctttttttttttttaattttgagatatacgccctctttcatctgtaagggactaggaaattccaaatggtgtgaacccagggggcctttccctcttccctgacctcccaactctaaagccaagcactttatattttcctcttagatattcactaaggacttaaaataaaattttattgaaagaggaa

SEQ ID NO: 312263 - DNA, 729 bp, Homo sapiens
accctccatcatcctacaacccacaccaccccacctccaccactcctatcaccctcacccatccacccgaaaatgctaacatacacacgcacccagccaccgaagttccaggtaacactgaatttctgggaagagagccatggctccagccatactccacagaatcttatcacagtgaagatggagcaggcctttgcccgatacttgctggagcagactccagagcagcaggcagccattctgtccctggtgtagagcctgggggacccatcttccacctcacctctttgttcttcctgtctcctttgaagtagactcattcttcacacgattgacctgtcctctttgtgataattctcagtagttgtccgtgataatcgtgtcctgaaaatcctcgcacacactggctggtggagaactcaaggctaattttttatcctttttttttttttaattttgagatatacgccctctttcatctgtaagggactaggaaattccaaatggtgtgaacccagggggcctttccctcttccctgacctcccaactctaaagccaagcactttatattttcctcttagatattcactaaggacttaaaataaaattttattgaaagaggaaaaaaaaccctaatacacgcccaccgaccacgaaaccgcccaccagacacagtcctcagcacagatcactacacactctaacaccccccatcgaaccagaccaca

SEQ ID NO: 312264 - DNA, 1867 bp, Homo sapiens
aagcgctggtacggcccgggattatggtatctgagggaggcaggggaatgagccaggctggagctgagccagcagggcagggcccccctgctgcgacagtggcatcctgatagtgagatgctcagatgctgctgccctctagtggccgccagttccctgcaactcagaccacgtgatttctgggaaaaggccctccctggaggagaactgaaacttagggtggggactgtagaaaggggcggagagatcagccgcccagccaggagttaagctgaggtcgtctgagccctgcgacagcctggacagcaactcaggatggcatcaggcagggcacgctgcacccgaaaactccggaactgggtggtggagcaagtggagagtgggcagtttcccggagtgtgctgggatgatacagctaagaccatgttccggattccctggaaacatgcaggcaagcaggacttccgggaggaccaggatgctgccttcttcaaggcctgggcaatatttaagggaaagtataaggagggggacacaggaggtccagctgtctggaagactcgcctgcgctgtgcactcaacaagagttctgaatttaaggaggttcctgagaggggccgcatggatgttgctgagccctacaaggtgtatcagttgctgccaccaggaatcgtctctggccagccagggactcagaaagtaccatcaaagcgacagcacagttctgtgtcctctgagaggaaggaggaagaggatgccatgcagaactgcacactcagtccctctgtgctccaggactccctcaataatgaggaggagggggccagtgggggagcagtccattcagacattgggagcagcagcagcagcagcagccctgagccacaggaagttacagacacaactgaggccccctttcaaggggatcagaggtccctggagtttctgcttcctccagagccagactactcactgctgctcaccttcatctacaacgggcgcgtggtgggcgaggcccaggtgcaaagcctggattgccgccttgtggctgagccctcaggctctgagagcagcatggagcaggtgctgttccccaagcctggcccactggagcccacgcagcgcctgctgagccagcttgagaggggcatcctagtggccagcaacccccgaggcctcttcgtgcagcgcctttgccccatccccatctcctggaatgcaccccaggctccacctgggccaggcccgcatctgctgcccagcaacgagtgcgtggagctcttcagaaccgcctacttctgcagagacttggtcaggtactttcagggcctgggccccccaccgaagttccaggtaacactgaatttctgggaagagagccatggctccagccatactccacagaatcttatcacagtgaagatggagcaggcctttgcccgatacttgctggagcagactccagagcagcaggcagccattctgtccctggtgtagagcctgggggacccatcttccacctcacctctttgttcttcctgtctcctttgaagtagactcattcttcacacgattgacctgtcctctttgtgataattctcagtagttgtccgtgataatcgtgtcctgaaaatcctcgcacacactggctggtggagaactcaaggctaattttttatcctttttttttttttaattttgagatatacgccctctttcatctgtaagggactaggaaattccaaatggtgtgaacccagggggcctttccctcttccctgacctcccaactctaaagccaagcactttatattttcctcttagatattcactaaggacttaaaataaaattttattgaaagaggaa

SEQ ID NO: 312265 - DNA, 2346 bp, Homo sapiens
aagcgctggtacggcccgggattatggtatctgagggaggcaggggaatgagccaggctggagctgagccagcagggcagggcccccctgctgcgacagtggcatcctgatagtgagatgctcagatgctgctgccctctagtggccgccagttccctgcaactcagaccacgtgatttctgggaaaaggccctccctggaggagaactgaaacttagggtggggactgtagaaaggggcggagagatcagccgcccagccaggagttaagctgaggtcgtctgagccctgcgacagcctggacagcaactcaggatggcatcaggcagggcacgctgcacccgaaaactccggaactgggtggtggagcaagtggagagtgggcagtttcccggagtgtgctgggatgatacagctaagaccatgttccggattccctggaaacatgcaggcaagcaggacttccgggaggaccaggatgctgccttcttcaaggcctgggcaatatttaagggaaagtataaggagggggacacaggaggtccagctgtctggaagactcgcctgcgctgtgcactcaacaagagttctgaatttaaggaggttcctgagaggggccgcatggatgttgctgagccctacaaggtgtatcagttgctgccaccaggaatcgtctctggccagccagggactcagaaagtaccatcaaagcgacagcacagttctgtgtcctctgagaggaaggaggaagaggatgccatgcagaactgcacactcagtccctctgtgctccaggactccctcaataatgaggaggagggggccagtgggggagcagtccattcagacattgggagcagcagcagcagcagcagccctgagccacaggaagttacagacacaactgaggccccctttcaaggggatcagaggtccctggagtttctgcttcctccagagccaggtacgtggcatttctgactttctcctgtgccctgtgcccctgaggtcttccacctttgactatgcatgcattatctagtcagtcagggcttacagcaaactgtacccacattaccatagccctaggcagtggtttctaggtggcgagaattccatatgcctggccagactccaaaaagcttgcttcccaaaaataccaccctatacactctcctggaaatctacattgagacattgatttcattgggccaaacagaggcccaatctcaagggaccttctagtaaactacaagcccctgggcattgagccctgaggcctcatggtgaatcacatactagctacttgcctcagtgataggaaaacctgagaggaagccccctggctggtgtggggaggggaggtggagttgttcccctggggaggggctgctgccagcctgcatgctcctccagcaccaggtagggctgttctatccccagactactcactgctgctcaccttcatctacaacgggcgcgtggtgggcgaggcccaggtgcaaagcctggattgccgccttgtggctgagccctcaggctctgagagcagcatggagcaggtgctgttccccaagcctggcccactggagcccacgcagcgcctgctgagccagcttgagaggggcatcctagtggccagcaacccccgaggcctcttcgtgcagcgcctttgccccatccccatctcctggaatgcaccccaggctccacctgggccaggcccgcatctgctgcccagcaacgagtgcgtggagctcttcagaaccgcctacttctgcagagacttggtcaggtactttcagggcctgggccccccaccgaagttccaggtaacactgaatttctgggaagagagccatggctccagccatactccacagaatcttatcacagtgaagatggagcaggcctttgcccgatacttgctggagcagactccagagcagcaggcagccattctgtccctggtgtagagcctgggggacccatcttccacctcacctctttgttcttcctgtctcctttgaagtagactcattcttcacacgattgacctgtcctctttgtgataattctcagtagttgtccgtgataatcgtgtcctgaaaatcctcgcacacactggctggtggagaactcaaggctaattttttatcctttttttttttttaattttgagatatacgccctctttcatctgtaagggactaggaaattccaaatggtgtgaacccagggggcctttccctcttccctgacctcccaactctaaagccaagcactttatattttcctcttagatattcactaaggacttaaaataaaattttattgaaagaggaa

SEQ ID NO: 312266 - DNA, 1525 bp, Homo sapiens
aagcgctggtacggcccgggattatggtatctgagggaggcaggggaatgagccaggctggagctgagccagcagggcagggcccccctgctgcgacagtggcatcctgatagtgagatgctcagatgctgctgccctctagtggccgccagttccctgcaactcagaccacgtgatttctgggaaaaggccctccctggaggagaactgaaacttagggtggggactgtagaaaggggcggagagatcagccgcccagccaggagttaagctgaggtcgtctgagccctgcgacagcctggacagcaactcaggatggcatcaggcagggcacgctgcacccgaaaactccggaactgggtggtggagcaagtggagagtgggcagtttcccggagtgtgctgggatgatacagctaagaccatgttccggattccctggaaacatgcaggcaagcaggacttccgggaggaccaggatgctgccttcttcaaggcctgggcaatatttaagggaaagtataaggagggggacacaggaggtccagctgtctggaagactcgcctgcgctgtgcactcaacaagagttctgaatttaaggaggttcctgagaggggccgcatggatgttgctgagccctacaaggtgtatcagttgctgccaccaggaatcgtctctggccagccagggactcagaaagtaccatcaaagcgacagcacagttctgtgtcctctgagaggaaggaggaagaggatgccatgcagaactgcacactcagtccctctgtgctccaggactccctcaataatgaggaggagggggccagtgggggagcagtccattcagacattgggagcagcagcagcagcagcagccctgagccacaggaagttacagacacaactgaggccccctttcaaggggatcagaggtccctggagtttctgcttcctccagagccagacttggtcaggtactttcagggcctgggccccccaccgaagttccaggtaacactgaatttctgggaagagagccatggctccagccatactccacagaatcttatcacagtgaagatggagcaggcctttgcccgatacttgctggagcagactccagagcagcaggcagccattctgtccctggtgtagagcctgggggacccatcttccacctcacctctttgttcttcctgtctcctttgaagtagactcattcttcacacgattgacctgtcctctttgtgataattctcagtagttgtccgtgataatcgtgtcctgaaaatcctcgcacacactggctggtggagaactcaaggctaattttttatcctttttttttttttaattttgagatatacgccctctttcatctgtaagggactaggaaattccaaatggtgtgaacccagggggcctttccctcttccctgacctcccaactctaaagccaagcactttatattttcctcttagatattcactaaggacttaaaataaaattttattgaaagaggaa

SEQ ID NO: 312267 - DNA, 1897 bp, Homo sapiens
ggaaaactagctgcatcatttgcagagtccagtacaaaatgaaaatgtggaggccttgttcaaaaattttagggatattggccaggcacggtggctcacgcctgtaatcccagcacttcgggaggccaaggtgggtggatcacgaggtcaagagatcaagaccagcctggccaacatggtgaaaccctgtctctactaaaaatacaaaacttagctgggcctagcggtgcatgcctgtagtcccagctactcgggagactgaggcaggagaatcgcttgaaccagggaggtggagttgtagtgagtcgagatcgcaccactgcactccagcctggtgacagagtgagactctgtctcaaaaaaaaaaaaaaaaaatttccaaggatttcaagatggcaacgcagagcacagaccctgcataatcccttctgagctcagagctgcacgcctgtaaagccagtcctattggaggggcaggtggagcctgtaacacactgcctcttcttcccttgctttctttcctaggcctgggcaatatttaagggaaagtataaggagggggacacaggaggtccagctgtctggaagactcgcctgcgctgtgcactcaacaagagttctgaatttaaggaggttcctgagaggggccgcatggatgttgctgagccctacaaggtgtatcagttgctgccaccaggaatcgtctctggccagccagggactcagaaagtaccatcaaagcgacagcacagttctgtgtcctctgagaggaaggaggaagaggatgccatgcagaactgcacactcagtccctctgtgctccaggactccctcaataatgaggaggagggggccagtgggggagcagtccattcagacattgggagcagcagcagcagcagcagccctgagccacaggaagttacagacacaactgaggccccctttcaaggggatcagaggtccctggagtttctgcttcctccagagccagactactcactgctgctcaccttcatctacaacgggcgcgtggtgggcgaggcccaggtgcaaagcctggattgccgccttgtggctgagccctcaggctctgagagcagcatggagcaggtgctgttccccaagcctggcccactggagcccacgcagcgcctgctgagccagcttgagaggggcatcctagtggccagcaacccccgaggcctcttcgtgcagcgcctttgccccatccccatctcctggaatgcaccccaggctccacctgggccaggcccgcatctgctgcccagcaacgagtgcgtggagctcttcagaaccgcctacttctgcagagacttggtcaggtactttcagggcctgggccccccaccgaagttccaggtaacactgaatttctgggaagagagccatggctccagccatactccacagaatcttatcacagtgaagatggagcaggcctttgcccgatacttgctggagcagactccagagcagcaggcagccattctgtccctggtgtagagcctgggggacccatcttccacctcacctctttgttcttcctgtctcctttgaagtagactcattcttcacacgattgacctgtcctctttgtgataattctcagtagttgtccgtgataatcgtgtcctgaaaatcctcgcacacactggctggtggagaactcaaggctaattttttatcctttttttttttttaattttgagatatacgccctctttcatctgtaagggactaggaaattccaaatggtgtgaacccagggggcctttccctcttccctgacctcccaactctaaagccaagcactttatattttcctcttagatattcactaaggacttaaaataaaattttattgaaagaggaa

SEQ ID NO: 312268 - DNA, 1324 bp, Homo sapiens
  misc_feature (12)..(12): n is a, c, g, or t
atcggctcggtnccgaatctcgacagttgtgcactcaacaagagttctgaatttaaggaggttcctgagaggggccgcatggatgttgctgagccctacaaggtgtatcagttgctgccaccaggaatcgtctctggccagccagggactcagaaagtaccatcaaagcgacagcacagttctgtgtcctctgagaggaaggaggaagaggatgccatgcagaactgcacactcagtccctctgtgctccaggactccctcaataatgaggaggagggggccagtgggggagcagtccattcagacattgggagcagcagcagcagcagcagccctgagccacaggaagttacagacacaactgaggccccctttcaaggggatcagaggtccctggagtttctgcttcctccagagccagactactcactgctgctcaccttcatctacaacgggcgcgtggtgggcgaggcccaggtgcaaagcctggattgccgccttgtggctgagccctcaggctctgagagcagcatggagcaggtgctgttccccaagcctggcccactggagcccacgcagcgcctgctgagccagcttgagaggggcatcctagtggccagcaacccccgaggcctcttcgtgcagcgcctttgccccatccccatctcctggaatgcaccccaggctccacctgggccaggcccgcatctgctgcccagcaacgagtgcgtggagctcttcagaaccgcctacttctgcagagacttggtcaggtactttcagggcctgggccccccaccgaagttccaggtaacactgaatttctgggaagagagccatggctccagccatactccacagaatcttatcacagtgaagatggagcaggcctttgcccgatacttgctggagcagactccagagcagcaggcagccattctgtccctggtgtagagcctgggggacccatcttccacctcacctctttgttcttcctgtctcctttgaagtagactcattcttcacacgattgacctgtcctctttgtgataattctcagtagttgtccgtgataatcgtgtcctgaaaatcctcgcacacactggctggtggagaactcaaggctaattttttatcctttttttttttttaattttgagatatacgccctctttcatctgtaagggactaggaaattccaaatggtgtgaacccagggggcctttccctcttccctgacctcccaactctaaagccaagcactttatattttcctcttagatattcactaaggacttaaaataaaattttattgaaagaggaa

SEQ ID NO: 312269 - DNA, 1638 bp, Homo sapiens
aggctggtaccggccccagtcgttttgatgccctgcgacagcctggacagcaactcaggatggcatcaggcagggcacgctgcacccgaaaactccggaactgggtggtggagcaagtggagagtgggcagtttcccggagtgtgctgggatgatacagctaagaccatgttccggattccctggaaacatgcaggcaagcaggacttccgggaggaccaggatgctgccttcttcaaggcctgggcaatatttaagggaaagtataaggagggggacacaggaggtccagctgtctggaagactcgcctgcgctgtgcactcaacaagagttctgaatttaaggaggttcctgagaggggccgcatggatgttgctgagccctacaaggtgtatcagttgctgccaccaggaatcgtctctggccagccagggactcagaaagtaccatcaaagcgacagcacagttctgtgtcctctgagaggaaggaggaagaggatgccatgcagaactgcacactcagtccctctgtgctccaggactccctcaataatgaggaggagggggccagtgggggagcagtccattcagacattgggagcagcagcagcagcagcagccctgagccacaggaagttacagacacaactgaggccccctttcaaggggatcagaggtccctggagtttctgcttcctccagagccagcaccaggtagggctgttctatccccagactactcactgctgctcaccttcatctacaacgggcgcgtggtgggcgaggcccaggtgcaaagcctggattgccgccttgtggctgagccctcaggctctgagagcagcatggagcaggtgctgttccccaagcctggcccactggagcccacgcagcgcctgctgagccagcttgagaggggcatcctagtggccagcaacccccgaggcctcttcgtgcagcgcctttgccccatccccatctcctggaatgcaccccaggctccacctgggccaggcccgcatctgctgcccagcaacgagtgcgtggagctcttcagaaccgcctacttctgcagagacttggtcaggtactttcagggcctgggccccccaccgaagttccaggtaacactgaatttctgggaagagagccatggctccagccatactccacagaatcttatcacagtgaagatggagcaggcctttgcccgatacttgctggagcagactccagagcagcaggcagccattctgtccctggtgtagagcctgggggacccatcttccacctcacctctttgttcttcctgtctcctttgaagtagactcattcttcacacgattgacctgtcctctttgtgataattctcagtagttgtccgtgataatcgtgtcctgaaaatcctcgcacacactggctggtggagaactcaaggctaattttttatcctttttttttttttaattttgagatatacgccctctttcatctgtaagggactaggaaattccaaatggtgtgaacccagggggcctttccctcttccctgacctcccaactctaaagccaagcactttatattttcctcttagatattcactaaggacttaaaataaaattttattgaaagaggaa

SEQ ID NO: 312270 - DNA, 2163 bp, Homo sapiens
aagcgctggtacggcccgggattatggtatctgagggaggcaggggaatgagccaggctggagctgagccagcagggcagggcccccctgctgcgacagtggcatcctgatagtgagatgctcagatgctgctgccctctagtggccgccagttccctgcaactcagaccacgtgatttctgggaaaaggccctccctggaggagaactgaaacttagggtggggactgtagaaaggggcggagagatcagccgcccagccaggagttaagctgaggtcgtctgagccctgcgacagcctggacagcaactcaggatggcatcaggcagggcacgctgcacccgaaaactccggaactgggtggtggagcaagtggagagtgggcagtttcccggagtgtgctgggatgatacagctaagaccatgttccggattccctggaaacatgcaggcaagcaggacttccgggaggaccaggatgctgccttcttcaaggcctgggcaatatttaagggaaagtataaggagggggacacaggaggtccagctgtctggaagactcgcctgcgctgtgcactcaacaagagttctgaatttaaggaggttcctgagaggggccgcatggatgttgctgagccctacaaggtgtatcagttgctgccaccaggaatcgtctctggccagccagggactcagaaagtaccatcaaagcgacagcacagttctgtgtcctctgagaggaaggaggaagaggatgccatgcagaactgcacactcagtccctctgtgctccaggactccctcaataatgaggaggagggggccagtgggggagcagtccattcagacattgggagcagcagcagcagcagcagccctgagccacaggaagttacagacacaactgaggccccctttcaaggggatcagaggtccctggagtttctgcttcctccagagccaggtacgtggcatttctgactttctcctgtgccctgtgcccctgaggtcttccacctttgactatgcatgcattatctagtcagtcagggcttacagcaaactgtacccacattaccatagccctaggcagtggtttctaggtggcgagaattccatatgcctggccagactccaaaaagcttgcttcccaaaaataccaccctatacactctcctggaaatctacattgagacattgatttcattgggccaaacagaggcccaatctcaagggaccttctagtaaactacaagcccctgggcattgagccctgaggcctcatggtgaatcacatactagctacttgcctcagtgataggaaaacctgagaggaagccccctggctggtgtggggaggggaggtggagttgttcccctggggaggggctgctgccagcctgcatgctcctccagcaccaggtagggctgttctatccccagactactcactgctgctcaccttcatctacaacgggcgcgtggtgggcgaggcccaggtgcaaagcctggattgccgccttgtggctgagccctcaggctctgagagcagcatggagcaggtgctgttccccaagcctggcccactggagcccacgcagcgcctgctgagccagcttgagaggggcatcctagtggccagcaacccccgaggcctcttcgtgcagcgcctttgccccatccccatctcctggaatgcaccccaggctccacctgggccaggcccgcatctgctgcccagcaacgagtgcgtggagctcttcagaaccgcctacttctgcagagatcctccatgtagcctatgcatggcactcctgcgcttgtgtgttgcatatcctgtgtggccatatgcccagcctggcagctacctggcagctctcctccagccaagacaatggaagaggtggttcaggtagagcccagcacaagagtgtcatatcttggagaacaccatcacactgaagcatgcagtcactatgtgaaggtgcacagaagaattggcacagagattttgagcctcatggccttctcctacgtacacacatttgggagagctggcacacatcacacacactggccctgggtgcaccgtctttaccacactccaggcatgccttagggttgcgcttctctcccatccaattccagctcctactcaattct

SEQ ID NO: 312271 - DNA, 950 bp, Homo sapiens
ttgagtgatcccaactcagggcgagctgcagctcaggagcgagctgcactactcactgctgctcaccttcatctacaacgggcgcgtggtgggcgaggcccaggtgcaaagcctggattgccgccttgtggctgagccctcaggctctgagagcagcatggagcaggtgctgttccccaagcctggcccactggagcccacgcagcgcctgctgagccagcttgagaggggcatcctagtggccagcaacccccgaggcctcttcgtgcagcgcctttgccccatccccatctcctggaatgcaccccaggctccacctgggccaggcccgcatctgctgcccagcaacgagtgcgtggagctcttcagaaccgcctacttctgcagagacttggtcaggtactttcagggcctgggccccccaccgaagttccaggtaacactgaatttctgggaagagagccatggctccagccatactccacagaatcttatcacagtgaagatggagcaggcctttgcccgatacttgctggagcagactccagagcagcaggcagccattctgtccctggtgtagagcctgggggacccatcttccacctcacctctttgttcttcctgtctcctttgaagtagactcattcttcacacgattgacctgtcctctttgtgataattctcagtagttgtccgtgataatcgtgtcctgaaaatcctcgcacacactggctggtggagaactcaaggctaattttttatcctttttttttttttaattttgagatatacgccctctttcatctgtaagggactaggaaattccaaatggtgtgaacccagggggcctttccctcttccctgacctcccaactctaaagccaagcactttatattttcctcttagatattcactaaggacttaaaataaaattttattgaaagaggaa

SEQ ID NO: 312272 - DNA, 814 bp, Homo sapiens
gttgacatgatagaatcgagccggtaccaggtgctgttccccaagcctggcccactggagcccacgcagcgcctgctgagccagcttgagaggggcatcctagtggccagcaacccccgaggcctcttcgtgcagcgcctttgccccatccccatctcctggaatgcaccccaggctccacctgggccaggcccgcatctgctgcccagcaacgagtgcgtggagctcttcagaaccgcctacttctgcagagacttggtcaggtactttcagggcctgggccccccaccgaagttccaggtaacactgaatttctgggaagagagccatggctccagccatactccacagaatcttatcacagtgaagatggagcaggcctttgcccgatacttgctggagcagactccagagcagcaggcagccattctgtccctggtgtagagcctgggggacccatcttccacctcacctctttgttcttcctgtctcctttgaagtagactcattcttcacacgattgacctgtcctctttgtgataattctcagtagttgtccgtgataatcgtgtcctgaaaatcctcgcacacactggctggtggagaactcaaggctaattttttatcctttttttttttttaattttgagatatacgccctctttcatctgtaagggactaggaaattccaaatggtgtgaacccagggggcctttccctcttccctgacctcccaactctaaagccaagcactttatattttcctcttagatattcactaaggacttaaaataaaattttattgaaagaggaa

SEQ ID NO: 312273 - DNA, 557 bp, Homo sapiens
ctctagaggtcactaaactgagtggtacccaccgaagttccaggtaacactgaatttctgggaagagagccatggctccagccatactccacagaatcttatcacagtgaagatggagcaggcctttgcccgatacttgctggagcagactccagagcagcaggcagccattctgtccctggtgtagagcctgggggacccatcttccacctcacctctttgttcttcctgtctcctttgaagtagactcattcttcacacgattgacctgtcctctttgtgataattctcagtagttgtccgtgataatcgtgtcctgaaaatcctcgcacacactggctggtggagaactcaaggctaattttttatcctttttttttttttaattttgagatatacgccctctttcatctgtaagggactaggaaattccaaatggtgtgaacccagggggcctttccctcttccctgacctcccaactctaaagccaagcactttatattttcctcttagatattcactaaggacttaaaataaaattttattgaaagaggaa

SEQ ID NO: 312274 - DNA, 478 bp, Homo sapiens
tgaggctgttctctctgggcacatgagcttccaccccctacctcttagtaccccctgggcccaacttgttgggtcctgctacctccctatctgccagcagatcctccatgtagcctatgcatggcactcctgcgcttgtgtgttgcatatcctgtgtggccatatgcccagcctggcagctacctggcagctctcctccagccaagacaatggaagaggtggttcaggtagagcccagcacaagagtgtcatatcttggagaacaccatcacactgaagcatgcagtcactatgtgaaggtgcacagaagaattggcacagagattttgagcctcatggccttctcctacgtacacacatttgggagagctggcacacatcacacacactggccctgggtgcaccgtctttaccacactccaggcatgccttagggttgcgcttctctcccatccaattccagctcctactcaattct

SEQ ID NO: 312275 - DNA, 2078 bp, Homo sapiens
aagcgctggtacggcccgggattatggtatctgagggaggcaggggaatgagccaggctggagctgagccagcagggcagggcccccctgctgcgacagtggcatcctgatagtgagatgctcagatgctgctgccctctagtggccgccagttccctgcaactcagaccacgtgatttctgggaaaaggccctccctggaggagaactgaaacttagggtggggactgtagaaaggggcggagagatcagccgcccagccaggagttaagctgaggtcgtctgagccctgcgacagcctggacagcaactcaggatggcatcaggcagggcacgctgcacccgaaaactccggaactgggtggtggagcaagtggagagtgggcagtttcccggagtgtgctgggatgatacagctaagaccatgttccggattccctggaaacatgcaggcaagcaggacttccgggaggaccaggatgctgccttcttcaaggcctgggcaatatttaagggaaagtataaggagggggacacaggaggtccagctgtctggaagactcgcctgcgctgtgcactcaacaagagttctgaatttaaggaggttcctgagaggggccgcatggatgttgctgagccctacaaggtgtatcagttgctgccaccaggaatcgtctctggccagccagggactcagaaagtaccatcaaagcgacagcacagttctgtgtcctctgagaggaaggaggaagaggatgccatgcagaactgcacactcagtccctctgtgctccaggactccctcaataatgaggaggagggggccagtgggggagcagtccattcagacattgggagcagcagcagcagcagcagccctgagccacaggaagttacagacacaactgaggccccctttcaaggggatcagaggtccctggagtttctgcttcctccagagccagactactcactgctgctcaccttcatctacaacgggcgcgtggtgggcgaggcccaggtgcaaagcctggattgccgccttgtggctgagccctcaggctctgagagcagcatggagcaggtgctgttccccaagcctggcccactggagcccacgcagcgcctgctgagccagcttgagaggggcatcctagtggccagcaacccccgaggcctcttcgtgcagcgcctttgccccatccccatctcctggaatgcaccccaggctccacctgggccaggcccgcatctgctgcccagcaacgagtgcgtggagctcttcagaaccgcctacttctgcagagacttggtcaggtactttcagggcctgggccccccaccgaagttccaggtaacactgaatttctgggaagagagccatggctccagccatactccacagaatcttatcacagtgaagatggagcaggcctttgcccgatacttgctggagcagactccagagcagcaggcagccattctgtccctggtgtagagcctgggggacccatcttccacctcacctctttgttcttcctgtctcctttgaagtagactcattcttcacacgattgacctgtcctctttgtgataattctcagtagttgtccgtgataatcgtgtcctgaaaatcctcgcacacactggctggtggagaactcaaggctaattttttatcctttttttttttttaattttgagatatacgccctctttcatctgtaagggactaggaaattccaaatggtgtgaacccagggggcctttccctcttccctgacctcccaactctaaagccaagcactttatattttcctcttagatattcactaaggacttaaaataaaattttattgaaagaggaaaaaaaaaaaaaaaaaaaaaaaaaaaaaaaataacaaaaacaaaaaaaaaaaataaaaaaaaaaaactttggggggggcccgggtccaatattcccttatagggaggcgaattccaattcaatggccgacttttcccaatgcgcgactggaaaacccttgcgttccccaagttattcgcttggcagacaatccccgttttgcccgtttggtg

SEQ ID NO: 312276 - DNA, 1686 bp, Homo sapiens
aagcgctggtacggcccgggattatggtatctgagggaggcaggggaatgagccaggctggagctgagccagcagggcagggcccccctgctgcgacagtggcatcctgatagtgagatgctcagatgctgctgccctctagtggccgccagttccctgcaactcagaccacgtgatttctgggaaaaggccctccctggaggagaactgaaacttagggtggggactgtagaaaggggcggagagatcagccgcccagccaggagttaagctgaggtcgtctgagccctgcgacagcctggacagcaactcaggcctgggcaatatttaagggaaagtataaggagggggacacaggaggtccagctgtctggaagactcgcctgcgctgtgcactcaacaagagttctgaatttaaggaggttcctgagaggggccgcatggatgttgctgagccctacaaggtgtatcagttgctgccaccaggaatcgtctctggccagccagggactcagaaagtaccatcaaagcgacagcacagttctgtgtcctctgagaggaaggaggaagaggatgccatgcagaactgcacactcagtccctctgtgctccaggactccctcaataatgaggaggagggggccagtgggggagcagtccattcagacattgggagcagcagcagcagcagcagccctgagccacaggaagttacagacacaactgaggccccctttcaaggggatcagaggtccctggagtttctgcttcctccagagccagactactcactgctgctcaccttcatctacaacgggcgcgtggtgggcgaggcccaggtgcaaagcctggattgccgccttgtggctgagccctcaggctctgagagcagcatggagcaggtgctgttccccaagcctggcccactggagcccacgcagcgcctgctgagccagcttgagaggggcatcctagtggccagcaacccccgaggcctcttcgtgcagcgcctttgccccatccccatctcctggaatgcaccccaggctccacctgggccaggcccgcatctgctgcccagcaacgagtgcgtggagctcttcagaaccgcctacttctgcagagacttggtcaggtactttcagggcctgggccccccaccgaagttccaggtaacactgaatttctgggaagagagccatggctccagccatactccacagaatcttatcacagtgaagatggagcaggcctttgcccgatacttgctggagcagactccagagcagcaggcagccattctgtccctggtgtagagcctgggggacccatcttccacctcacctctttgttcttcctgtctcctttgaagtagactcattcttcacacgattgacctgtcctctttgtgataattctcagtagttgtccgtgataatcgtgtcctgaaaatcctcgcacacactggctggtggagaactcaaggctaattttttatcctttttttttttttaattttgagatatacgccctctttcatctgtaagggactaggaaattccaaatggtgtgaacccagggggcctttccctcttccctgacctcccaactctaaagccaagcactttatattttcctcttagatattcactaaggacttaaaataaaattttattgaaagaggaa

SEQ ID NO: 312277 - DNA, 1712 bp, Homo sapiens
tctagaggatcgttaaggtatgcctgcacaggaatcgtctctgtagccagccagggactcagaaagtaccatcaaagcgacagcacagttctgtgtcctctgagaggaaggaggaagaggatgccatgcagaactgcacactcagtccctctgtgctccaggactccctcaataatgaggaggagggggccagtgggggagcagtccattcagacattgggagcagcagcagcagcagcagccctgagccacaggaagttacagacacaactgaggccccctttcaaggggatcagaggtccctggagtttctgcttcctccagagccaggtacgtggcatttctgactttctcctgtgccctgtgcccctgaggtcttccacctttgactatgcatgcattatctagtcagtcagggcttacagcaaactgtacccacattaccatagccctaggcagtggtttctaggtggcgagaattccatatgcctggccagactccaaaaagcttgcttcccaaaaataccaccctatacactctcctggaaatctacattgagacattgatttcattgggccaaacagaggcccaatctcaagggaccttctagtaaactacaagcccctgggcattgagccctgaggcctcatggtgaatcacatactagctacttgcctcagtgataggaaaacctgagaggaagccccctggctggtgtggggaggggaggtggagttgttcccctggggaggggctgctgccagcctgcatgctcctccagcaccaggtagggctgttctatccccagactactcactgctgctcaccttcatctacaacgggcgcgtggtgggcgaggcccaggtgcaaagcctggattgccgccttgtggctgagccctcaggctctgagagcagcatggagcaggtgctgttccccaagcctggcccactggagcccacgcagcgcctgctgagccagcttgagaggggcatcctagtggccagcaacccccgaggcctcttcgtgcagcgcctttgccccatccccatctcctggaatgcaccccaggctccacctgggccaggcccgcatctgctgcccagcaacgagtgcgtggagctcttcagaaccgcctacttctgcagagacttggtcaggtactttcagggcctgggccccccaccgaagttccaggtaacactgaatttctgggaagagagccatggctccagccatactccacagaatcttatcacagtgaagatggagcaggcctttgcccgatacttgctggagcagactccagagcagcaggcagccattctgtccctggtgtagagcctgggggacccatcttccacctcacctctttgttcttcctgtctcctttgaagtagactcattcttcacacgattgacctgtcctctttgtgataattctcagtagttgtccgtgataatcgtgtcctgaaaatcctcgcacacactggctggtggagaactcaaggctaattttttatcctttttttttttttaattttgagatatacgccctctttcatctgtaagggactaggaaattccaaatggtgtgaacccagggggcctttccctcttccctgacctcccaactctaaagccaagcactttatattttcctcttagatattcactaaggacttaaaataaaattttattgaaagaggaa

SEQ ID NO: 312278 - DNA, 1555 bp, Homo sapiens
ggaaaactagctgcatcatttgcagagtccagtacaaaatgaaaatgtggaggccttgttcaaaaattttagggatattggccaggcacggtggctcacgcctgtaatcccagcacttcgggaggccaaggtgggtggatcacgaggtcaagagatcaagaccagcctggccaacatggtgaaaccctgtctctactaaaaatacaaaacttagctgggcctagcggtgcatgcctgtagtcccagctactcgggagactgaggcaggagaatcgcttgaaccagggaggtggagttgtagtgagtcgagatcgcaccactgcactccagcctggtgacagagtgagactctgtctcaaaaaaaaaaaaaaaaaatttccaaggatttcaagatggcaacgcagagcacagaccctgcataatcccttctgagctcagagctgcacgcctgtaaagccagtcctattggaggggcaggtggagcctgtaacacactgcctcttcttcccttgctttctttcctaggcctgggcaatatttaagggaaagtataaggagggggacacaggaggtccagctgtctggaagactcgcctgcgctgtgcactcaacaagagttctgaatttaaggaggttcctgagaggggccgcatggatgttgctgagccctacaaggtgtatcagttgctgccaccaggaatcgtctctggccagccagggactcagaaagtaccatcaaagcgacagcacagttctgtgtcctctgagaggaaggaggaagaggatgccatgcagaactgcacactcagtccctctgtgctccaggactccctcaataatgaggaggagggggccagtgggggagcagtccattcagacattgggagcagcagcagcagcagcagccctgagccacaggaagttacagacacaactgaggccccctttcaaggggatcagaggtccctggagtttctgcttcctccagagccagacttggtcaggtactttcagggcctgggccccccaccgaagttccaggtaacactgaatttctgggaagagagccatggctccagccatactccacagaatcttatcacagtgaagatggagcaggcctttgcccgatacttgctggagcagactccagagcagcaggcagccattctgtccctggtgtagagcctgggggacccatcttccacctcacctctttgttcttcctgtctcctttgaagtagactcattcttcacacgattgacctgtcctctttgtgataattctcagtagttgtccgtgataatcgtgtcctgaaaatcctcgcacacactggctggtggagaactcaaggctaattttttatcctttttttttttttaattttgagatatacgccctctttcatctgtaagggactaggaaattccaaatggtgtgaacccagggggcctttccctcttccctgacctcccaactctaaagccaagcactttatattttcctcttagatattcactaaggacttaaaataaaattttattgaaagaggaa

SEQ ID NO: 312279 - DNA, 2336 bp, Homo sapiens
gcagaggaggcggcggaacaccccgggttggtcgggtttccaagggctgacccgagctccagcactttttccgcgcctgatttttcagagctcttcagaaaccaggctgctttcaggaacattgctgtggattcccagggcctattccactagaagcaagatggctgaactcaatactcatgtgaatgtcaaggaaaagatctatgcagttagatcagttgttcccaacaaaagcaataatgaaatagtcctggtgctccaacagtttgattttaatgtggataaagccgtgcaagcctttgtggatggcagtgcaattcaagttctaaaagaatggaatatgacaggaaaaaagaagaacaataaaagaaaaagaagcaagtccaagcagcatcaaggcaacaaagatgctaaagacaaggtggagaggcctgaggcagggcccctgcagccgcagccaccacagattcaaaacggccccatgaatggctgcgagaaggacagctcgtccacagattctgctaacgaaaaaccagcccttatccctcgtgagaaaaagatctcgatacttgaggaaccttcaaaggcacttcgtggggtcacagaaggcaacagactactgcaacagaaactatccttagatgggaaccccaaacctatacatggaacaacagagaggtcagatggcctacagtggtcagctgagcagccttgtaacccaagcaagcctaaggcaaaaacatctcctgttaagtccaatacccctgcagctcatcttgaaataaagccagatgagttggcaaagaaaagaggcccaaatattgagaaatcagtgaaggatttgcaacgctgcaccgtttctctaactagatatcgcgtcatgattaaggaagaagtggatagttccgtgaagaagatcaaagctgcctttgctgaattacacaactgcatcattgacaaagaagtttcattaatggcagaaatggataaagttaaagaagaagccatggaaatcctgactgctcgtcagaagaaagcagaagaactaaagagactcactgaccttgccagtcagatggcagagatgcagctggccgaactcagggcagaaattaagcactttgtcagcgagcgtaaatatgacgaggagctcgggaaagctgcccggttttcctgtgacatcgaacagctgaaggcccaaatcatgctctgcggagaaattacacatccaaagaacaactattcctcaagaactccctgcagctccctgctgcctctgctgaatgcgcacgcagcaacctctgggaaacagagtaacttttcccgaaaatcatccactcacaataagccctctgaaggcaaagcggcaaaccccaaaatggtgagcagtctccccagcaccgccgacccctctcaccagaccatgccggccaacaagcagaatggatcttctaaccaaagacggagatttaatccacagtatcataacaacaggctaaatgggcctgccaagtcgcagggcagtgggaatgaagccgagccactgggaaagggcaacagccgccacgaacacagaagacagccgcacaacggcttccggcccaaaaacaaaggcggtgccaaaaatcaagaggcttccttggggatgaagacccccgaggccccggcccattctgaaaagccccggcgaaggcagcacgctgcagacacctcggaggccaggcccttccggggtagtgtcggtagggtttcacagtgcaatctctgccccacgagaatagaagtttccacagatgcagcagttctctcagtcccggctgtgacgttggtggcctgagctaggaggaaaaagagcagttttcactcagttttggttccctgcccgaggtgctgacccaattcgctgccaaaagagtgtcaatcagaatatacaaatcccgtatggttgtgtcatcctctcttaatcatttttactaattctaataatcagctctagcttgcttcataattttcatggctttgcttgatctgttgatgctttctctcatcaagactttgcagcattttagccaggcagtatttactcattattaggaaaatcaagatgtggctgaagatcagaggctcagttagcaacctgtgttgtagcagtgatgtcagtccattgattgtctttagagagttaatgttacaaaaaagaattcttaataatcagacaaacatgatctgctgaggacacatgcgcttttgtagaatttaacatctggtgtttttctgaaaaaatatatatacatatattgctttatttgaaacaaattaaaatatgctgcatttga

SEQ ID NO: 312280 - DNA, 2312 bp, Homo sapiens
tgacaaaatcattcattaacaaggggagtttcggtgaagtggaggtttggggaaaggcgaggaagtcggtctggagcaagcaagcaaagtgcggaagctgtactgggattcttctagaaagtggggtgggaaaggagctagggagggcgtgtggagggacgagatctgtgtcagaacgtgcgtgtgagcggatacaaaacccgagagaggcgtgagcagcgctgtgtttgcgagcgggagcgaggggcgccggctggggtgtgtgctcctgagctcttcagaaaccaggctgctttcaggaacattgctgtggattcccagggcctattccactagaagcaagatggctgaactcaatactcatgtgaatgtcaaggaaaagatctatgcagttagatcagttgttcccaacaaaagcaataatgaaatagtcctggtgctccaacagtttgattttaatgtggataaagccgtgcaagcctttgtggatggcagtgcaattcaagttctaaaagaatggaatatgacaggaaaaaagaagaacaataaaagaaaaagaagcaagtccaagcagcatcaaggcaacaaagatgctaaagacaaggtggagaggcctgaggcagggcccctgcagccgcagccaccacagattcaaaacggccccatgaatggctgcgagaaggacagctcgtccacagattctgctaacgaaaaaccagcccttatccctcgtgagaaaaagatctcgatacttgaggaaccttcaaaggcacttcgtggggtcacaggcccaaatattgagaaatcagtgaaggatttgcaacgctgcaccgtttctctaactagatatcgcgtcatgattaaggaagaagtggatagttccgtgaagaagatcaaagctgcctttgctgaattacacaactgcatcattgacaaagaagtttcattaatggcagaaatggataaagttaaagaagaagccatggaaatcctgactgctcgtcagaagaaagcagaagaactaaagagactcactgaccttgccagtcagatggcagagatgcagctggccgaactcagggcagaaattaagcactttgtcagcgagcgtaaatatgacgaggagctcgggaaagctgcccggttttcctgtgacatcgaacagctgaaggcccaaatcatgctctgcggagaaattacacatccaaagaacaactattcctcaagaactccctgcagctccctgctgcctctgctgaatgcgcacgcagcaacctctgggaaacagagtaacttttcccgaaaatcatccactcacaataagccctctgaaggcaaagcggcaaaccccaaaatggtgagcagtctccccagcaccgccgacccctctcaccagaccatgccggccaacaagcagaatggatcttctaaccaaagacggagatttaatccacagtatcataacaacaggctaaatgggcctgccaagtcgcagggcagtgggaatgaagccgagccactgggaaagggcaacagccgccacgaacacagaagacagccgcacaacggcttccggcccaaaaacaaaggcggtgccaaaaatcaagaggcttccttggggatgaagacccccgaggccccggcccattctgaaaagccccggcgaaggcagcacgctgcagacacctcggaggccaggcccttccggggtagtgtcggtagggtttcacagtgcaatctctgccccacgagaatagaagtttccacagatgcagcagttctctcagtcccggctgtgacgttggtggcctgagctaggaggaaaaagagcagttttcactcagttttggttccctgcccgaggtgctgacccaattcgctgccaaaagagtgtcaatcagaatatacaaatcccgtatggttgtgtcatcctctcttaatcatttttactaattctaataatcagctctagcttgcttcataattttcatggctttgcttgatctgttgatgctttctctcatcaagactttgcagcattttagccaggcagtatttactcattattaggaaaatcaagatgtggctgaagatcagaggctcagttagcaacctgtgttgtagcagtgatgtcagtccattgattgtctttagagagttaatgttacaaaaaagaattcttaataatcagacaaacatgatctgctgaggacacatgcgcttttgtagaatttaacatctggtgtttttctgaaaaaatatatatacatatattgctttatttgaaacaaattaaaatatgctgcatttga

SEQ ID NO: 312281 - DNA, 3454 bp, Homo sapiens
  misc_feature (1227)..(1227): n is a, c, g, or t
tacttaaattaacttgggtggttaataaagatgtaaatattcttcatccagtctataagaagagccaggaaccaaaaaaagatagcatatcttattttcatctctcagattcaccttatatttcaagagtctgagttgaatattatgttctcatttgtttctcattctagaacaataaaagaaaaagaagcaagtccaagcagcatcaaggcaacaaagatgctaaagacaaggtggagaggcctgaggcagggcccctgcagccgcagccaccacagattcaaaacggccccatgaatggctgcgagaaggacagctcgtccacagattctgctaacgaaaaaccagcccttatccctcgtgagaaaaagatctcgatacttgaggaaccttcaaaggcacttcgtggggtcacaggtcagtaatgcttaagtaaaattgcttaggaaggcatagatgaaaagagcacaaagggagctcattggggctgctgttgatgttgttgaaaatggaaggttgtttttctgcagtgtgtacgattcagccttcctgaagccaggattgggggtgaaggggaatgtaacagggcagagaataaatgctcaatctagctctacaccaagtcagaggatttttttttttttttttttgagtctgggtcttgctgtgcaaggctagagtgcagtggtgtggtcatagctcactgcagctgcagtcttgaactcctggactcaagcaatcctgccttggcatcccaaagtgctgggattacagacatgagccaccacacttagccagtcagaggtcttttttaatggaaattccagtttaaagaaatattctatatagacacatttgctagaattcacctggggtaatgaaggaatagttgatgacaaaaagaaatgttattcaatgttttctttagaaagggcagaccaaattattttaactgctggtattttttatatgatgtgacagaacataatcttccagggtgttagaatctggaacattaattatttgtgctatagctatatatttattactcttcaaaaggccacttcctaatccactgtttgactttgggcacatcatctactctagggtcccatttcctttctgaaaaataaggaaactgcattggaatctactagatcagtgcttctcaatactatctgacccaatgccccatttttagaacaaatgttaaaataaatctcatgnataatataacctacctagaaacagaatttcaataaataaaaatataagacattcaggaaaaactaaaatagaaggctcaataaagaggccagatttttacacccacttataatgaatcactttgcaattaaatgaagtaaggcagtagtcagctggatattgtggatactgttttacatttgacatgtacagtaagagctcaatacgtatatttgtatataacatggaatcactgtgaatgcacctgctacaaatgcagtccaatttagggtaatgggtgtcagctctaatatcatggctgctgatgtggttttccacatggccaaaaattcttagtcaagttctaaacatcataaagtaccatcttcctttaatttatgcaatagttgaatcttggaaatccaaacaaatgttgtaaatccgtagtaaaactgtctagactcacataattatatatatatttttttaaaatcatgaatgtccaggggaacatgagaaagttcaggacacagattaattctttgttgtgtatgacattcccaggattgcaagtcatctagcatcctgccccccaaccccaccgccaacacacacacacacaatcattttgctaatttttaaaaatgcccgctcagtttttcagaatgcctcctaaaaggtggtagatcctttgatgagaatcactacactagttgacccccaaagtccttctagttataaaatcatgagtttgtagaatcagtggcgttttaaactcccgttatattcagagcactgtgctagatgccacagtagattcagagaaggatatgatatggtctaggccctgatggaatcacattctgatatccttgaagagaaggctataggttcactggtgagtttaaggtttggggaagagaggtgcagtatccgactgagtgctcctgggagatttcctgggagcattgggtattgaaggaccaatagaactgaggtggtaaaaaggatttggagggttagagagaagtaaagagaactttactgagtgccctcaggtattgcacacctgctatatatgacacactgctattctctgacaaaccaaagatgagtaagacacatccatgcctaagaaaagtttagactaccagaagagatggaggtgcaaacagaaaagcaaatggtgacatgtaccaaatcagggtggcagtgagaaggcattaaataactggcacactctgtaatacactagtaagttcttaaattgctcacaaagcacaaattttcttccagaaacacatttcctaacaactccactaatagtgctgaaactcatgtcatccttactcacttcatgatggtttcctaaaaccgaacaatgacaacaacaaaaataacctatttcattttgaatctgaattctccagaaatttttttaattcaattttcactgtgcctacaattttgagactgttttgatttatagtcagagcaagagaaagaaattaaataatcgagtggcagattcccaacttgttattgctttcacatgaattactttcaaaatccaattactcaagttgccattttgatatcaatcatagactaaaagcttagcatatatattttttcatttacttataatttataccttctttataaaacaatgtcagtaactctgtcaagtatatgacattaaagcaaatgcaatatagaagtgcctcccttcccagtggacagctgccttgaaagttaagtacccaccaggggaatgggtacaagggggcttttggaaaccctcacatgaaactttctgtgaagaattatttcttgcacagtgatcccattctcccttctgttttttaagtatagcatgaaggcattgaggtgtgttggtattatttgttaatgttactgattcattacaaatgtctgtgcaataaatttttctgttaaagagtaaatgagccaggcttggtgactcacacttgtcatcccagcgctttgggaggctgaggcgggaggattgtttgagcccagcagtccaagaccagcctgggcaacatggcaaaaccccatctctacaaataatacaaaaattagctgggcctggtggtgcatgcctgtactcccagctacctgggaggctgaggtgggagaatcacctgagcccaggaggttgaggcttcagtgaactgtgatcgtgccactgcactccagcctggacagcagagtgagactcctc

SEQ ID NO: 312282 - DNA, 447 bp, Homo sapiens
tcgtgctgttccagaggacccccagcgcttaactacagcgctacctacagcgccttaggcttgcttgggttacaaggctgcaaggcaacagactactgcaacagaaactatccttagatgggaaccccaaacctatacatggaacaacagagaggtcagatggcctacagtggtcagctgagcagccttgtaacccaagcaagcctaaggcaaaaacatctcctgttaagtccaatacccctgcagctcatcttgaaataaagccagatgagttggcaaagaaaagaggtaaagtgatttcttttgcacaaatgattcaacatattttgcacatacagaaaagtgccagagtgacagaactttccaaaagatgctgcttagtgaagagagatgcacatgaaattgcatttttttttctgtgacccacatagatggaaaggcagaggt

SEQ ID NO: 312283 - DNA, 2290 bp, Homo sapiens
cgtggggcggccgagccggagttgtgtcagtgaaggaatccagtccgggggccgagctggctgcgccctccgctgcaagcgccggcagcgcggggcgagctccggacggcgcgcggcccaggcagcggctcccgctcggcccgccctccgagccgcaggggccgccaccgccgcggcgcctcccctggcgaccgcgcccccgggccccggctccggcccgggacggaggagccggcgctcgacacagagagctcttcagaaaccaggctgctttcaggaacattgctgtggattcccagggcctattccactagaagcaagatggctgaactcaatactcatgtgaatgtcaaggaaaagatctatgcagttagatcagttgttcccaacaaaagcaataatgaaatagtcctggtgctccaacagtttgattttaatgtggataaagccgtgcaagcctttgtggatggcagtgcaattcaagttctaaaagaatggaatatgacaggaaaaaagaagaacaataaaagaaaaagaagcaagtccaagcagcatcaaggcaacaaagatgctaaagacaaggtggagaggcctgaggcagggcccctgcagccgcagccaccacagattcaaaacggccccatgaatggctgcgagaaggacagctcgtccacagattctgctaacgaaaaaccagcccttatccctcgtgagaaaaagatctcgatacttgaggaaccttcaaaggcacttcgtggggtcacaggcccaaatattgagaaatcagtgaaggatttgcaacgctgcaccgtttctctaactagatatcgcgtcatgattaaggaagaagtggatagttccgtgaagaagatcaaagctgcctttgctgaattacacaactgcatcattgacaaagaagtttcattaatggcagaaatggataaagttaaagaagaagccatggaaatcctgactgctcgtcagaagaaagcagaagaactaaagagactcactgaccttgccagtcagatggcagagatgcagctggccgaactcagggcagaaattaagcactttgtcagcgagcgtaaatatgacgaggagctcgggaaagctgcccggttttcctgtgacatcgaacagctgaaggcccaaatcatgctctgcggagaaattacacatccaaagaacaactattcctcaagaactccctgcagctccctgctgcctctgctgaatgcgcacgcagcaacctctgggaaacagagtaacttttcccgaaaatcatccactcacaataagccctctgaaggcaaagcggcaaaccccaaaatggtgagcagtctccccagcaccgccgacccctctcaccagaccatgccggccaacaagcagaatggatcttctaaccaaagacggagatttaatccacagtatcataacaacaggctaaatgggcctgccaagtcgcagggcagtgggaatgaagccgagccactgggaaagggcaacagccgccacgaacacagaagacagccgcacaacggcttccggcccaaaaacaaaggcggtgccaaaaatcaagaggcttccttggggatgaagacccccgaggccccggcccattctgaaaagccccggcgaaggcagcacgctgcagacacctcggaggccaggcccttccggggtagtgtcggtagggtttcacagtgcaatctctgccccacgagaatagaagtttccacagatgcagcagttctctcagtcccggctgtgacgttggtggcctgagctaggaggaaaaagagcagttttcactcagttttggttccctgcccgaggtgctgacccaattcgctgccaaaagagtgtcaatcagaatatacaaatcccgtatggttgtgtcatcctctcttaatcatttttactaattctaataatcagctctagcttgcttcataattttcatggctttgcttgatctgttgatgctttctctcatcaagactttgcagcattttagccaggcagtatttactcattattaggaaaatcaagatgtggctgaagatcagaggctcagttagcaacctgtgttgtagcagtgatgtcagtccattgattgtctttagagagttaatgttacaaaaaagaattcttaataatcagacaaacatgatctgctgaggacacatgcgcttttgtagaatttaacatctggtgtttttctgaaaaaatatatatacatatattgctttatttgaaacaaattaaaatatgctgcatttga

SEQ ID NO: 312284 - DNA, 2016 bp, Homo sapiens
gctctagaggactcgctttggatgcggcctattccactagaagcaagatggctgaactcaatactcatgtgaatgtcaaggaaaagatctatgcagttagatcagttgttcccaacaaaagcaataatgaaatagtcctggtgctccaacagtttgattttaatgtggataaagccgtgcaagcctttgtggatggcagtgcaattcaagttctaaaagaatggaatatgacaggaaaaaagaagaacaataaaagaaaaagaagcaagtccaagcagcatcaaggcaacaaagatgctaaagacaaggtggagaggcctgaggcagggcccctgcagccgcagccaccacagattcaaaacggccccatgaatggctgcgagaaggacagctcgtccacagattctgctaacgaaaaaccagcccttatccctcgtgagaaaaagatctcgatacttgaggaaccttcaaaggcacttcgtggggtcacaggcccaaatattgagaaatcagtgaaggatttgcaacgctgcaccgtttctctaactagatatcgcgtcatgattaaggaagaagtggatagttccgtgaagaagatcaaagctgcctttgctgaattacacaactgcatcattgacaaagaagtttcattaatggcagaaatggataaagttaaagaagaagccatggaaatcctgactgctcgtcagaagaaagcagaagaactaaagagactcactgaccttgccagtcagatggcagagatgcagctggccgaactcagggcagaaattaagcactttgtcagcgagcgtaaatatgacgaggagctcgggaaagctgcccggttttcctgtgacatcgaacagctgaaggcccaaatcatgctctgcggagaaattacacatccaaagaacaactattcctcaagaactccctgcagctccctgctgcctctgctgaatgcgcacgcagcaacctctgggaaacagagtaacttttcccgaaaatcatccactcacaataagccctctgaaggcaaagcggcaaaccccaaaatggtgagcagtctccccagcaccgccgacccctctcaccagaccatgccggccaacaagcagaatggatcttctaaccaaagacggagatttaatccacagtatcataacaacaggctaaatgggcctgccaagtcgcagggcagtgggaatgaagccgagccactgggaaagggcaacagccgccacgaacacagaagacagccgcacaacggcttccggcccaaaaacaaaggcggtgccaaaaatcaagaggcttccttggggatgaagacccccgaggccccggcccattctgaaaagccccggcgaaggcagcacgctgcagacacctcggaggccaggcccttccggggtagtgtcggtagggtttcacagtgcaatctctgccccacgagaatagaagtttccacagatgcagcagttctctcagtcccggctgtgacgttggtggcctgagctaggaggaaaaagagcagttttcactcagttttggttccctgcccgaggtgctgacccaattcgctgccaaaagagtgtcaatcagaatatacaaatcccgtatggttgtgtcatcctctcttaatcatttttactaattctaataatcagctctagcttgcttcataattttcatggctttgcttgatctgttgatgctttctctcatcaagactttgcagcattttagccaggcagtatttactcattattaggaaaatcaagatgtggctgaagatcagaggctcagttagcaacctgtgttgtagcagtgatgtcagtccattgattgtctttagagagttaatgttacaaaaaagaattcttaataatcagacaaacatgatctgctgaggacacatgcgcttttgtagaatttaacatctggtgtttttctgaaaaaatatatatacatatattgctttatttgaaacaaattaaaatatgctgcatttga

SEQ ID NO: 312285 - DNA, 2301 bp, Homo sapiens
cagaggacctcttatgctctgggattaacctccttccaatgattacatgctgtcagttacaatctacctattgcagataggaagcttcattgtaatagcaaatttctggttgaagagcttgctaaggtccaatcccagagcataagaggacttctgatttatttttgcttaaagggatacaatccaaggccaacaaaagcaataatgaaatagtcctggtgctccaacagtttgattttaatgtggataaagccgtgcaagcctttgtggatggcagtgcaattcaagttctaaaagaatggaatatgacaggaaaaaagaagaacaataaaagaaaaagaagcaagtccaagcagcatcaaggcaacaaagatgctaaagacaaggtggagaggcctgaggcagggcccctgcagccgcagccaccacagattcaaaacggccccatgaatggctgcgagaaggacagctcgtccacagattctgctaacgaaaaaccagcccttatccctcgtgagaaaaagatctcgatacttgaggaaccttcaaaggcacttcgtggggtcacagaaggcaacagactactgcaacagaaactatccttagatgggaaccccaaacctatacatggaacaacagagaggtcagatggcctacagtggtcagctgagcagccttgtaacccaagcaagcctaaggcaaaaacatctcctgttaagtccaatacccctgcagctcatcttgaaataaagccagatgagttggcaaagaaaagaggcccaaatattgagaaatcagtgaaggatttgcaacgctgcaccgtttctctaactagatatcgcgtcatgattaaggaagaagtggatagttccgtgaagaagatcaaagctgcctttgctgaattacacaactgcatcattgacaaagaagtttcattaatggcagaaatggataaagttaaagaagaagccatggaaatcctgactgctcgtcagaagaaagcagaagaactaaagagactcactgaccttgccagtcagatggcagagatgcagctggccgaactcagggcagaaattaagcactttgtcagcgagcgtaaatatgacgaggagctcgggaaagctgcccggttttcctgtgacatcgaacagctgaaggcccaaatcatgctctgcggagaaattacacatccaaagaacaactattcctcaagaactccctgcagctccctgctgcctctgctgaatgcgcacgcagcaacctctgggaaacagagtaacttttcccgaaaatcatccactcacaataagccctctgaaggcaaagcggcaaaccccaaaatggtgagcagtctccccagcaccgccgacccctctcaccagaccatgccggccaacaagcagaatggatcttctaaccaaagacggagatttaatccacagtatcataacaacaggctaaatgggcctgccaagtcgcagggcagtgggaatgaagccgagccactgggaaagggcaacagccgccacgaacacagaagacagccgcacaacggcttccggcccaaaaacaaaggcggtgccaaaaatcaagaggcttccttggggatgaagacccccgaggccccggcccattctgaaaagccccggcgaaggcagcacgctgcagacacctcggaggccaggcccttccggggtagtgtcggtagggtttcacagtgcaatctctgccccacgagaatagaagtttccacagatgcagcagttctctcagtcccggctgtgacgttggtggcctgagctaggaggaaaaagagcagttttcactcagttttggttccctgcccgaggtgctgacccaattcgctgccaaaagagtgtcaatcagaatatacaaatcccgtatggttgtgtcatcctctcttaatcatttttactaattctaataatcagctctagcttgcttcataattttcatggctttgcttgatctgttgatgctttctctcatcaagactttgcagcattttagccaggcagtatttactcattattaggaaaatcaagatgtggctgaagatcagaggctcagttagcaacctgtgttgtagcagtgatgtcagtccattgattgtctttagagagttaatgttacaaaaaagaattcttaataatcagacaaacatgatctgctgaggacacatgcgcttttgtagaatttaacatctggtgtttttctgaaaaaatatatatacatatattgctttatttgaaacaaattaaaatatgctgcatttga

SEQ ID NO: 312286 - DNA, 2079 bp, Homo sapiens
gaagacttagggtatgaggaggtgaacgtcagtttttagagaaggtgttatgactgagtgtatgatgaagaagtaaatgatcatataaatgaattgatgcagtatcagtgaagaaatgtatgctagggacgaggtggtaaatgcttgatgtgtgatcactggacaacgtgactgcaaaaatgcaaaatgtgcccatgatgtggttgtggacaaggatcgaagctcgtccactacgattctgactaggcagagatgtacagccgcttatccctcgatggaggaaaggagatctcggtacttgaggaacctgcaaaaggcacttctgtgcggtctgcatgaatggcaaataaggcaacagactactgcaacagaaactatccttagatgggaaccccaaacctatacatggaacaacagagaggtcagatggcctacagtggtcagctgagcagccttgtaacccaagcaagcctaaggcaaaaacatctcctgttaagtccaatacccctgcagctcatcttgaaataaagccagatgagttggcaaagaaaagaggcccaaatattgagaaatcagtgaaggatttgcaacgctgcaccgtttctctaactagatatcgcgtcatgattaaggaagaagtggatagttccgtgaagaagatcaaagctgcctttgctgaattacacaactgcatcattgacaaagaagtttcattaatggcagaaatggataaagttaaagaagaagccatggaaatcctgactgctcgtcagaagaaagcagaagaactaaagagactcactgaccttgccagtcagatggcagagatgcagctggccgaactcagggcagaaattaagcactttgtcagcgagcgtaaatatgacgaggagctcgggaaagctgcccggttttcctgtgacatcgaacagctgaaggcccaaatcatgctctgcggagaaattacacatccaaagaacaactattcctcaagaactccctgcagctccctgctgcctctgctgaatgcgcacgcagcaacctctgggaaacagagtaacttttcccgaaaatcatccactcacaataagccctctgaaggcaaagcggcaaaccccaaaatggtgagcagtctccccagcaccgccgacccctctcaccagaccatgccggccaacaagcagaatggatcttctaaccaaagacggagatttaatccacagtatcataacaacaggctaaatgggcctgccaagtcgcagggcagtgggaatgaagccgagccactgggaaagggcaacagccgccacgaacacagaagacagccgcacaacggcttccggcccaaaaacaaaggcggtgccaaaaatcaagaggcttccttggggatgaagacccccgaggccccggcccattctgaaaagccccggcgaaggcagcacgctgcagacacctcggaggccaggcccttccggggtagtgtcggtagggtttcacagtgcaatctctgccccacgagaatagaagtttccacagatgcagcagttctctcagtcccggctgtgacgttggtggcctgagctaggaggaaaaagagcagttttcactcagttttggttccctgcccgaggtgctgacccaattcgctgccaaaagagtgtcaatcagaatatacaaatcccgtatggttgtgtcatcctctcttaatcatttttactaattctaataatcagctctagcttgcttcataattttcatggctttgcttgatctgttgatgctttctctcatcaagactttgcagcattttagccaggcagtatttactcattattaggaaaatcaagatgtggctgaagatcagaggctcagttagcaacctgtgttgtagcagtgatgtcagtccattgattgtctttagagagttaatgttacaaaaaagaattcttaataatcagacaaacatgatctgctgaggacacatgcgcttttgtagaatttaacatctggtgtttttctgaaaaaatatatatacatatattgctttatttgaaacaaattaaaatatgctgcatttga

SEQ ID NO: 312287 - DNA, 1393 bp, Homo sapiens
ctagccaggtcagcactaagactgagcgtggagcctcccagcaacagggctggaaagatccccaccaggtcagcactgcagtggacaccggaagagcagagtgaacgcatccacgggggtgccttggtcatttctgtaatcatggggttcctgcttttcatctctttcctccagcactttgtcagcgagcgtaaatatgacgaggagctcgggaaagctgcccggttttcctgtgacatcgaacagctgaaggcccaaatcatgctctgcggagaaattacacatccaaagaacaactattcctcaagaactccctgcagctccctgctgcctctgctgaatgcgcacgcagcaacctctgggaaacagagtaacttttcccgaaaatcatccactcacaataagccctctgaaggcaaagcggcaaaccccaaaatggtgagcagtctccccagcaccgccgacccctctcaccagaccatgccggccaacaagcagaatggatcttctaaccaaagacggagatttaatccacagtatcataacaacaggctaaatgggcctgccaagtcgcagggcagtgggaatgaagccgagccactgggaaagggcaacagccgccacgaacacagaagacagccgcacaacggcttccggcccaaaaacaaaggcggtgccaaaaatcaagaggcttccttggggatgaagacccccgaggccccggcccattctgaaaagccccggcgaaggcagcacgctgcagacacctcggaggccaggcccttccggggtagtgtcggtagggtttcacagtgcaatctctgccccacgagaatagaagtttccacagatgcagcagttctctcagtcccggctgtgacgttggtggcctgagctaggaggaaaaagagcagttttcactcagttttggttccctgcccgaggtgctgacccaattcgctgccaaaagagtgtcaatcagaatatacaaatcccgtatggttgtgtcatcctctcttaatcatttttactaattctaataatcagctctagcttgcttcataattttcatggctttgcttgatctgttgatgctttctctcatcaagactttgcagcattttagccaggcagtatttactcattattaggaaaatcaagatgtggctgaagatcagaggctcagttagcaacctgtgttgtagcagtgatgtcagtccattgattgtctttagagagttaatgttacaaaaaagaattcttaataatcagacaaacatgatctgctgaggacacatgcgcttttgtagaatttaacatctggtgtttttctgaaaaaatatatatacatatattgctttatttgaaacaaattaaaatatgctgcatttga

SEQ ID NO: 312288 - DNA, 2760 bp, Homo sapiens
tgacaaaatcattcattaacaaggggagtttcggtgaagtggaggtttggggaaaggcgaggaagtcggtctggagcaagcaagcaaagtgcggaagctgtactgggattcttctagaaagtggggtgggaaaggagctagggagggcgtgtggagggacgagatctgtgtcagaacgtgcgtgtgagcggatacaaaacccgagagaggcgtgagcagcgctgtgtttgcgagcgggagcgaggggcgccggctggggtgtgtgctcctgagctcttcagaaaccaggctgctttcaggaacattgctgtggattcccagggcctattccactagaagcaagatggctgaactcaatactcatgtgaatgtcaaggaaaagatctatgcagttagatcagttgttcccaacaaaagcaataatgaaatagtcctggtgctccaacagtttgattttaatgtggataaagccgtgcaagcctttgtggatggcagtgcaattcaagttctaaaagaatggaatatgacaggaaaaaagaagaacaataaaagaaaaagaagcaagtccaagcagcatcaaggcaacaaagatgctaaagacaaggtggagaggcctgaggcagggcccctgcagccgcagccaccacagattcaaaacggccccatgaatggctgcgagaaggacagctcgtccacagattctgctaacgaaaaaccagcccttatccctcgtgagaaaaagatctcgatacttgaggaaccttcaaaggcacttcgtggggtcacagaaggcaacagactactgcaacagaaactatccttagatgggaaccccaaacctatacatggaacaacagagaggtcagatggcctacagtggtcagctgagcagccttgtaacccaagcaagcctaaggcaaaaacatctcctgttaagtccaatacccctgcagctcatcttgaaataaagccagatgagttggcaaagaaaagaggcccaaatattgagaaatcagtgaaggatttgcaacgctgcaccgtttctctaactagatatcgcgtcatgattaaggaagaagtggatagttccgtgaagaagatcaaagctgcctttgctgaattacacaactgcatcattgacaaagaagtttcattaatggcagaaatggataaagttaaagaagaagccatggaaatcctgactgctcgtcagaagaaagcagaagaactaaagagactcactgaccttgccagtcagatggcagagatgcagctggccgaactcagggcagaaattaagcactttgtcagcgagcgtaaatatgacgaggagctcgggaaagctgcccggttttcctgtgacatcgaacagctgaaggcccaaatcatgctctgcggagaaattacacatccaaagaacaactattcctcaagaactccctgcagctccctgctgcctctgctgaatgcgcacgcagcaacctctgggaaacagagtaacttttcccgaaaatcatccactcacaataagccctctgaaggcaaagcggcaaaccccaaaatggtgagcagtctccccagcaccgccgacccctctcaccagaccatgccggccaacaagcagaatggatcttctaaccaaagacggagatttaatccacagtatcataacaacaggctaaatgggcctgccaagtcgcagggcagtgggaatgaagccgagccactgggaaagggcaacagccgccacgaacacagaagacagccgcacaacggcttccggcccaaaaacaaaggcggtgccaaaaatcaagaggcttccttggggatgaagacccccgaggccccggcccattctgaaaagccccggcgaaggcagcacgctgcagacacctcggaggccaggcccttccggggtagtgtcggtagggtttcacagtgcaatctctgccccacgagaatagaagtttccacagatgcagcagttctctcagtcccggctgtgacgttggtggcctgagctaggaggaaaaagagcagttttcactcagttttggttccctgcccgaggtgctgacccaattcgctgccaaaagagtgtcaatcagaatatacaaatcccgtatggttgtgtcatcctctcttaatcatttttactaattctaataatcagctctagcttgcttcataattttcatggctttgcttgatctgttgatgctttctctcatcaagactttgcagcattttagccaggcagtatttactcattattaggaaaatcaagatgtggctgaagatcagaggctcagttagcaacctgtgttgtagcagtgatgtcagtccattgattgtctttagagagttaatgttacaaaaaagaattcttaataatcagacaaacatgatctgctgaggacacatgcgcttttgtagaatttaacatctggtgtttttctgaaaaaatatatatacatatattgctttatttgaaacaaattaaaatatgctgcatttgaaaaaaaaaaaaaaaaaaaaaaaaaaaaaaaaaaaaaaaaaaaaaaaaaaaaaaaaaaaaaaaaaaaaaaggggggggcgcgcgcgcacataagaagaattctcccgcaggggggggcgccaaatatatgacgcgagcgacccacccgttttttgttgaacaagagggggggcccacaaataaggaggagcggtaatattatataaagcgagcaggcgcacggggccgggacatatacaacc

SEQ ID NO: 312289 - DNA, 1024 bp, Homo sapiens
ctagagatagctgattctagaggataaccgtctgggatgtaatgtgtgatatccctgtgatacttatgagcatgctcgccgagaaaccggcgagcccctcatcaccagaccatgccggccaacaagcagaatggatcttctaaccaaagacggagatttaatccacagtatcataacaacaggctaaatgggcctgccaagtcgcagggcagtgggaatgaagccgagccactgggaaagggcaacagccgccacgaacacagaagacagccgcacaacggcttccggcccaaaaacaaaggcggtgccaaaaatcaagaggcttccttggggatgaagacccccgaggccccggcccattctgaaaagccccggcgaaggcagcacgctgcagacacctcggaggccaggcccttccggggtagtgtcggtagggtttcacagtgcaatctctgccccacgagaatagaagtttccacagatgcagcagttctctcagtcccggctgtgacgttggtggcctgagctaggaggaaaaagagcagttttcactcagttttggttccctgcccgaggtgctgacccaattcgctgccaaaagagtgtcaatcagaatatacaaatcccgtatggttgtgtcatcctctcttaatcatttttactaattctaataatcagctctagcttgcttcataattttcatggctttgcttgatctgttgatgctttctctcatcaagactttgcagcattttagccaggcagtatttactcattattaggaaaatcaagatgtggctgaagatcagaggctcagttagcaacctgtgttgtagcagtgatgtcagtccattgattgtctttagagagttaatgttacaaaaaagaattcttaataatcagacaaacatgatctgctgaggacacatgcgcttttgtagaatttaacatctggtgtttttctgaaaaaatatatatacatatattgctttatttgaaacaaattaaaatatgctgcatttga

SEQ ID NO: 312290 - DNA, 1688 bp, Homo sapiens
tgacaaaatcattcattaacaaggggagtttcggtgaagtggaggtttggggaaaggcgaggaagtcggtctggagcaagcaagcaaagtgcggaagctgtactgggattcttctagaaagtggggtgggaaaggagctagggagggcgtgtggagggacgagatctgtgtcagaacgtgcgtgtgagcggatacaaaacccgagagaggcgtgagcagcgctgtgtttgcgagcgggagcgaggggcgccggctggggtgtgtgctcctgagctcttcagaaaccaggctgctttcaggaacattgctgtggattcccagggcctattccactagaagcaagatggctgaactcaatactcatgtgaatgtcaaggaaaagatctatgcagttagatcagttgttcccaacaaaagcaataatgaaatagtcctggtgctccaacagtttgattttaatgtggataaagccgtgcaagcctttgtggatggcagtgcaattcaagttctaaaagaatggaatatgacaggaaaaaagaagaacaataaaagaaaaagaagcaagtccaagcagcatcaaggcaacaaagatgctaaagacaaggtggagaggcctgaggcagggcccctgcagccgcagccaccacagattcaaaacggccccatgaatggctgcgagaaggacagctcgtccacagattctgctaacgaaaaaccagcccttatccctcgtgagaaaaagatctcgatacttgaggaaccttcaaaggcacttcgtggggtcacagaaggcaacagactactgcaacagaaactatccttagatgggaaccccaaacctatacatggaacaacagagaggtcagatggcctacagtggtcagctgagcagccttgtaacccaagcaagcctaaggcaaaaacatctcctgttaagtccaatacccctgcagctcatcttgaaataaagccagatgagttggcaaagaaaagaggcccaaatattgagaaatcagtgaaggatttgcaacgctgcaccgtttctctaactagatatcgcgtcatgattaaggaagaagtggatagttccgtgaagaagatcaaagctgcctttgctgaattacacaactgcatcattgacaaagaagtttcattaatggcagaaatggataaagttaaagaagaagccatggaaatcctgactgctcgtcagaagaaagcagaagaactaaagagactcactgaccttgccagtcagatggcagagatgcagctggccgaactcagggcagaaattaagcactttgtcagcgagcgtaaatatgacgaggagctcgggaaagctgcccggttttcctgtgacatcgaacagctgaaggcccaaatcatgctctgcggagaaattacacatccaaagaacaactattcctcaagaactccctgcagctccctgctgcctctgctgaatgcgcacgcagcaacctctgggaaacagagtaacttttcccgaaaatcatccactcacaataagccctctgaaggcaaagcggcaaaccccaaaatggtgagcagtctccccagcaccgccgacccctctcaccagaccatgccggccaacaagcagaatggatcttctaaccaaagacggagatttaattccacggtagaacacgtggggatcgtctaga

SEQ ID NO: 312291 - DNA, 1468 bp, Homo sapiens
tgacaaaatcattcattaacaaggggagtttcggtgaagtggaggtttggggaaaggcgaggaagtcggtctggagcaagcaagcaaagtgcggaagctgtactgggattcttctagaaagtggggtgggaaaggagctagggagggcgtgtggagggacgagatctgtgtcagaacgtgcgtgtgagcggatacaaaacccgagagaggcgtgagcagcgctgtgtttgcgagcgggagcgaggggcgccggctggggtgtgtgctcctgagctcttcagaaaccaggctgctttcaggaacattgctgtggattcccagggcctattccactagaagcaagatggctgaactcaatactcatgtgaatgtcaaggaaaagatctatgcagttagatcagttgttcccaacaaaagcaataatgaaatagtcctggtgctccaacagtttgattttaatgtggataaagccgtgcaagcctttgtggatggcagtgcaattcaagttctaaaagaatggaatatgacaggaaaaaagaagaacaataaaagaaaaagaagcaagtccaagcagcatcaaggcaacaaagatgctaaagacaaggtggagaggcctgaggcagggcccctgcagccgcagccaccacagattcaaaacggccccatgaatggctgcgagaaggacagctcgtccacagattctgctaacgaaaaaccagcccttatccctcgtgagaaaaagatctcgatacttgaggaaccttcaaaggcacttcgtggggtcacagaaggcaacagactactgcaacagaaactatccttagatgggaaccccaaacctatacatggaacaacagagaggtcagatggcctacagtggtcagctgagcagccttgtaacccaagcaagcctaaggcaaaaacatctcctgttaagtccaatacccctgcagctcatcttgaaataaagccagatgagttggcaaagaaaagaggcccaaatattgagaaatcagtgaaggatttgcaacgctgcaccgtttctctaactagatatcgcgtcatgattaaggaagaagtggatagttccgtgaagaagatcaaagctgcctttgctgaattacacaactgcatcattgacaaagaagtttcattaatggcagaaatggataaagttaaagaagaagccatggaaatcctgactgctcgtcagaagaaagcagaagaactaaagagactcactgaccttgccagtcagatggcagagatgcagctggccgaactcagggcagaaattaagcactttgtcagcgagcgtaaatatgacgaggagctcgggaaagctgcccggttttcctgtgacatcgaacagctgaaggcccaaatcatgctctgcggagaaattacacatccaaagaacactattcctcagactcctcgacctatagggatcctctagaacgcctcc

SEQ ID NO: 312292 - DNA, 1230 bp, Homo sapiens
tgacaaaatcattcattaacaaggggagtttcggtgaagtggaggtttggggaaaggcgaggaagtcggtctggagcaagcaagcaaagtgcggaagctgtactgggattcttctagaaagtggggtgggaaaggagctagggagggcgtgtggagggacgagatctgtgtcagaacgtgcgtgtgagcggatacaaaacccgagagaggcgtgagcagcgctgtgtttgcgagcgggagcgaggggcgccggctggggtgtgtgctcctgagctcttcagaaaccaggctgctttcaggaacattgctgtggattcccagggcctattccactagaagcaagatggctgaactcaatactcatgtgaatgtcaaggaaaagatctatgcagttagatcagttgttcccaacaaaagcaataatgaaatagtcctggtgctccaacagtttgattttaatgtggataaagccgtgcaagcctttgtggatggcagtgcaattcaagttctaaaagaatggaatatgacaggaaaaaagaagaacaataaaagaaaaagaagcaagtccaagcagcatcaaggcaacaaagatgctaaagacaaggtggagaggcctgaggcagggcccctgcagccgcagccaccacagattcaaaacggccccatgaatggctgcgagaaggacagctcgtccacagattctgctaacgaaaaaccagcccttatccctcgtgagaaaaagatctcgatacttgaggaaccttcaaaggcacttcgtggggtcacaggcccaaatattgagaaatcagtgaaggatttgcaacgctgcaccgtttctctaactagatatcgcgtcatgattaaggaagaagtggatagttccgtgaagaagatcaaagctgcctttgctgaattacacaactgcatcattgacaaagaagtttcattaatggcagaaatggataaagttaaagaagaagccatggaaatcctgactgctcgtcagaagaaagcagaagaactaaagagactcactgaccttgccagtcagatggcagagatgcagctggccgaactcagggcagaaattaagcactttgtcagcgagcgtaaatatgacgaggagctcgggaaagctgcccggttttcctgtgacatcgaacagctgaaggcccaaatcatgctctgcggagaaattacacatccaaagacaatctcactcagtcctgt

SEQ ID NO: 312293 - DNA, 408 bp, Homo sapiens
  misc_feature (13)..(14): n is a, c, g, or t
cgcgctagaggannccaggaagccatcctctcttaatcatttttactaattctaataatcagctctagcttgcttcataattttcatggctttgcttgatctgttgatgctttctctcatcaagactttgcagcattttagccaggcagtatttactcattattaggaaaatcaagatgtggctgaagatcagaggctcagttagcaacctgtgttgtagcagtgatgtcagtccattgattgtctttagagagttaatgttacaaaaaagaattcttaataatcagacaaacatgatctgctgaggacacatgcgcttttgtagaatttaacatctggtgtttttctgaaaaaatatatatacatatattgctttatttgaaacaaattaaaatatgctgcatttga

SEQ ID NO: 312294 - DNA, 467 bp, Homo sapiens
gcggccgcctactactactaaattcgcggccgcgtcgacctggggtgtgtgctcctgagctcttcagaaaccaggctgctttcaggaacattgctgtggattcccagggcctattccactagaagcaagatggctgaactcaatactcatgtgaatgtcaaggaaaagatctatgcagttagatcagttgttcccaacaaaagcaataatgaaatagtcctggtgctccaacagtttgattttaatgtggataaagccgtgcaagcctttgtggatggtaggtatacctgtaccctgcagctgaagatgttagacttaaatattccagatattccatattttttccttaaatgaactgaatatcaattcattatgtgtactttaggtctcatagaaatgtgcgaggtttcacatgattgcgctactgcactctagcctaggtgacagagtgagaccccatctcaaaa

SEQ ID NO: 312295 - DNA, 322 bp, Homo sapiens
gcggccgcctactactactaaattcgcggccgcgtcgacctggggtgtgtgctcctgagctcttcagaaaccaggctgctttcaggaacattgctgtggattcccagggcctattccactagaagcaagatggctgaactcaatactcatgtgaatgtcaaggaaaagatctatgcagttagatcagttgttcccaacaaaagcaataatgaaatagtcctggtgctccaacagtttgattttaatgtggataaagccgtgcaagcctttgtggatgccagtgcaattccagttctaaaaaggtgatttctggcaggaaaaa

SEQ ID NO: 312296 - DNA, 352 bp, Homo sapiens
agctcttcagaaaccaggctgctttcaggaacattgctgtggattcccaggtgagtagagatggtccttccctctctgtgacctcctcctgctgccatggccagctgtccctacacctgcagctgcctcctgggagccttgtcacagcctttggccgcctctgctgcctctcagggctcaacaccagagttctcttttagagtgtgttgactgaagttattcctgatagggcagtggggtctggtggatgtaagtcagtgccaccccacccacatcccccttccccacctgccttgccacgtctgtggatctttagagtagtttcatgcatatgaaatactttgaagtacca

SEQ ID NO: 312297 - DNA, 415 bp, Homo sapiens
agcaccaagatgccctttcaaataacatctttcaaaagaaaactttttaatgtttttgtggagctcctggccagtttcttcatcttctagcgcttcctaatgggttactgaggcagcagtgttggaggtgcagctcgtaacactgagcactttattattgcagttacacatccaaagaacaactattcctcaagaactccctgcagctccctgctgcctctgctgaatgcgcacgcagcaacctctgggaaacagagtaacttttcccgaaaatcatccactcacaataagccctctgaaggcaaagcggcaaaccccaaaatggtgagcagtctccccagcaccgccgacccctctcaccagaccatgccggccaacaagcaggtaagccgacactggtgcagggtgccagagg

SEQ ID NO: 312298 - DNA, 2519 bp, Homo sapiens
tgacaaaatcattcattaacaaggggagtttcggtgaagtggaggtttggggaaaggcgaggaagtcggtctggagcaagcaagcaaagtgcggaagctgtactgggattcttctagaaagtggggtgggaaaggagctagggagggcgtgtggagggacgagatctgtgtcagaacgtgcgtgtgagcggatacaaaacccgagagaggcgtgagcagcgctgtgtttgcgagcgggagcgaggggcgccggctggggtgtgtgctcctgagctcttcagaaaccaggctgctttcaggaacattgctgtggattcccagggcctattccactagaagcaagatggctgaactcaatactcatgtgaatgtcaaggaaaagatctatgcagttagatcagttgttcccaacaaaagcaataatgaaatagtcctggtgctccaacagtttgattttaatgtggataaagccgtgcaagcctttgtggatggcagtgcaattcaagttctaaaagaatggaatatgacaggaaaaaagaagaacaataaaagaaaaagaagcaagtccaagcagcatcaaggcaacaaagatgctaaagacaaggtggagaggcctgaggcagggcccctgcagccgcagccaccacagattcaaaacggccccatgaatggctgcgagaaggacagctcgtccacagattctgctaacgaaaaaccagcccttatccctcgtgagaaaaagatctcgatacttgaggaaccttcaaaggcacttcgtggggtcacagaaggcaacagactactgcaacagaaactatccttagatgggaaccccaaacctatacatggaacaacagagaggtcagatggcctacagtggtcagctgagcagccttgtaacccaagcaagcctaaggcaaaaacatctcctgttaagtccaatacccctgcagctcatcttgaaataaagccagatgagttggcaaagaaaagaggcccaaatattgagaaatcagtgaaggatttgcaacgctgcaccgtttctctaactagatatcgcgtcatgattaaggaagaagtggatagttccgtgaagaagatcaaagctgcctttgctgaattacacaactgcatcattgacaaagaagtttcattaatggcagaaatggataaagttaaagaagaagccatggaaatcctgactgctcgtcagaagaaagcagaagaactaaagagactcactgaccttgccagtcagatggcagagatgcagctggccgaactcagggcagaaattaagcactttgtcagcgagcgtaaatatgacgaggagctcgggaaagctgcccggttttcctgtgacatcgaacagctgaaggcccaaatcatgctctgcggagaaattacacatccaaagaacaactattcctcaagaactccctgcagctccctgctgcctctgctgaatgcgcacgcagcaacctctgggaaacagagtaacttttcccgaaaatcatccactcacaataagccctctgaaggcaaagcggcaaaccccaaaatggtgagcagtctccccagcaccgccgacccctctcaccagaccatgccggccaacaagcagaatggatcttctaaccaaagacggagatttaatccacagtatcataacaacaggctaaatgggcctgccaagtcgcagggcagtgggaatgaagccgagccactgggaaagggcaacagccgccacgaacacagaagacagccgcacaacggcttccggcccaaaaacaaaggcggtgccaaaaatcaagaggcttccttggggatgaagacccccgaggccccggcccattctgaaaagccccggcgaaggcagcacgctgcagacacctcggaggccaggcccttccggggtagtgtcggtagggtttcacagtgcaatctctgccccacgagaatagaagtttccacagatgcagcagttctctcagtcccggctgtgacgttggtggcctgagctaggaggaaaaagagcagttttcactcagttttggttccctgcccgaggtgctgacccaattcgctgccaaaagagtgtcaatcagaatatacaaatcccgtatggttgtgtcatcctctcttaatcatttttactaattctaataatcagctctagcttgcttcataattttcatggctttgcttgatctgttgatgctttctctcatcaagactttgcagcattttagccaggcagtatttactcattattaggaaaatcaagatgtggctgaagatcagaggctcagttagcaacctgtgttgtagcagtgatgtcagtccattgattgtctttagagagttaatgttacaaaaaagaattcttaataatcagacaaacatgatctgctgaggacacatgcgcttttgtagaatttaacatctggtgtttttctgaaaaaatatatatacatatattgctttatttgaaacaaattaaaatatgctgcatttga

SEQ ID NO: 312299 - DNA, 739 bp, Homo sapiens
cgtggggcggccgagccggagttgtgtcagtgaaggaatccagtccgggggccgagctggctgcgccctccgctgcaagcgccggcagcgcggggcgagctccggacggcgcgcggcccaggcagcggctcccgctcggcccgccctccgagccgcaggggccgccaccgccgcggcgcctcccctggcgaccgcgcccccgggccccggctccggcccgggacggaggagccggcgctcgacacagagagctcttcagaaaccaggctgctttcaggaacattgctgtggattcccagctttcagacaacacatgactaagacagaatgagaccactctagttgcctcatgggaaactcgggaaaagactgcaaaaacaacattgtttctccctttggaattctggagttataaggcagaggtcccccatcttcccgaactgtaagtgaattccctctccattatcctcattcaatggccagccagcttctgcttgaacagattctgtgacaggagtctcactacctcccagggacagcttcacctgccctttaatgacaccaaatgtaacaggaataaagggaaaggaacataaggagatagtaagttaagggatgggtaaggaaaggaatgtgggcccgggaaagggtatttccctgggtggtttgttcctcactggggaagtggggagcaaaatttaacgcactgagaaaatgttgttcctcccattgataattt

SEQ ID NO: 312300 - DNA, 2497 bp, Homo sapiens
cgtggggcggccgagccggagttgtgtcagtgaaggaatccagtccgggggccgagctggctgcgccctccgctgcaagcgccggcagcgcggggcgagctccggacggcgcgcggcccaggcagcggctcccgctcggcccgccctccgagccgcaggggccgccaccgccgcggcgcctcccctggcgaccgcgcccccgggccccggctccggcccgggacggaggagccggcgctcgacacagagagctcttcagaaaccaggctgctttcaggaacattgctgtggattcccagggcctattccactagaagcaagatggctgaactcaatactcatgtgaatgtcaaggaaaagatctatgcagttagatcagttgttcccaacaaaagcaataatgaaatagtcctggtgctccaacagtttgattttaatgtggataaagccgtgcaagcctttgtggatggcagtgcaattcaagttctaaaagaatggaatatgacaggaaaaaagaagaacaataaaagaaaaagaagcaagtccaagcagcatcaaggcaacaaagatgctaaagacaaggtggagaggcctgaggcagggcccctgcagccgcagccaccacagattcaaaacggccccatgaatggctgcgagaaggacagctcgtccacagattctgctaacgaaaaaccagcccttatccctcgtgagaaaaagatctcgatacttgaggaaccttcaaaggcacttcgtggggtcacagaaggcaacagactactgcaacagaaactatccttagatgggaaccccaaacctatacatggaacaacagagaggtcagatggcctacagtggtcagctgagcagccttgtaacccaagcaagcctaaggcaaaaacatctcctgttaagtccaatacccctgcagctcatcttgaaataaagccagatgagttggcaaagaaaagaggcccaaatattgagaaatcagtgaaggatttgcaacgctgcaccgtttctctaactagatatcgcgtcatgattaaggaagaagtggatagttccgtgaagaagatcaaagctgcctttgctgaattacacaactgcatcattgacaaagaagtttcattaatggcagaaatggataaagttaaagaagaagccatggaaatcctgactgctcgtcagaagaaagcagaagaactaaagagactcactgaccttgccagtcagatggcagagatgcagctggccgaactcagggcagaaattaagcactttgtcagcgagcgtaaatatgacgaggagctcgggaaagctgcccggttttcctgtgacatcgaacagctgaaggcccaaatcatgctctgcggagaaattacacatccaaagaacaactattcctcaagaactccctgcagctccctgctgcctctgctgaatgcgcacgcagcaacctctgggaaacagagtaacttttcccgaaaatcatccactcacaataagccctctgaaggcaaagcggcaaaccccaaaatggtgagcagtctccccagcaccgccgacccctctcaccagaccatgccggccaacaagcagaatggatcttctaaccaaagacggagatttaatccacagtatcataacaacaggctaaatgggcctgccaagtcgcagggcagtgggaatgaagccgagccactgggaaagggcaacagccgccacgaacacagaagacagccgcacaacggcttccggcccaaaaacaaaggcggtgccaaaaatcaagaggcttccttggggatgaagacccccgaggccccggcccattctgaaaagccccggcgaaggcagcacgctgcagacacctcggaggccaggcccttccggggtagtgtcggtagggtttcacagtgcaatctctgccccacgagaatagaagtttccacagatgcagcagttctctcagtcccggctgtgacgttggtggcctgagctaggaggaaaaagagcagttttcactcagttttggttccctgcccgaggtgctgacccaattcgctgccaaaagagtgtcaatcagaatatacaaatcccgtatggttgtgtcatcctctcttaatcatttttactaattctaataatcagctctagcttgcttcataattttcatggctttgcttgatctgttgatgctttctctcatcaagactttgcagcattttagccaggcagtatttactcattattaggaaaatcaagatgtggctgaagatcagaggctcagttagcaacctgtgttgtagcagtgatgtcagtccattgattgtctttagagagttaatgttacaaaaaagaattcttaataatcagacaaacatgatctgctgaggacacatgcgcttttgtagaatttaacatctggtgtttttctgaaaaaatatatatacatatattgctttatttgaaacaaattaaaatatgctgcatttga

SEQ ID NO: 312301 - DNA, 2193 bp, Homo sapiens
ctgctcgaattcaagcttctaacgatgtacggggacatgtgaatgtcaaggaatagatctatgcagttagatcagttgttcccaacaaaagcaataatgaaatagtcctggtgctccaacagtttgattttaatgtggataaagccgtgcaagcctttgtggatggcagtgcaattcaagttctaaaagaatggaatatgacaggaaaaaagaagaacaataaaagaaaaagaagcaagtccaagcagcatcaaggcaacaaagatgctaaagacaaggtggagaggcctgaggcagggcccctgcagccgcagccaccacagattcaaaacggccccatgaatggctgcgagaaggacagctcgtccacagattctgctaacgaaaaaccagcccttatccctcgtgagaaaaagatctcgatacttgaggaaccttcaaaggcacttcgtggggtcacagaaggcaacagactactgcaacagaaactatccttagatgggaaccccaaacctatacatggaacaacagagaggtcagatggcctacagtggtcagctgagcagccttgtaacccaagcaagcctaaggcaaaaacatctcctgttaagtccaatacccctgcagctcatcttgaaataaagccagatgagttggcaaagaaaagaggcccaaatattgagaaatcagtgaaggatttgcaacgctgcaccgtttctctaactagatatcgcgtcatgattaaggaagaagtggatagttccgtgaagaagatcaaagctgcctttgctgaattacacaactgcatcattgacaaagaagtttcattaatggcagaaatggataaagttaaagaagaagccatggaaatcctgactgctcgtcagaagaaagcagaagaactaaagagactcactgaccttgccagtcagatggcagagatgcagctggccgaactcagggcagaaattaagcactttgtcagcgagcgtaaatatgacgaggagctcgggaaagctgcccggttttcctgtgacatcgaacagctgaaggcccaaatcatgctctgcggagaaattacacatccaaagaacaactattcctcaagaactccctgcagctccctgctgcctctgctgaatgcgcacgcagcaacctctgggaaacagagtaacttttcccgaaaatcatccactcacaataagccctctgaaggcaaagcggcaaaccccaaaatggtgagcagtctccccagcaccgccgacccctctcaccagaccatgccggccaacaagcagaatggatcttctaaccaaagacggagatttaatccacagtatcataacaacaggctaaatgggcctgccaagtcgcagggcagtgggaatgaagccgagccactgggaaagggcaacagccgccacgaacacagaagacagccgcacaacggcttccggcccaaaaacaaaggcggtgccaaaaatcaagaggcttccttggggatgaagacccccgaggccccggcccattctgaaaagccccggcgaaggcagcacgctgcagacacctcggaggccaggcccttccggggtagtgtcggtagggtttcacagtgcaatctctgccccacgagaatagaagtttccacagatgcagcagttctctcagtcccggctgtgacgttggtggcctgagctaggaggaaaaagagcagttttcactcagttttggttccctgcccgaggtgctgacccaattcgctgccaaaagagtgtcaatcagaatatacaaatcccgtatggttgtgtcatcctctcttaatcatttttactaattctaataatcagctctagcttgcttcataattttcatggctttgcttgatctgttgatgctttctctcatcaagactttgcagcattttagccaggcagtatttactcattattaggaaaatcaagatgtggctgaagatcagaggctcagttagcaacctgtgttgtagcagtgatgtcagtccattgattgtctttagagagttaatgttacaaaaaagaattcttaataatcagacaaacatgatctgctgaggacacatgcgcttttgtagaatttaacatctggtgtttttctgaaaaaatatatatacatatattgctttatttgaaacaaattaaaatatgctgcatttga

SEQ ID NO: 312302 - DNA, 1783 bp, Homo sapiens
tgacagcctccttccaaagagtgcaggagacaagcgtaccccagatggcccagtcagagaccccactggtgaaatcataacagcctcaggtgccacacaagccacccacactgggttacaaacattctcctgatggaacttttactagacaaaagatgagtccctttttctggtgggctaattgctttgttttgttgtttagcttacaaacaaaggattaaatgctcaagttaataatattttttgacatcaattttaggcccaaatattgagaaatcagtgaaggatttgcaacgctgcaccgtttctctaactagatatcgcgtcatgattaaggaagaagtggatagttccgtgaagaagatcaaagctgcctttgctgaattacacaactgcatcattgacaaagaagtttcattaatggcagaaatggataaagttaaagaagaagccatggaaatcctgactgctcgtcagaagaaagcagaagaactaaagagactcactgaccttgccagtcagatggcagagatgcagctggccgaactcagggcagaaattaagcactttgtcagcgagcgtaaatatgacgaggagctcgggaaagctgcccggttttcctgtgacatcgaacagctgaaggcccaaatcatgctctgcggagaaattacacatccaaagaacaactattcctcaagaactccctgcagctccctgctgcctctgctgaatgcgcacgcagcaacctctgggaaacagagtaacttttcccgaaaatcatccactcacaataagccctctgaaggcaaagcggcaaaccccaaaatggtgagcagtctccccagcaccgccgacccctctcaccagaccatgccggccaacaagcagaatggatcttctaaccaaagacggagatttaatccacagtatcataacaacaggctaaatgggcctgccaagtcgcagggcagtgggaatgaagccgagccactgggaaagggcaacagccgccacgaacacagaagacagccgcacaacggcttccggcccaaaaacaaaggcggtgccaaaaatcaagaggcttccttggggatgaagacccccgaggccccggcccattctgaaaagccccggcgaaggcagcacgctgcagacacctcggaggccaggcccttccggggtagtgtcggtagggtttcacagtgcaatctctgccccacgagaatagaagtttccacagatgcagcagttctctcagtcccggctgtgacgttggtggcctgagctaggaggaaaaagagcagttttcactcagttttggttccctgcccgaggtgctgacccaattcgctgccaaaagagtgtcaatcagaatatacaaatcccgtatggttgtgtcatcctctcttaatcatttttactaattctaataatcagctctagcttgcttcataattttcatggctttgcttgatctgttgatgctttctctcatcaagactttgcagcattttagccaggcagtatttactcattattaggaaaatcaagatgtggctgaagatcagaggctcagttagcaacctgtgttgtagcagtgatgtcagtccattgattgtctttagagagttaatgttacaaaaaagaattcttaataatcagacaaacatgatctgctgaggacacatgcgcttttgtagaatttaacatctggtgtttttctgaaaaaatatatatacatatattgctttatttgaaacaaattaaaatatgctgcatttga

SEQ ID NO: 312303 - DNA, 1346 bp, Homo sapiens
gtgtctcgacgacccttggccatgctgcactgctcgctggcttatccttgaagaactagcgatattcacagaacttgacgcggatatgggacagatgtacgtggtcgtggtcatagctgaaatcaagcactttgtcagcgagcgtaaatatgacgaggagctcgggaaagctgcccggttttcctgtgacatcgaacagctgaaggcccaaatcatgctctgcggagaaattacacatccaaagaacaactattcctcaagaactccctgcagctccctgctgcctctgctgaatgcgcacgcagcaacctctgggaaacagagtaacttttcccgaaaatcatccactcacaataagccctctgaaggcaaagcggcaaaccccaaaatggtgagcagtctccccagcaccgccgacccctctcaccagaccatgccggccaacaagcagaatggatcttctaaccaaagacggagatttaatccacagtatcataacaacaggctaaatgggcctgccaagtcgcagggcagtgggaatgaagccgagccactgggaaagggcaacagccgccacgaacacagaagacagccgcacaacggcttccggcccaaaaacaaaggcggtgccaaaaatcaagaggcttccttggggatgaagacccccgaggccccggcccattctgaaaagccccggcgaaggcagcacgctgcagacacctcggaggccaggcccttccggggtagtgtcggtagggtttcacagtgcaatctctgccccacgagaatagaagtttccacagatgcagcagttctctcagtcccggctgtgacgttggtggcctgagctaggaggaaaaagagcagttttcactcagttttggttccctgcccgaggtgctgacccaattcgctgccaaaagagtgtcaatcagaatatacaaatcccgtatggttgtgtcatcctctcttaatcatttttactaattctaataatcagctctagcttgcttcataattttcatggctttgcttgatctgttgatgctttctctcatcaagactttgcagcattttagccaggcagtatttactcattattaggaaaatcaagatgtggctgaagatcagaggctcagttagcaacctgtgttgtagcagtgatgtcagtccattgattgtctttagagagttaatgttacaaaaaagaattcttaataatcagacaaacatgatctgctgaggacacatgcgcttttgtagaatttaacatctggtgtttttctgaaaaaatatatatacatatattgctttatttgaaacaaattaaaatatgctgcatttga

SEQ ID NO: 312304 - DNA, 2465 bp, Homo sapiens
tgacaaaatcattcattaacaaggggagtttcggtgaagtggaggtttggggaaaggcgaggaagtcggtctggagcaagcaagcaaagtgcggaagctgtactgggattcttctagaaagtggggtgggaaaggagctagggagggcgtgtggagggacgagatctgtgtcagaacgtgcgtgtgagcggatacaaaacccgagagaggcgtgagcagcgctgtgtttgcgagcgggagcgaggggcgccggctggggtgtgtgctcctgagctcttcagaaaccaggctgctttcaggaacattgctgtggattcccagggcctattccactagaagcaagatggctgaactcaatactcatgtgaatgtcaaggaaaagatctatgcagttagatcagttgttcccaacaaaagcaataatgaaatagtcctggtgctccaacagtttgattttaatgtggataaagccgtgcaagcctttgtggatggcagtgcaattcaagttctaaaagaatggaatatgacaggaaaaaagaagaacaataaaagaaaaagaagcaagtccaagcagcatcaaggcaacaaagatgctaaagacaaggtggagaggcctgaggcagggcccctgcagccgcagccaccacagattcaaaacggccccatgaatggctgcgagaaggacagctcgtccacagattctgctaacgaaaaaccagcccttatccctcgtgagaaaaagatctcgatacttgaggaaccttcaaaggcacttcgtggggtcacagaaggcaacagactactgcaacagaaactatccttagatgggaaccccaaacctatacatggaacaacagagaggtcagatggcctacagtggtcagctgagcagccttgtaacccaagcaagcctaaggcaaaaacatctcctgttaagtccaatacccctgcagctcatcttgaaataaagccagatgagttggcaaagaaaagaggcccaaatattgagaaatcagtgaaggatttgcaacgctgcaccgtttctctaactagatatcgcgtcatgattaaggaagaagtggatagttccgtgaagaagatcaaagctgcctttgctgaattacacaactgcatcattgacaaagaagtttcattaatggcagaaatggataaagttaaagaagaagccatggaaatcctgactgctcgtcagaagaaagcagaagaactaaagagactcactgaccttgccagtcagatggcagagatgcagctggccgaactcagggcagaaattaagcactttgtcagcgagcgtaaatatgacgaggagctcgggaaagctgcccggttttcctgtgacatcgaacagctgaaggcccaaatcatgctctgcggagaaattacacatccaaagaacaactattcctcaagaactccctgcagctccctgctgcctctgctgaatgcgcacgcagcaacctctgggaaacagagtaacttttcccgaaaatcatccactcacaataagccctctgaaggcaaagcggcaaaccccaaaatggtgagcagtctccccagcaccgccgacccctctcaccagaccatgccggccaacaagcagaatggatcttctaaccaaagacggagatttaatccacagtatcataacaacaggctaaatgggcctgccaagtcgcagggcagtgggaatgaagccgagccactgggaaagggcaacagccgccacgaacacagaagacagccgcacaacggcttccggcccaaaaacaaaggcggtgccaaaaatcaagaggcttccttggggatgaagacccccgaggccccggcccattctgaaaagccccggcgaaggcagcacgctgcagacacctcggaggccaggcccttccggggtagtgtcggtagggtttcacagtgcaatctctgccccacgagaatagaagtttccacagatgcagcagttctctcagtcccggctgtgacgttggtggcctgagctaggaggaaaaagagcagttttcactcagttttggttccctgcccgaggtgctgacccaattcgctgccaatcatttttactaattctaataatcagctctagcttgcttcataattttcatggctttgcttgatctgttgatgctttctctcatcaagactttgcagcattttagccaggcagtatttactcattattaggaaaatcaagatgtggctgaagatcagaggctcagttagcaacctgtgttgtagcagtgatgtcagtccattgattgtctttagagagttaatgttacaaaaaagaattcttaataatcagacaaacatgatctgctgaggacacatgcgcttttgtagaatttaacatctggtgtttttctgaaaaaatatatatacatatattgctttatttgaaacaaattaaaatatgctgcatttga

SEQ ID NO: 312305 - DNA, 1454 bp, Homo sapiens
tgacaaaatcattcattaacaaggggagtttcggtgaagtggaggtttggggaaaggcgaggaagtcggtctggagcaagcaagcaaagtgcggaagctgtactgggattcttctagaaagtggggtgggaaaggagctagggagggcgtgtggagggacgagatctgtgtcagaacgtgcgtgtgagcggatacaaaacccgagagaggcgtgagcagcgctgtgtttgcgagcgggagcgaggggcgccggctggggtgtgtgctcctgagctcttcagaaaccaggctgctttcaggaacattgctgtggattcccagggcctattccactagaagcaagatggctgaactcaatactcatgtgaatgtcaaggaaaagatctatgcagttagatcagttgttcccaacaaaagcaataatgaaatagtcctggtgctccaacagtttgattttaatgtggataaagccgtgcaagcctttgtggatggcagtgcaattcaagttctaaaagaatggaatatgacaggaaaaaagaagaacaataaaagaaaaagaagcaagtccaagcagcatcaaggcaacaaagatgctaaagacaaggtggagaggcctgaggcagggcccctgcagccgcagccaccacagattcaaaacggccccatgaatggctgcgagaaggacagctcgtccacagattctgctaacgaaaaaccagcccttatccctcgtgagaaaaagatctcgatacttgaggaaccttcaaaggcacttcgtggggtcacagaaggcaacagactactgcaacagaaactatccttagatgggaaccccaaacctatacatggaacaacagagaggtcagatggcctacagtggtcagctgagcagccttgtaacccaagcaagcctaaggcaaaaacatctcctgttaagtccaatacccctgcagctcatcttgaaataaagccagatgagttggcaaagaaaagaggcccaaatattgagaaatcagtgaaggatttgcaacgctgcaccgtttctctaactagatatcgcgtcatgattaaggaagaagtggatagttccgtgaagaagatcaaagctgcctttgctgaattacacaactgcatcattgacaaagaagtttcattaatggcagaaatggataaagttaaagaagaagccatggaaatcctgactgctcgtcagaagaaagcagaagaactaaagagactcactgaccttgccagtcagatggcagagatgcagctggccgaactcagggcagaaattaagcactttgtcagcgagcgtaaatatgacgaggagctcgggaaagctgcccggttttcctgtgacatcgaacagctgaaggcccaaatcatgctctgcggagaaattacacatccaaagaacaactattcctcaagatcaagaatcgcaatcagcg

SEQ ID NO: 312306 - DNA, 970 bp, Homo sapiens
ctagagatagctgattctagaggataaccgtctgggatgtaatgtgtgatatccctgtgatacttatgagcatgctcgccgagaaaccggcgagcccctcatcaccagaccatgccggccaacaagcagaatggatcttctaaccaaagacggagatttaatccacagtatcataacaacaggctaaatgggcctgccaagtcgcagggcagtgggaatgaagccgagccactgggaaagggcaacagccgccacgaacacagaagacagccgcacaacggcttccggcccaaaaacaaaggcggtgccaaaaatcaagaggcttccttggggatgaagacccccgaggccccggcccattctgaaaagccccggcgaaggcagcacgctgcagacacctcggaggccaggcccttccggggtagtgtcggtagggtttcacagtgcaatctctgccccacgagaatagaagtttccacagatgcagcagttctctcagtcccggctgtgacgttggtggcctgagctaggaggaaaaagagcagttttcactcagttttggttccctgcccgaggtgctgacccaattcgctgccaatcatttttactaattctaataatcagctctagcttgcttcataattttcatggctttgcttgatctgttgatgctttctctcatcaagactttgcagcattttagccaggcagtatttactcattattaggaaaatcaagatgtggctgaagatcagaggctcagttagcaacctgtgttgtagcagtgatgtcagtccattgattgtctttagagagttaatgttacaaaaaagaattcttaataatcagacaaacatgatctgctgaggacacatgcgcttttgtagaatttaacatctggtgtttttctgaaaaaatatatatacatatattgctttatttgaaacaaattaaaatatgctgcatttga

SEQ ID NO: 312307 - DNA, 462 bp, Homo sapiens
gcggccgcctactactactaaattcgcggccgcgtcgacctggggtgtgtgctcctgagctcttcagaaaccaggctgctttcaggaacattgctgtggattcccagggcctattccactagaagcaagatggctgaactcaatactcatgtgaatgtcaaggaaaagatctatgcagttagatcagttgttcccaacaaaagcaataatgaaatagtcctggtgctccaacagtttgattttaatgtggataaagccgtgcaagcctttgtggatggtaggtatacctgtaccctgcagctgaagatgttagacttaaatattccagatattccatattttttccttaaatgaactgaatatcaattcattatgtgtactttaggtctcatagaaatgtgcgaggtttcacatgattgcgctactgcacgtcgacgcggccgcgaatttagtagtagtagg

SEQ ID NO: 312308 - DNA, 1514 bp, Homo sapiens
gggcaggacttccttgctggttgctaagacactcttgtttcgctccttgacaaccctggcgggggttcgctggctgcggccccggctccggcccccgcaggagcagcaccccccggggaaagacattttctgctcccaccgagttggcagggcctgcttcctgaatctcctgggtgtgtcttaactgccagtcccagcacctcctgaaagccccactctcctccagtggtcacagtggaaggatcatgggagaaacagaagggaagaaagatgaggctgattataagcgactgcagaccttccctctggtcaggcactcggacatgccagaggagatgcgcgtggagaccatggagctatgtgtcacagcctgtgagaaattctccaacaacaacgagagcgccgccaagatgatcaaagagacaatggacaagaagttcggctcctcctggcacgtggtgatcggcgagggctttgggtttgagatcacccacgaggtgaagaacctcctctacctgtacttcgggggcaccctggctgtgtgcgtctggaagtgctcctgacactctgtcccctgccccgtcccctgcagggccttttcctgccactcatctggggtggggagcagccctaggcaggtcctggtttttccaaggagagttggggtcttttctttttgtctttgtgtaccagtttcctgagccacgcccagtgtgtgaacttgacatctccatccccaggctctcaactgtctccctcggagtctcagggtgtggacggggcagcgggcatgggtctgtgtgggagacgtggggtggggcggtgtgacagggtagaggaggtgggagatgagatcttccgcacaggaacacgccagtccccctttctccagggctgccttccccttgcatcctgggagccccactgccctgccatccccagtactgccgggaagtgtcggccgtccttgtcattagtggtcatatgaaaatggccccaagaaggagatgattctttcaagggacacaggcagcttctctccttgtcctctggggaggtgctgacccctcagaaaccccttcccccaacttgaccccaggctgaacagaccactgcatctcactgggccagcagcccccccagcccccagccttggtggggaccaagcagcctttcccgtcccctcctcgacccgtacagttgagagccaggggctggtgtgtgggagctgctacctggcagtttctcgaggggtcaccgagcctctggtgggacacctgggcaggagtgctctcaccacgaggctgcttccgcagggaaccctggcctgcccgcgacttcgcatcagggaccgcatgctgatttgtactgctctctgctgggttttctatgttcttttcgagtgtgggaaaagggttttagtagaagggtgaatcgtattttacacagcggtcttatttatataaatgtcttggtttttacaattaaaatgaccaaaaactgaaaaaaaaaaa

SEQ ID NO: 312309 - DNA, 1222 bp, Homo sapiens
gggcaggacttccttgctggttgctaagacactcttgtttcgctccttgacaaccctggcgggggttcgctggctgcggccccggctccggcccccgcaggagcagagcgccgccaagatgatcaaagagacaatggacaagaagttcggctcctcctggcacgtggtgatcggcgagggctttgggtttgagatcacccacgaggtgaagaacctcctctacctgtacttcgggggcaccctggctgtgtgcgtctggaagtgctcctgacactctgtcccctgccccgtcccctgcagggccttttcctgccactcatctggggtggggagcagccctaggcaggtcctggtttttccaaggagagttggggtcttttctttttgtctttgtgtaccagtttcctgagccacgcccagtgtgtgaacttgacatctccatccccaggctctcaactgtctccctcggagtctcagggtgtggacggggcagcgggcatgggtctgtgtgggagacgtggggtggggcggtgtgacagggtagaggaggtgggagatgagatcttccgcacaggaacacgccagtccccctttctccagggctgccttccccttgcatcctgggagccccactgccctgccatccccagtactgccgggaagtgtcggccgtccttgtcattagtggtcatatgaaaatggccccaagaaggagatgattctttcaagggacacaggcagcttctctccttgtcctctggggaggtgctgacccctcagaaaccccttcccccaacttgaccccaggctgaacagaccactgcatctcactgggccagcagcccccccagcccccagccttggtggggaccaagcagcctttcccgtcccctcctcgacccgtacagttgagagccaggggctggtgtgtgggagctgctacctggcagtttctcgaggggtcaccgagcctctggtgggacacctgggcaggagtgctctcaccacgaggctgcttccgcagggaaccctggcctgcccgcgacttcgcatcagggaccgcatgctgatttgtactgctctctgctgggttttctatgttcttttcgagtgtgggaaaagggttttagtagaagggtgaatcgtattttacacagcggtcttatttatataaatgtcttggtttttacaattaaaatgaccaaaaactgaaaaaaaaaaa

SEQ ID NO: 312310 - DNA, 1092 bp, Homo sapiens
tctacctgtacttcgggggcaccctggctgtgtgcgtctggaagtgctcctgacactctgtcccctgcttcctgaatctcctgggtgtgtcttaactgccagtcccagcacctcctgaaagccccactctcctccagtggtcacagtggaaggatcatgggagaaacagaagggaagaaagatgaggctgattataagcgactcagccctaggcaggtcctggtttttccaaggagagttggggtcttttctttttgtctttgtgtaccagtttcctgagccacgcccagtgtgtgaacttgacatctccatccccaggctctcaactgtctccctcggagtctcagggtgtggacggggcagcgggcatgggtctgtgtgggagacgtggggtggggcggtgtgacagggtagaggaggtgggagatgagatcttccgcacaggaacacgccagtccccctttctccagggctgccttccccttgcatcctgggagccccactgccctgccatccccagtactgccgggaagtgtcggccgtccttgtcattagtggtcatatgaaaatggccccaagaaggagatgattctttcaagggacacaggcagcttctctccttgtcctctggggaggtgctgacccctcagaaaccccttcccccaacttgaccccaggctgaacagaccactgcatctcactgggccagcagcccccccagcccccagccttggtggggaccaagcagcctttcccgtcccctcctcgacccgtacagttgagagccaggggctggtgtgtgggagctgctacctggcagtttctcgaggggtcaccgagcctctggtgggacacctgggcaggagtgctctcaccacgaggctgcttccgcagggaaccctggcctgcccgcgacttcgcatcagggaccgcatgctgatttgtactgctctctgctgggttttctatgttcttttcgagtgtgggaaaagggttttagtagaagggtgaatcgtattttacacagcggtcttatttatataaatgtcttggtttttacaattaaaatgaccaaaaactgaaaaaaaaaaa

SEQ ID NO: 312311 - DNA, 1034 bp, Homo sapiens
gggcaggacttccttgctggttgctaagacactcttgtttcgctccttgacaaccctggcgggggttcgctggctgcggccccggctccggcccccgcaggagcagcaccccccggggaaagacattttctgctcccaccgagttggcagggcctgcttcctgaatctcctgggtgtgtcttaactgccagtcccagcacctcctgaaagccccactctcctccagtggtcacagtggaaggatcatgggagaaacagaagggaagaaagatgaggctgattataagcgactgcagaccttccctctggtcaggcactcggacatgccagaggagatgcgcgtggagaccatggagctatgtgtcacagcctgtgagaaattctccaacaacaacgagagcgccgccaagatgatcaaagagacaatggacaagaagttcggctcctccctgccatccccagtactgccgggaagtgtcggccgtccttgtcattagtggtcatatgaaaatggccccaagaaggagatgattctttcaagggacacaggcagcttctctccttgtcctctggggaggtgctgacccctcagaaaccccttcccccaacttgaccccaggctgaacagaccactgcatctcactgggccagcagcccccccagcccccagccttggtggggaccaagcagcctttcccgtcccctcctcgacccgtacagttgagagccaggggctggtgtgtgggagctgctacctggcagtttctcgaggggtcaccgagcctctggtgggacacctgggcaggagtgctctcaccacgaggctgcttccgcagggaaccctggcctgcccgcgacttcgcatcagggaccgcatgctgatttgtactgctctctgctgggttttctatgttcttttcgagtgtgggaaaagggttttagtagaagggtgaatcgtattttacacagcggtcttatttatataaatgtcttggtttttacaattaaaatgaccaaaaactgaaaaaaaaaaa

SEQ ID NO: 312312 - DNA, 1042 bp, Homo sapiens
gggcaggacttccttgctggttgctaagacactcttgtttcgctccttgacaaccctggcgggggttcgctggctgcggccccggctccggcccccgcaggagcaggtccccagaagtatgtgtagtggttagaaaaagctctttgtagtcagggcccttagtaaacttggctgaatcatggtgaccaagtcctggctgattaacgctggtagcagagagcactgtgataacagcgcagagagctttaacgtttcaaatcgctcacatacacatacctggggcttgcaacagcttcctgagaacgcagagataggatttagtatcccgtttcatagagaaggaaaccaaggcttaggtgaaattacttgctgacggctgcaaagaaaggaagtgagcagaatgctcgtctttgacagagctggtctccatgcctgcacactccggcttgcggcccacacagttcttagctctgcaagatgctgcacaggtcactctcccactggcttttccccgttgttcctgagaaatgggccttggtcatacctctgaagtcatgggacatctcagcaggattctgcatgttagagcagctgtcacagaccctgacctcctggagggtggcatgtccacaactggctcctggttccctcctggctcctacatgccagcactttttagcctccgggatgaattgaatcaaatggaaacatctcagtggaagatgcctaagaagctgcttccacatttttcattgttcccccttgaaattctcagagataaacaaactgtgtgcccttttccttctgtcatcagtgtagccgccacctctgtcacacctggacaaaggtagaggaggaagcagtaaggctaggaggacagcctggaattggaaatacgccttcacattcatgagcaaagacaaaatgattccctgaattttgtgaaataaggaacctgaccagaaagtacaatgaaattgtgcttggtaattcaccagcttgtagagagagacaaacaaaaactgctaacatctgagtggta

SEQ ID NO: 312313 - DNA, 430 bp, Homo sapiens
cttccaccactatgttttcctgagataagtcggggagtctgagagggagagaaggggggagactgagagtcagagagaggagagactaaggacgctaggtgggcagggctcttcacttgcaggtgcgcctgtgtgctgtgagttgctgggggttgtagaatgcttttggtggacagagggaaccaggttgcaatgtgagaacatttttatgaatttctgggaaactgccttaagatctattccaagagagacacctggttcttctcacctaacttgttgggtttccttttctcactctaaatattcactttaaggccgggcactgtggctcatgtctgtaatcctaatgctttgggaggctcaagcgatcctcggccttccaaagtgctgagattacaggcgttaagccactgagcctggctaaattaaa

SEQ ID NO: 312314 - DNA, 217 bp, Homo sapiens
ccttccctcaatcctgacgtccattggctgtctcttcgccggcggggcgtgggtacgggagccgggcgggcacgctccgaaccgcggcttaggtggcggcggcgaaggatgcacccggcaggcttggcggcggcggctgcggggacgccccggctgcagtggcgtacgtggccggcggaggagatcgggcgggcgggggcgtggcggggcggccgcg

SEQ ID NO: 312315 - DNA, 1196 bp, Homo sapiens
gagatcaaggatctggaaccctgaggtgtgcacagcgctgggatgccaggttcggcctcgaagcggaggatccctgtgtcccagccgggcatggccgacccccaccagcttttcgatgacacaagttcagcccagagccggggctatggggcccagcgggcacctggtggcctgagttatcctgcagcctctcccacgccccatgcagccttcctggctgacccggtgtccaacatggccatggcctatgggagcagcctggccgcgcagggcaaggagctggtggataagaacatcgaccgcttcatccccatcaccaagctcaagtattactttgctgtggacaccatgtatgtgggcagaaagctgggcctgctgttcttcccctacctacaccaggactgggaagtgcagtaccaacaggacaccccggtggccccccgctttgacgtcaatgccccggacctctacattccagcaatggctttcatcacctacgttttggtggctggtcttgcgctggggacccaggataggttctccccagacctcctggggctgcaagcgagctcagccctggcctggctgaccctggaggtgctggccatcctgctcagcctctatctggtcactgtcaacaccgacctcaccaccatcgacctggtggccttcttgggctacaaatatgtcgggatgattggcggggtcctcatgggcctgctcttcgggaagattggctactacctggtgctgggctggtgctgcgtggccatctttgtgttcatgatccggacgctgcggctgaagatcttggcagacgcagcagctgagggggtcccggtgcgtggggcccggaaccagctgcgcatgtacctgaccatggcggtggcggcggcgcagcctatgctcatgtactggctcaccttccacctggtgcggtgagcgcgcccgctgaacctcccgctgctgctgctgctgctgggggccactgtggccgccgaactcatctcctgcctgcaggccccaaggtccaccctgtctggccacaggcaccgcctccatcccatgtcccgcccagccccgcccccaacccaaggtgctgagagatctccagctgcacaggccaccgccccagggcgtggccgctgttacagaaacaataaaccctgatgggcatggaaaaaaaagccactcct

SEQ ID NO: 312316 - DNA, 1207 bp, Homo sapiens
ctctgtaatcggacgagggggaagatcaccggcaggcttggggggcggctgggggacgccccggtgcctcgaagcggaggatccctgtgtcccagccgggcatggccgacccccaccagcttttcgatgacacaagttcagcccagagccggggctatggggcccagcgggcacctggtggcctgagttatcctgcagcctctcccacgccccatgcagccttcctggctgacccggtgtccaacatggccatggcctatgggagcagcctggccgcgcagggcaaggagctggtggataagaacatcgaccgcttcatccccatcaccaagctcaagtattactttgctgtggacaccatgtatgtgggcagaaagctgggcctgctgttcttcccctacctacaccaggactgggaagtgcagtaccaacaggacaccccggtggccccccgctttgacgtcaatgccccggacctctacattccagcaatggctttcatcacctacgttttggtggctggtcttgcgctggggacccaggataggttctccccagacctcctggggctgcaagcgagctcagccctggcctggctgaccctggaggtgctggccatcctgctcagcctctatctggtcactgtcaacaccgacctcaccaccatcgacctggtggccttcttgggctacaaatatgtcgggatgattggcggggtcctcatgggcctgctcttcgggaagattggctactacctggtgctgggctggtgctgcgtggccatctttgtgttcatgatccggacgctgcggctgaagatcttggcagacgcagcagctgagggggtcccggtgcgtggggcccggaaccagctgcgcatgtacctgaccatggcggtggcggcggcgcagcctatgctcatgtactggctcaccttccacctggtgcggtgagcgcgcccgctgaacctcccgctgctgctgctgctgctgggggccactgtggccgccgaactcatctcctgcctgcaggccccaaggtccaccctgtctggccacaggcaccgcctccatcccatgtcccgcccagccccgcccccaacccaaggtgctgagagatctccagctgcacaggccaccgccccagggcgtggccgctgttacagaaacaataaaccctgatgggcatggaaaaaaaagccactcct

SEQ ID NO: 312317 - DNA, 1263 bp, Homo sapiens
cttccaccactatgttttcctgagataagtcggggagtctgagagggagagaaggggggagactgagagtcagagagaggagagactaaggacgctaggtgggcagggctcttcacttgcagcctcgaagcggaggatccctgtgtcccagccgggcatggccgacccccaccagcttttcgatgacacaagttcagcccagagccggggctatggggcccagcgggcacctggtggcctgagttatcctgcagcctctcccacgccccatgcagccttcctggctgacccggtgtccaacatggccatggcctatgggagcagcctggccgcgcagggcaaggagctggtggataagaacatcgaccgcttcatccccatcaccaagctcaagtattactttgctgtggacaccatgtatgtgggcagaaagctgggcctgctgttcttcccctacctacaccaggactgggaagtgcagtaccaacaggacaccccggtggccccccgctttgacgtcaatgccccggacctctacattccagcaatggctttcatcacctacgttttggtggctggtcttgcgctggggacccaggataggttctccccagacctcctggggctgcaagcgagctcagccctggcctggctgaccctggaggtgctggccatcctgctcagcctctatctggtcactgtcaacaccgacctcaccaccatcgacctggtggccttcttgggctacaaatatgtcgggatgattggcggggtcctcatgggcctgctcttcgggaagattggctactacctggtgctgggctggtgctgcgtggccatctttgtgttcatgatccggacgctgcggctgaagatcttggcagacgcagcagctgagggggtcccggtgcgtggggcccggaaccagctgcgcatgtacctgaccatggcggtggcggcggcgcagcctatgctcatgtactggctcaccttccacctggtgcggtgagcgcgcccgctgaacctcccgctgctgctgctgctgctgggggccactgtggccgccgaactcatctcctgcctgcaggccccaaggtccaccctgtctggccacaggcaccgcctccatcccatgtcccgcccagccccgcccccaacccaaggtgctgagagatctccagctgcacaggccaccgccccagggcgtggccgctgttacagaaacaataaaccctgatgggcatggaaaaaaaagccactcct

SEQ ID NO: 312318 - DNA, 1375 bp, Homo sapiens
ccttccctcaatcctgacgtccattggctgtctcttcgccggcggggcgtgggtacgggagccgggcgggcacgctccgaaccgcggcttaggtggcggcggcgaaggatgcacccggcaggcttggcggcggcggctgcggggacgccccggctgccctcgaagcggaggatccctgtgtcccagccgggcatggccgacccccaccagcttttcgatgacacaagttcagcccagagccggggctatggggcccagcgggcacctggtggcctgagttatcctgcagcctctcccacgccccatgcagccttcctggctgacccggtgtccaacatggccatggcctatgggagcagcctggccgcgcagggcaaggagctggtggataagaacatcgaccgcttcatccccatcaccaagctcaagtattactttgctgtggacaccatgtatgtgggcagaaagctgggcctgctgttcttcccctacctacaccaggactgggaagtgcagtaccaacaggacaccccggtggccccccgctttgacgtcaatgccccggacctctacattccagcaatggctttcatcacctacgttttggtggctggtcttgcgctggggacccaggataggttctccccagacctcctggggctgcaagcgagctcagccctggcctggctgaccctggaggtgctggccatcctgctcagcctctatctggtcactgtcaacaccgacctcaccaccatcgacctggtggccttcttgggctacaaatatgtcgggatgattggcggggtcctcatgggcctgctcttcgggaagattggctactacctggtgctgggctggtgctgcgtggccatctttgtgttcatgtttccccttttgccgggcgcggtggctcatgcttgtaatcccagcactttgggaggccgaggcggtcggatcacgagatccggacgctgcggctgaagatcttggcagacgcagcagctgagggggtcccggtgcgtggggcccggaaccagctgcgcatgtacctgaccatggcggtggcggcggcgcagcctatgctcatgtactggctcaccttccacctggtgcggtgagcgcgcccgctgaacctcccgctgctgctgctgctgctgggggccactgtggccgccgaactcatctcctgcctgcaggccccaaggtccaccctgtctggccacaggcaccgcctccatcccatgtcccgcccagccccgcccccaacccaaggtgctgagagatctccagctgcacaggccaccgccccagggcgtggccgctgttacagaaacaataaaccctgatgggcatggaaaaaaaagccactcct

SEQ ID NO: 312319 - DNA, 1373 bp, Homo sapiens
ccttccctcaatcctgacgtccattggctgtctcttcgccggcggggcgtgggtacgggagccgggcgggcacgctccgaaccgcggcttaggtggcggcggcgaaggatgcacccggcaggcttggcggcggcggctgcggggacgccccggctgccctcgaagcggaggatccctgtgtcccagccgggcatggccgacccccaccagcttttcgatgacacaagttcagcccagagccggggctatggggcccagcgggcacctggtggcctgagttatcctgcagcctctcccacgccccatgcagccttcctggctgacccggtgtccaacatggccatggcctatgggagcagcctggccgcgcagggcaaggagctggtggataagaacatcgaccgcttcatccccatcaccaagctcaagtattactttgctgtggacaccatgtatgtgggcagaaagctgggcctgctgttcttcccctacctacaccaggactgggaagtgcagtaccaacaggacaccccggtggccccccgctttgacgtcaatgccccggacctctacattccagcaatggctttcatcacctacgttttggtggctggtcttgcgctggggacccaggataggttctccccagacctcctggggctgcaagcgagctcagccctggcctggctgaccctggaggtgctggccatcctgctcagcctctatctggtcactgtcaacaccgacctcaccaccatcgacctggtggccttcttgggctacaaatatgtcgggtgagtacccccgcccttcacgccagccccagcccttgggccttgtcctcacacagcctcctctccctcccccaggatgattggcggggtcctcatgggcctgctcttcgggaagattggctactacctggtgctgggctggtgctgcgtggccatctttgtgttcatgatccggacgctgcggctgaagatcttggcagacgcagcagctgagggggtcccggtgcgtggggcccggaaccagctgcgcatgtacctgaccatggcggtggcggcggcgcagcctatgctcatgtactggctcaccttccacctggtgcggtgagcgcgcccgctgaacctcccgctgctgctgctgctgctgggggccactgtggccgccgaactcatctcctgcctgcaggccccaaggtccaccctgtctggccacaggcaccgcctccatcccatgtcccgcccagccccgcccccaacccaaggtgctgagagatctccagctgcacaggccaccgccccagggcgtggccgctgttacagaaacaataaaccctgatgggcatggaaaaaaaagccactcct

SEQ ID NO: 312320 - DNA, 1450 bp, Homo sapiens
ccttccctcaatcctgacgtccattggctgtctcttcgccggcggggcgtgggtacgggagccgggcgggcacgctccgaaccgcggcttaggtggcggcggcgaaggatgcacccggcaggcttggcggcggcggctgcggggacgccccggctgccctcgaagcggaggatccctgtgtcccagccgggcatggccgacccccaccagcttttcgatgacacaagttcagcccagagccggggctatggggcccagcgggcacctggtggcctgagttatcctgcagcctctcccacgccccatgcagccttcctggctgacccggtgtccaacatggccatggcctatgggagcagcctggccgcgcagggcaaggagctggtggataagaacatcgaccgcttcatccccatcaccaagctcaagtattactttgctgtggacaccatgtatgtgggcagaaagctgggcctgctgttcttcccctacctacaccaggactgggaagtgcagtaccaacaggacaccccggtggccccccgctttgacgtcaatgccccggacctctacattccagcaatggctttcatcacctacgttttggtggctggtcttgcgctggggacccaggataggttctccccagacctcctggggctgcaagcgagctcagccctggcctggctgaccctggaggtgctggccatcctgctcagcctctatctggtcactgtcaacaccgacctcaccaccatcgacctggtggccttcttgggctacaaatatgtcgggtgagtacccccgcccttcacgccagccccagcccttgggccttgtcctcacacagcctcctctccctcccccaggatgattggcggggtcctcatgggcctgctcttcgggaagattggctactacctggtgctgggctggtgctgcgtggccatctttgtgttcatgtttccccttttgccgggcgcggtggctcatgcttgtaatcccagcactttgggaggccgaggcggtcggatcacgagatccggacgctgcggctgaagatcttggcagacgcagcagctgagggggtcccggtgcgtggggcccggaaccagctgcgcatgtacctgaccatggcggtggcggcggcgcagcctatgctcatgtactggctcaccttccacctggtgcggtgagcgcgcccgctgaacctcccgctgctgctgctgctgctgggggccactgtggccgccgaactcatctcctgcctgcaggccccaaggtccaccctgtctggccacaggcaccgcctccatcccatgtcccgcccagccccgcccccaacccaaggtgctgagagatctccagctgcacaggccaccgccccagggcgtggccgctgttacagaaacaataaaccctgatgggcatggaaaaaaaagccactcct

SEQ ID NO: 312321 - DNA, 1003 bp, Homo sapiens
ccttccctcaatcctgacgtccattggctgtctcttcgccggcggggcgtgggtacgggagccgggcgggcacgctccgaaccgcggcttaggtggcggcggcgaaggatgcacccggcaggcttggcggcggcggctgcggggacgccccggctgccctcgaagcggaggatccctgtgtcccagccgggcatggccgacccccaccagcttttcgatgacacaagttcagcccagagccggggctatggggcccagcgggcacctggtggcctgagttatcctgcagcctctcccacgccccatgcagccttcctggctgacccggtgtccaacatggccatggcctatgggagcagcctggccgcgcagggcaaggagctggtggataagaacatcgaccgcttcatccccatcaccaagctcaagtattactttgctgtggacaccatgtatgtgggcagaaagctgggcctgctgttcttcccctacctacaccaggactgggaagtgcagtaccaacaggacaccccggtggccccccgctttgacgtcaatgccccggacctctacattccagcaatggctttcatcacctacgttttggtggctggtcttgcgctggggacccaggataggttctccccagacctcctggggctgcaagcgagctcagccctggcctggctgaccctggaggtgctggccatcctgctcagcctctatctggtcactgtcaacaccgacctcaccaccatcgacctggtggccttcttgggctacaaatatgtcgggatgattggcggggtcctcatgggcctgctcttcgggaagattggctactacctggtgctgggctggtgctgcgtggccatctttgtgttcatgttccccttttgccgggcgcagctggttccgggccccacgcaccgggaccccctcagctgctgcgtctgccaagatcttcagtcgaccggttgtccacccagtagtagtaggcggc

SEQ ID NO: 312322 - DNA, 907 bp, Homo sapiens
gagatcaaggatctggaaccctgaggtgtgcacagcgctgggatgccaggttcgggtaggaggccccttggggggcgattctttaggaaattcctttagaagaaaacaacttgggactggatagcgtgcgatatgcagagaaatgcaactttcattcatttgcagttagcgatccgcccttccctgctccccacccttccgtggctccccagtacccgcctgctgtcgcccacacccttaggacagcttcgtggccccccgggagcgcagagggccatgcctaccgctcatttaagaagcgaacctgtattgtgctgttggcccccttttcctgtctcttcatctcccctcgaagcggaggatccctgtgtcccagccgggcatggccgacccccaccagcttttcgatgacacaagttcagcccagagccggggctatggggcccagcgggcacctggtggcctgagttatcctgcagcctctcccacgccccatgcagccttcctggctgacccggtgtccaacatggccatggcctatgggagcagcctggccgcgcagggcaaggagctggtggataagaacatcgaccgcttcatccccatcaccaagctcaagtattactttgctgtggacaccatgtatgtgggcagaaagctgggcctgctgttcttcccctacctacaccagatggagtgcgttcaactgaccggtgggcccccgttgacgtatgccgggcctctatcggatggttccgctagttgggggtgccgggaccgttgttccaccctggggtggggaccgccgttccgaggtgggcgaccatggtgacggcccagattggttgtaatggtgggcacccgacgctgggggcttccgcgtttgtttcgcctcattctttcctcg

SEQ ID NO: 312323 - DNA, 1298 bp, Homo sapiens
ccttccctcaatcctgacgtccattggctgtctcttcgccggcggggcgtgggtacgggagccgggcgggcacgctccgaaccgcggcttaggtggcggcggcgaaggatgcacccggcaggcttggcggcggcggctgcggggacgccccggctgccctcgaagcggaggatccctgtgtcccagccgggcatggccgacccccaccagcttttcgatgacacaagttcagcccagagccggggctatggggcccagcgggcacctggtggcctgagttatcctgcagcctctcccacgccccatgcagccttcctggctgacccggtgtccaacatggccatggcctatgggagcagcctggccgcgcagggcaaggagctggtggataagaacatcgaccgcttcatccccatcaccaagctcaagtattactttgctgtggacaccatgtatgtgggcagaaagctgggcctgctgttcttcccctacctacaccaggactgggaagtgcagtaccaacaggacaccccggtggccccccgctttgacgtcaatgccccggacctctacattccagcaatggctttcatcacctacgttttggtggctggtcttgcgctggggacccaggataggttctccccagacctcctggggctgcaagcgagctcagccctggcctggctgaccctggaggtgctggccatcctgctcagcctctatctggtcactgtcaacaccgacctcaccaccatcgacctggtggccttcttgggctacaaatatgtcgggatgattggcggggtcctcatgggcctgctcttcgggaagattggctactacctggtgctgggctggtgctgcgtggccatctttgtgttcatgatccggacgctgcggctgaagatcttggcagacgcagcagctgagggggtcccggtgcgtggggcccggaaccagctgcgcatgtacctgaccatggcggtggcggcggcgcagcctatgctcatgtactggctcaccttccacctggtgcggtgagcgcgcccgctgaacctcccgctgctgctgctgctgctgggggccactgtggccgccgaactcatctcctgcctgcaggccccaaggtccaccctgtctggccacaggcaccgcctccatcccatgtcccgcccagccccgcccccaacccaaggtgctgagagatctccagctgcacaggccaccgccccagggcgtggccgctgttacagaaacaataaaccctgatgggcatggaaaaaaaagccactcct

SEQ ID NO: 312324 - DNA, 1021 bp, Homo sapiens
ccttccctcaatcctgacgtccattggctgtctcttcgccggcggggcgtgggtacgggagccgggcgggcacgctccgaaccgcggcttaggtggcggcggcgaaggatgcacccggcaggcttggcggcggcggctgcggggacgccccggctgccctcgaagcggaggatccctgtgtcccagccgggcatggccgacccccaccagcttttcgatgacacaagttcagcccagagccggggctatggggcccagcgggcacctggtggcctgagttatcctgcagcctctcccacgccccatgcagccttcctggctgacccggtgtccaacatggccatggcctatgggagcagcctggccgcgcagggcaaggagctggtggataagaacatcgaccgcttcatccccatcaccaagctcaagtattactttgctgtggacaccatgtatgtgggcagaaagctgggcctgctgttcttcccctacctacaccaggactgggaagtgcagtaccaacaggacaccccggtggccccccgctttgacgtcaatgccccggacctctacattccagcaatggctttcatcacctacgttttggtggctggtcttgcgctggggacccaggataggttctccccagacctcctggggctgcaagcgagctcagccctggcctggctgaccctggaggtgctggccatcctgctcagcctctatctggtcactgtcaacaccgacctcaccaccatcgacctggtggccttcttgggctacaaatatgtcgggatgattggcggggtcctcatgggcctgctcttcgggaagattggctactacctggtgctgggctggtgctgcgtggccatctttgtgttcatgtttccccttttgccgggcgcggtggctcatgcttgtaatcccagcactttgggaggccgaggcggtcggatcacgaggtcaggagatcaagaccatcctggctaacacggtgaaaccccatctctactaaaaa

SEQ ID NO: 312325 - DNA, 1166 bp, Homo sapiens
gagatcaaggatctggaaccctgagcctcgaagcggaggatccctgtgtcccagccgggcatggccgacccccaccagcttttcgatgacacaagttcagcccagagccggggctatggggcccagcgggcacctggtggcctgagttatcctgcagcctctcccacgccccatgcagccttcctggctgacccggtgtccaacatggccatggcctatgggagcagcctggccgcgcagggcaaggagctggtggataagaacatcgaccgcttcatccccatcaccaagctcaagtattactttgctgtggacaccatgtatgtgggcagaaagctgggcctgctgttcttcccctacctacaccaggactgggaagtgcagtaccaacaggacaccccggtggccccccgctttgacgtcaatgccccggacctctacattccagcaatggctttcatcacctacgttttggtggctggtcttgcgctggggacccaggataggttctccccagacctcctggggctgcaagcgagctcagccctggcctggctgaccctggaggtgctggccatcctgctcagcctctatctggtcactgtcaacaccgacctcaccaccatcgacctggtggccttcttgggctacaaatatgtcgggatgattggcggggtcctcatgggcctgctcttcgggaagattggctactacctggtgctgggctggtgctgcgtggccatctttgtgttcatgatccggacgctgcggctgaagatcttggcagacgcagcagctgagggggtcccggtgcgtggggcccggaaccagctgcgcatgtacctgaccatggcggtggcggcggcgcagcctatgctcatgtactggctcaccttccacctggtgcggtgagcgcgcccgctgaacctcccgctgctgctgctgctgctgggggccactgtggccgccgaactcatctcctgcctgcaggccccaaggtccaccctgtctggccacaggcaccgcctccatcccatgtcccgcccagccccgcccccaacccaaggtgctgagagatctccagctgcacaggccaccgccccagggcgtggccgctgttacagaaacaataaaccctgatgggcatggaaaaaaaagccactcct

SEQ ID NO: 312326 - DNA, 1261 bp, Homo sapiens
ccttccctcaatcctgacgtccattggctgtctcttcgccggcggggcgtgggtacgggagccgggcgggcacgctccgaaccgcggcttaggtggcggcggcgaaggatgcacccggcaggcttggcggcggcggctgcggggacgccccggctgccctcgaagcggaggatccctgtgtcccagccgggcatggccgacccccaccagcttttcgatgacacaagttcagcccagagccggggctatggggcccagcgggcacctggtggcctgagttatcctgcagcctctcccacgccccatgcagccttcctggctgacccggtgtccaacatggccatggcctatgggagcagcctggccgcgcagggcaaggagctggtggataagaacatcgaccgcttcatccccatcaccaagctcaagtattactttgctgtggacaccatgtatgtgggcagaaagctgggcctgctgttcttcccctacctacaccaggactgggaagtgcagtaccaacaggacaccccggtggccccccgctttgacgtcaatgccccggacctctacattccagcaatggctttcatcacctacgttttggtggctggtcttgcgctggggacccaggataggttctccccagacctcctggggctgcaagcgagctcagccctggcctggctgaccctggaggtgctggccatcctgctcagcctctatctggtcactgtcaacaccgacctcaccaccatcgacctggtggccttcttgggctacaaatatgtcgggatgattggcggggtcctcatgggcctgctcttcgggaagattggctactacctggtgctgggctggtgctgcgtggccatctttgtgttcatgatccggacgctgcggctgaagatcttggcagacgcagcagctgagggggtcccggtgcgtggggcccggaaccagctgcgcatgtacctgaccatggcggtggcggcggcgcagcctatgctcatgtactggctcaccttccacctggtgcggtgagcgcgcccgctgaacctcccgctgctgctgctgctgctgggggccactgtggccgccgaactcatctcctgcctgcaggcccgggccagtcccgtgggcagggacgctcaccatgtggagccggcaacaagggtaggaatccaggcagacgcaggggacgaaaaaaacacgggaaaacagctttggaaggtacgacagatagaacaaataacaaaaa

SEQ ID NO: 312327 - DNA, 1204 bp, Homo sapiens
ccttccctcaatcctgacgtccattggctgtctcttcgccggcggggcgtgggtacgggagccgggcgggcacgctccgaaccgcggcttaggtggcggcggcgaaggatgcacccggcaggcttggcggcggcggctgcggggacgccccggctgccctcgaagcggaggatccctgtgtcccagccgggcatggccgacccccaccagcttttcgatgacacaagttcagcccagagccggggctatggggcccagcgggcacctggtggcctgagttatcctgcagcctctcccacgccccatgcagccttcctggctgacccggtgtccaacatggccatggcctatgggagcagcctggccgcgcagggcaaggagctggtggataagaacatcgaccgcttcatccccatcaccaagctcaagtattactttgctgtggacaccatgtatgtgggcagaaagctgggcctgctgttcttcccctacctacaccaggactgggaagtgcagtaccaacaggacaccccggtggccccccgctttgacgtcaatgccccggacctctacattccagcaatggctttcatcacctacgttttggtggctggtcttgcgctggggacccaggataggttctccccagacctcctggggctgcaagcgagctcagccctggcctggctgaccctggaggtgctggccatcctgctcagcctctatctggtcactgtcaacaccgacctcaccaccatcgacctggtggccttcttgggctacaaatatgtcggatccggacgctgcggctgaagatcttggcagacgcagcagctgagggggtcccggtgcgtggggcccggaaccagctgcgcatgtacctgaccatggcggtggcggcggcgcagcctatgctcatgtactggctcaccttccacctggtgcggtgagcgcgcccgctgaacctcccgctgctgctgctgctgctgggggccactgtggccgccgaactcatctcctgcctgcaggccccaaggtccaccctgtctggccacaggcaccgcctccatcccatgtcccgcccagccccgcccccaacccaaggtgctgagagatctccagctgcacaggccaccgccccagggcgtggccgctgttacagaaacaataaaccctgatgggcatggaaaaaaaagccactcct

SEQ ID NO: 312328 - DNA, 1001 bp, Homo sapiens
ccttccctcaatcctgacgtccattggctgtctcttcgccggcggggcgtgggtacgggagccgggcgggcacgctccgaaccgcggcttaggtggcggcggcgaaggatgcacccggcaggcttggcggcggcggctgcggggacgccccggctgccctcgaagcggaggatccctgtgtcccagccgggcatggccgacccccaccagcttttcgatgacacaagttcagcccagagccggggctatggggcccagcgggcacctggtggcctgagttatcctgcagcctctcccacgccccatgcagccttcctggctgacccggtgtccaacatggccatggcctatgggagcagcctggccgcgcagggcaaggagctggtggataagaacatcgaccgcttcatccccatcaccaagctcaagtattactttgctgtggacaccatgtatgtgggcagaaagctgggcctgctgttcttcccctacctacaccaggactgggaagtgcagtaccaacaggacaccccggtggccccccgctttgacgtcaatgccccggacctctacattccagcaatggctttcatcacctacgttttggtggctggtcttgcgctggggacccaggataggttctccccagacctcctggggctgcaagcgagctcagccctggcctggctgaccctggaggtgctgcctatgctcatgtactggctcaccttccacctggtgcggtgagcgcgcccgctgaacctcccgctgctgctgctgctgctgggggccactgtggccgccgaactcatctcctgcctgcaggccccaaggtccaccctgtctggccacaggcaccgcctccatcccatgtcccgcccagccccgcccccaacccaaggtgctgagagatctccagctgcacaggccaccgccccagggcgtggccgctgttacagaaacaataaaccctgatgggcatggaaaaaaaagccactcct

SEQ ID NO: 312329 - DNA, 738 bp, Homo sapiens
cgagacggaagcgggctgggaggcgtcggcggcggcagcgcacgtggtgacgtgcgagggggtgcggcgcgagcggtcggcggcggcggaggcagtgtctcccggtcgcgcgtggaggtcggtcgctcagagctgctgggcgcagtttctccgcctgctgcttcggcgcggctgtatcggcgagcgagcgagttcccgcgagttctcggtggcgctcccccttcctttcagtctccacggactggcccctcgtccttctacttgaccgctcccgtcttccgccgccttctggcgctttccgttgggccgattcccgcccgcttcctcctgcttcccatcgaagctctagaaatgaatgtttccatctcttcagagatgaaccagattatgatgcatcattatcacagaagaaattcgtgtctatagcttttaaggacttgattacatcattttcaagcctgatagttttggaatcaccattagagcttaagacacacctgccttcatttcaaccacctgtcttcataccggtacacttgtgaataaagagggtgggtgggtatagatgttgctaacagcaacacaaagcttttgcatattgcatactattaaacatgctgtacatactttttgggtttatttggaaaggaatgcaaagatgaaggtctgttttgtgtacttttaagactttggttattttactttttggaaaagaataaaccaagaattgattgggca

SEQ ID NO: 312330 - DNA, 306 bp, Homo sapiens
agttaaagttagtgtcctataaatgtcatatataggtgaaggatactcagtgttgtggaatagctcaggaacaaaggtacatcagatgtggtctttggctaggtttctgtagctaccttttgattttgcagaaaaagccaccacgtgagaatggccataagcagataagtagcagttcaactggatgtctctcttctccaaatgctacagtacaaagccctaagcatgagtggaaaatcgttgcttcagaaaagacttcaagtaagtatatgacacttgccagattgttttcagcttacctatttt

SEQ ID NO: 312331 - DNA, 5207 bp, Homo sapiens
cgagacggaagcgggctgggaggcgtcggcggcggcagcgcacgtggtgacgtgcgagggggtgcggcgcgagcggtcggcggcggcggaggcagtgtctcccggtcgcgcgtggaggtcggtcgctcagagctgctgggcgcagtttctccgcctgctgcttcggcgcggctgtatcggcgagcgagcgagttcccgcgagttctcggtggcgctcccccttcctttcagtctccacggactggcccctcgtccttctacttgaccgctcccgtcttccgccgccttctggcgctttccgttgggccgattcccgcccgcttcctcctgcttcccatcgaagctctagaaatgaatgtttccatctcttcagagatgaaccagattatgatgcatcattatcacagaagaaattcgtgtctatagcttttaaggacttgattacatcattttcaagcctgatagttttggaatcaccattagagcttaagacacacctgccttcatttcaaccacctgtcttcataccctgacgaagtgcaccttttaacactcctttgtccttggattacttaagagttcccagaaatacatttgccaccaacagagtagccaaatttataaggaaaaatgattcccaatggatatttgatgtttgaggatgaaaattttattgagtcttctgttgccaaattaaatgccctgaggaaaagtggccagttctgtgatgttcgacttcaggtctgtggccatgaaatgttagcacacagagcagtgctagcttgctgcagtccctatttatttgaaatctttaatagtgatagtgatcctcatggaatttctcacgttaaatttgatgatctcaatccagaagctgttgaagtcttgttgaattatgcctacactgctcagttgaaagcagataaggaattggtaaaagatgtttattctgcagcaaaaaagctgaagatggatcgagtaaagcaggtttgtggtgattatttactgtctagaatggatgttaccagctgcatctcttaccgaaattttgcaagttgtatgggagactcccgtttgttgaataaggttgatgcttatattcaggagcatttgttacaaatttctgaagaggaggagtttcttaagcttccaaggctaaagttggaggtaatgcttgaagataatgtttgcttgcccagcaatggcaaattatatacaaaggtaatcaactgggtgcagcgtagcatctgggagaatggagacagtctggaagagctgatggaagaggtttattaacaaaactaggatacccaagactgaagaaacaagaagaaacctcaagtgtattgacacgtaaagaagcagcagtcctgccccagttctcctaagaaaaatccgctgtgggcagagaacgatgatgatttaatggtgtttactcctttacaggattcttgtctttaaagctgtgtgtttttcaatggtgttgttcatacatatagtcactcacttaacttgggctacttttaaaaaaaatacacaagataaaattgatggagaaatggtgggaattgaaaacacgcaggtggagcagtggagtaaccttgagtttctctctccacttaaacctttcggagttcctttatgagggcttaccaaatctgttaggcctgcagaaacactgtcatcattatggtctaaaagggctaacagattatctttaaattctatgattcccacttgaaagtcagatgcatttgccatgtatttgcatctgtctcaatggagatgactctacagcttgcttgaatttttgcatttgttttttctttgtttttcttgacattgcttacaggaaggaaatatgtttatgcaaaccagaccacttatctgcaaaggtgtaaactatattcagtattttattgtaaatatgtatattctttaagagtatatattgtactagtgctttttttcttactgttatatgatagaagctatgaaaaaaatgaagatttctttcaagccaatcaagccaacgactcttcagccagtattggaagattttgtatttgattttggttttttgtttttgttttttaatttttaccaccatgacatgtatttttctttacctccggatcctgccagagtaatatgtcaagaagctcaagaagcacactggaggttaccttgaggcgtttgtgtaatctgcatactagtggagtagccatggtgaccgtagccacatgggtgttctgttgctgttttgcaggttcaaaccttgtactactcagctgatcacaagctgcttgatgggaacctactagatggacaggctgaggtgtttggcagtgatgatgaccacattcagtttgtgcagaaaaagccaccacgtgagaatggccataagcagataagtagcagttcaactggatgtctctcttctccaaatgctacagtacaaagccctaagcatgagtggaaaatcgttgcttcagaaaagacttcaaataacacttacttgtgcctggctgtgctggatggtatattctgtgtcatttttcttcatgggagaaacagcccacagagctcaccaacaagtactccaaaactaagtaagagtttaagctttgagatgcaacaagatgagctaatcgaaaagcccatgtctcctatgcagtacgcacgatctggtctgggaacagcagagatgaatggcaaactcatagctgcaggtggctataacagagaggaatgtcttcgaacagtcgaatgctataatccacatacagatcactggtcctttcttgctcccatgagaacaccaagagcccgatttcaaatggctgtactcatgggccagctctatgtggtaggtggatcaaatggccactcagatgacctgagttgtggagagatgtatgattcaaacatagatgactggattcctgttccagaattgagaactaaccgttgtaatgcaggagtgtgtgctctgaatggaaagttatacatcgttggtggctctgatccatatggtcaaaaaggactgaaaaattgtgatgtatttgatcctgtaacaaagttgtggacaagctgtgcccctcttaacattcggagacaccagtctgcagtctgtgagcttggtggttatttgtacataatcggaggtgcagaatcttggaattgtctgaacacagtagaacgatacaatcctgaaaataatacctggactttaattgcacccatgaatgtggctaggcgaggagctggagtggctgttcttaatggaaaactgtttgtatgtggtggctttgatggttctcatgccatcagttgtgtggaaatgtatgatccaactagaaatgaatggaagatgatgggaaatatgacttcaccaaggagcaatgctgggattgcaactgtagggaacaccatttatgcagtgggaggattcgatggcaatgaatttctgaatacggtggaagtctataaccttgagtcaaatgaatggagcccctatacaaagattttccagttttaacaaatttaagaccctctcaaactaacaggcttagtgatgtaattatggttagcagaggtacacttgtgaataaagagggtgggtgggtatagatgttgctaacagcaacacaaagcttttgcatattgcatactattaaacatgctgtacatactttttgggtttatttggaaaggaatgcaaagatgaaggtctgttttgtgtacttttaagactttggttattttactttttggaaaagaataaaccaagaattgattgggcacatcatttcaagaagtcccctctcctccacatttgttttgccaatttgcacattaaatgactcttccctcaaatgtgtactatggggtaaaaggggtagggtttaaagatgtagacagttgggttttttaagggccctttttcaataactggaacactctataacaaaggatacttatttaaatagatgacattgactatttttgtttttattaaaaggaagcttacatgcctaccaatatttaatcttttatgattgcctttttataactttttatattctcagcagagtgctttaccaattgaagtaaaatgtggcaggctggagttattgaagcagagtggcagtcttcagtttgcagagtaggggtctgtcttttaaactctgagtgcaaacttcagagttcttgccttggctgcagtttttttccttcaagaatgcagtactaacatttatttgagtggagttactgaacagtaacatagctgtgatttttggtatttgaaacactggttttaaatattttgacttgttgagggtatgttttatatagcaagacattatatagcagtaaaaaatggtgttttatcttctatataattcctgtttttattattaacaaaacagtcctaaatagcagccctcaattgtgaaaaaatttactttaaactacattaggttgtgaatgcaggttttatcagaactatgtttttgttcagtttatctgttcatatggataaatattggttgggatgacttggtgtctaatgtgtagtgctacacacctaacttatggggccaaaatagcatgtcctaatgcttgctgctgatttaaacacattaaaggtactttgcaggaaatccttgcaccatgggattaatatccaattgctgcttgtacactcattcattactaaaagttttgagaaatttttttttccagtaatgagcttaagaaatttgtggaaaataactcacctggcatcttacatctgaaataaggaatgatataaggtttttttttctcacagaagatgaagcacacaggaacctaatgggccaactgggatgaggtgactattctgagatgactattcagtggctaacttgggttaggaagaaaataattaggtattttctccaaatgttcactggtactctgccactttatttctctcatctgttacacaaagaaccaccaggaaagcaaatcagtttggttggtaactctgtaattcctaactatcactggtttggttctggactaaaactacattgacagattgaatttgcctaatatgatgactgtttttaatatggatctgtatgtgttctattcagcacaaggaaataaaattttagttgaggattcagcactaaaatccttgagatcacttctca

SEQ ID NO: 312332 - DNA, 3063 bp, Homo sapiens
ctgtaatcaggatatggaagagatgatgtctgagcaggaaaatccagattccagtgaagcagcagtcctgccccagttctcctaagaaaaatccgctgtgggcagagaacgatgatgatttaatggttcaaaccttgtactactcagctgatcacaagctgcttgatgggaacctactagatggacaggctgaggtgtttggcagtgatgatgaccacattcagtttgtgcagaaaaagccaccacgtgagaatggccataagcagataagtagcagttcaactggatgtctctcttctccaaatgctacagtacaaagccctaagcatgagtggaaaatcgttgcttcagaaaagacttcaaataacacttacttgtgcctggctgtgctggatggtatattctgtgtcatttttcttcatgggagaaacagcccacagagctcaccaacaagtactccaaaactaagtaagagtttaagctttgagatgcaacaagatgagctaatcgaaaagcccatgtctcctatgcagtacgcacgatctggtctgggaacagcagagatgaatggcaaactcatagctgcaggtggctataacagagaggaatgtcttcgaacagtcgaatgctataatccacatacagatcactggtcctttcttgctcccatgagaacaccaagagcccgatttcaaatggctgtactcatgggccagctctatgtggtaggtggatcaaatggccactcagatgacctgagttgtggagagatgtatgattcaaacatagatgactggattcctgttccagaattgagaactaaccgttgtaatgcaggagtgtgtgctctgaatggaaagttatacatcgttggtggctctgatccatatggtcaaaaaggactgaaaaattgtgatgtatttgatcctgtaacaaagttgtggacaagctgtgcccctcttaacattcggagacaccagtctgcagtctgtgagcttggtggttatttgtacataatcggaggtgcagaatcttggaattgtctgaacacagtagaacgatacaatcctgaaaataatacctggactttaattgcacccatgaatgtggctaggcgaggagctggagtggctgttcttaatggaaaactgtttgtatgtggtggctttgatggttctcatgccatcagttgtgtggaaatgtatgatccaactagaaatgaatggaagatgatgggaaatatgacttcaccaaggagcaatgctgggattgcaactgtagggaacaccatttatgcagtgggaggattcgatggcaatgaatttctgaatacggtggaagtctataaccttgagtcaaatgaatggagcccctatacaaagattttccagttttaacaaatttaagaccctctcaaactaacaggcttagtgatgtaattatggttagcagaggtacacttgtgaataaagagggtgggtgggtatagatgttgctaacagcaacacaaagcttttgcatattgcatactattaaacatgctgtacatactttttgggtttatttggaaaggaatgcaaagatgaaggtctgttttgtgtacttttaagactttggttattttactttttggaaaagaataaaccaagaattgattgggcacatcatttcaagaagtcccctctcctccacatttgttttgccaatttgcacattaaatgactcttccctcaaatgtgtactatggggtaaaaggggtagggtttaaagatgtagacagttgggttttttaagggccctttttcaataactggaacactctataacaaaggatacttatttaaatagatgacattgactatttttgtttttattaaaaggaagcttacatgcctaccaatatttaatcttttatgattgcctttttataactttttatattctcagcagagtgctttaccaattgaagtaaaatgtggcaggctggagttattgaagcagagtggcagtcttcagtttgcagagtaggggtctgtcttttaaactctgagtgcaaacttcagagttcttgccttggctgcagtttttttccttcaagaatgcagtactaacatttatttgagtggagttactgaacagtaacatagctgtgatttttggtatttgaaacactggttttaaatattttgacttgttgagggtatgttttatatagcaagacattatatagcagtaaaaaatggtgttttatcttctatataattcctgtttttattattaacaaaacagtcctaaatagcagccctcaattgtgaaaaaatttactttaaactacattaggttgtgaatgcaggttttatcagaactatgtttttgttcagtttatctgttcatatggataaatattggttgggatgacttggtgtctaatgtgtagtgctacacacctaacttatggggccaaaatagcatgtcctaatgcttgctgctgatttaaacacattaaaggtactttgcaggaaatccttgcaccatgggattaatatccaattgctgcttgtacactcattcattactaaaagttttgagaaatttttttttccagtaatgagcttaagaaatttgtggaaaataactcacctggcatcttacatctgaaataaggaatgatataaggtttttttttctcacagaagatgaagcacacaggaacctaatgggccaactgggatgaggtgactattctgagatgactattcagtggctaacttgggttaggaagaaaataattaggtattttctccaaatgttcactggtactctgccactttatttctctcatctgttacacaaagaaccaccaggaaagcaaatcagtttggttggtaactctgtaattcctaactatcactggtttggttctggactaaaactacattgacagattgaatttgcctaatatgatgactgtttttaatatggatctgtatgtgttctattcagcacaaggaaataaaattttagttgaggattcagcactaaaatccttgagatcacttctca

SEQ ID NO: 312333 - DNA, 3214 bp, Homo sapiens
cgagacggaagcgggctgggaggcgtcggcggcggcagcgcacgtggtgacgtgcgagggggtgcggcgcgagcggtcggcggcggcggaggcagtgtctcccggtcgcgcgtggaggtcggtcgctcagagctgctgggcgcagtttctccgcctgctgcttcggcgcggctgtatcggcgagcgagcgagttcccgcgagttctcggtggcgctcccccttcctttcagtctccacggactggcccctcgtccttctacttgaccgctcccgtcttccgccgccttctggcgctttccgttgggccgattcccgcccgcttcctcctgcttcccatcgaagctctagaaatgaatgtttccatctcttcagagatgaaccagattatgatgcatcattatcacagaagaaattcgtgtctatagcttttaaggacttgattacatcattttcaagcctgatagttttggaatcaccattagagcttaagacacacctgccttcatttcaaccacctgtcttcataccctgacgaagtgcaccttttaacactcctttgtccttggattacttaagagttcccagaaatacatttgccaccaacagagtagccaaatttataaggaaaaatgattcccaatggatatttgatgtttgaggatgaaaattttattgagtcttctgttgccaaattaaatgccctgaggaaaagtggccagttctgtgatgttcgacttcaggtctgtggccatgaaatgttagcacacagagcagtgctagcttgctgcagtccctatttatttgaaatctttaatagtgatagtgatcctcatggaatttctcacgttaaatttgatgatctcaatccagaagctgttgaagtcttgttgaattatgcctacactgctcagttgaaagcagataaggaattggtaaaagatgtttattctgcagcaaaaaagctgaagatggatcgagtaaagcaggtttgtggtgattatttactgtctagaatggatgttaccagctgcatctcttaccgaaattttgcaagttgtatgggagactcccgtttgttgaataaggttgatgcttatattcaggagcatttgttacaaatttctgaagaggaggagtttcttaagcttccaaggctaaagttggaggtaatgcttgaagataatgtttgcttgcccagcaatggcaaattatatacaaaggtaatcaactgggtgcagcgtagcatctgggagaatggagacagtctggaagagctgatggaagaggttcaaaccttgtactactcagctgatcacaagctgcttgatgggaacctactagatggacaggctgaggtgtttggcagtgatgatgaccacattcagtttgtgcagaaaaagccaccacgtgagaatggccataagcagataagtagcagttcaactggatgtctctcttctccaaatgctacagtacaaagccctaagcatgagtggaaaatcgttgcttcagaaaagacttcaaataacacttacttgtgcctggctgtgctggatggtatattctgtgtcatttttcttcatgggagaaacagcccacagagctcaccaacaagtactccaaaactaagtaagagtttaagctttgagatgcaacaagatgagctaatcgaaaagcccatgtctcctatgcagtacgcacgatctggtctgggaacagcagagatgaatggcaaactcatagctgcaggtggctataacagagaggaatgtcttcgaacagtcgaatgctataatccacatacagatcactggtcctttcttgctcccatgagaacaccaagagcccgatttcaaatggctgtactcatgggccagctctatgtggtaggtggatcaaatggccactcagatgacctgagttgtggagagatgtatgattcaaacatagatgactggattcctgttccagaattgagaactaaccgttgtaatgcaggagtgtgtgctctgaatggaaagttatacatcgttggtggctctgatccatatggtcaaaaaggactgaaaaattgtgatgtatttgatcctgtaacaaagttgtggacaagctgtgcccctcttaacattcggagacaccagtctgcagtctgtgagcttggtggttatttgtacataatcggaggtgcagaatcttggaattgtctgaacacagtagaacgatacaatcctgaaaataatacctggactttaattgcacccatgaatgtggctaggcgaggagctggagtggctgttcttaatggaaaactgtttgtatgtggtggctttgatggttctcatgccatcagttgtgtggaaatgtatgatccaactagaaatgaatggaagatgatgggaaatatgacttcaccaaggagcaatgctgggattgcaactgtagggaacaccatttatgcagtgggaggattcgatggcaatgaatttctgaatacggtggaagtctataaccttgagtcaaatgaatggagcccctatacaaagattttccagttttaacaaatttaagaccctctcaaactaacaggcttagtgatgtaattatggttagcagaggtacacttgtgaataaagagggtgggtgggtatagatgttgctaacagcaacacaaagcttttgcatattgcatactattaaacatgctgtacatactttttgggtttatttggaaaggaatgcaaagatgaaggtctgttttgtgtacttttaagactttggttattttactttttggaaaagaataaaccaagaattgattgggcacatcatttcaagaagtcccctctcctccacatttgttttgccaatttgcacattaaatgactcttccctcaaatgtgtactatggggtaaaaggggtagggtttaaagatgtagacagttgggttttttaagggccctttttcaataactggaacactctataacaaaggatacttatttaaatagatgacattgactatttggtttattaaagaggttaatgctaacataaaaaaaaaaaggggggggcaaagttcccgagggcagttacctacccgtttgtcaagggccatggggggtaagaaggggggggttaaggcggggaagcgtgggtttgggccttgggggatggcaccaataaggggaaaaagggggagaggggagtggaaa

SEQ ID NO: 312334 - DNA, 2961 bp, Homo sapiens
agttaaagttagtgtcctataaatgtcatatataggtgaaggatactcagtgttgtggaatagctcaggaacaaaggtacatcagatgtggtctttggctaggtttctgtagctaccttttgattttgcagaaaaagccaccacgtgagaatggccataagcagataagtagcagttcaactggatgtctctcttctccaaatgctacagtacaaagccctaagcatgagtggaaaatcgttgcttcagaaaagacttcaaataacacttacttgtgcctggctgtgctggatggtatattctgtgtcatttttcttcatgggagaaacagcccacagagctcaccaacaagtactccaaaactaagtaagagtttaagctttgagatgcaacaagatgagctaatcgaaaagcccatgtctcctatgcagtacgcacgatctggtctgggaacagcagagatgaatggcaaactcatagctgcaggtggctataacagagaggaatgtcttcgaacagtcgaatgctataatccacatacagatcactggtcctttcttgctcccatgagaacaccaagagcccgatttcaaatggctgtactcatgggccagctctatgtggtaggtggatcaaatggccactcagatgacctgagttgtggagagatgtatgattcaaacatagatgactggattcctgttccagaattgagaactaaccgttgtaatgcaggagtgtgtgctctgaatggaaagttatacatcgttggtggctctgatccatatggtcaaaaaggactgaaaaattgtgatgtatttgatcctgtaacaaagttgtggacaagctgtgcccctcttaacattcggagacaccagtctgcagtctgtgagcttggtggttatttgtacataatcggaggtgcagaatcttggaattgtctgaacacagtagaacgatacaatcctgaaaataatacctggactttaattgcacccatgaatgtggctaggcgaggagctggagtggctgttcttaatggaaaactgtttgtatgtggtggctttgatggttctcatgccatcagttgtgtggaaatgtatgatccaactagaaatgaatggaagatgatgggaaatatgacttcaccaaggagcaatgctgggattgcaactgtagggaacaccatttatgcagtgggaggattcgatggcaatgaatttctgaatacggtggaagtctataaccttgagtcaaatgaatggagcccctatacaaagattttccagttttaacaaatttaagaccctctcaaactaacaggcttagtgatgtaattatggttagcagaggtacacttgtgaataaagagggtgggtgggtatagatgttgctaacagcaacacaaagcttttgcatattgcatactattaaacatgctgtacatactttttgggtttatttggaaaggaatgcaaagatgaaggtctgttttgtgtacttttaagactttggttattttactttttggaaaagaataaaccaagaattgattgggcacatcatttcaagaagtcccctctcctccacatttgttttgccaatttgcacattaaatgactcttccctcaaatgtgtactatggggtaaaaggggtagggtttaaagatgtagacagttgggttttttaagggccctttttcaataactggaacactctataacaaaggatacttatttaaatagatgacattgactatttttgtttttattaaaaggaagcttacatgcctaccaatatttaatcttttatgattgcctttttataactttttatattctcagcagagtgctttaccaattgaagtaaaatgtggcaggctggagttattgaagcagagtggcagtcttcagtttgcagagtaggggtctgtcttttaaactctgagtgcaaacttcagagttcttgccttggctgcagtttttttccttcaagaatgcagtactaacatttatttgagtggagttactgaacagtaacatagctgtgatttttggtatttgaaacactggttttaaatattttgacttgttgagggtatgttttatatagcaagacattatatagcagtaaaaaatggtgttttatcttctatataattcctgtttttattattaacaaaacagtcctaaatagcagccctcaattgtgaaaaaatttactttaaactacattaggttgtgaatgcaggttttatcagaactatgtttttgttcagtttatctgttcatatggataaatattggttgggatgacttggtgtctaatgtgtagtgctacacacctaacttatggggccaaaatagcatgtcctaatgcttgctgctgatttaaacacattaaaggtactttgcaggaaatccttgcaccatgggattaatatccaattgctgcttgtacactcattcattactaaaagttttgagaaatttttttttccagtaatgagcttaagaaatttgtggaaaataactcacctggcatcttacatctgaaataaggaatgatataaggtttttttttctcacagaagatgaagcacacaggaacctaatgggccaactgggatgaggtgactattctgagatgactattcagtggctaacttgggttaggaagaaaataattaggtattttctccaaatgttcactggtactctgccactttatttctctcatctgttacacaaagaaccaccaggaaagcaaatcagtttggttggtaactctgtaattcctaactatcactggtttggttctggactaaaactacattgacagattgaatttgcctaatatgatgactgtttttaatatggatctgtatgtgttctattcagcacaaggaaataaaattttagttgaggattcagcactaaaatccttgagatcacttctca

SEQ ID NO: 312335 - DNA, 2278 bp, Homo sapiens
acctgttccagcctaaaaatcccagaattgagaactaaccgcttgaatgcaggagtgtgtgctctgaatggaaagttatacatcgttggtggctctgatccatatggtcaaaaaggactgaaaaattgtgatgtatttgatcctgtaacaaagttgtggacaagctgtgcccctcttaacattcggagacaccagtctgcagtctgtgagcttggtggttatttgtacataatcggaggtgcagaatcttggaattgtctgaacacagtagaacgatacaatcctgaaaataatacctggactttaattgcacccatgaatgtggctaggcgaggagctggagtggctgttcttaatggaaaactgtttgtatgtggtggctttgatggttctcatgccatcagttgtgtggaaatgtatgatccaactagaaatgaatggaagatgatgggaaatatgacttcaccaaggagcaatgctgggattgcaactgtagggaacaccatttatgcagtgggaggattcgatggcaatgaatttctgaatacggtggaagtctataaccttgagtcaaatgaatggagcccctatacaaagattttccagttttaacaaatttaagaccctctcaaactaacaggcttagtgatgtaattatggttagcagaggtacacttgtgaataaagagggtgggtgggtatagatgttgctaacagcaacacaaagcttttgcatattgcatactattaaacatgctgtacatactttttgggtttatttggaaaggaatgcaaagatgaaggtctgttttgtgtacttttaagactttggttattttactttttggaaaagaataaaccaagaattgattgggcacatcatttcaagaagtcccctctcctccacatttgttttgccaatttgcacattaaatgactcttccctcaaatgtgtactatggggtaaaaggggtagggtttaaagatgtagacagttgggttttttaagggccctttttcaataactggaacactctataacaaaggatacttatttaaatagatgacattgactatttttgtttttattaaaaggaagcttacatgcctaccaatatttaatcttttatgattgcctttttataactttttatattctcagcagagtgctttaccaattgaagtaaaatgtggcaggctggagttattgaagcagagtggcagtcttcagtttgcagagtaggggtctgtcttttaaactctgagtgcaaacttcagagttcttgccttggctgcagtttttttccttcaagaatgcagtactaacatttatttgagtggagttactgaacagtaacatagctgtgatttttggtatttgaaacactggttttaaatattttgacttgttgagggtatgttttatatagcaagacattatatagcagtaaaaaatggtgttttatcttctatataattcctgtttttattattaacaaaacagtcctaaatagcagccctcaattgtgaaaaaatttactttaaactacattaggttgtgaatgcaggttttatcagaactatgtttttgttcagtttatctgttcatatggataaatattggttgggatgacttggtgtctaatgtgtagtgctacacacctaacttatggggccaaaatagcatgtcctaatgcttgctgctgatttaaacacattaaaggtactttgcaggaaatccttgcaccatgggattaatatccaattgctgcttgtacactcattcattactaaaagttttgagaaatttttttttccagtaatgagcttaagaaatttgtggaaaataactcacctggcatcttacatctgaaataaggaatgatataaggtttttttttctcacagaagatgaagcacacaggaacctaatgggccaactgggatgaggtgactattctgagatgactattcagtggctaacttgggttaggaagaaaataattaggtattttctccaaatgttcactggtactctgccactttatttctctcatctgttacacaaagaaccaccaggaaagcaaatcagtttggttggtaactctgtaattcctaactatcactggtttggttctggactaaaactacattgacagattgaatttgcctaatatgatgactgtttttaatatggatctgtatgtgttctattcagcacaaggaaataaaattttagttgaggattcagcactaaaatccttgagatcacttctca

SEQ ID NO: 312336 - DNA, 2824 bp, Homo sapiens
cgagacggaagcgggctgggaggcgtcggcggcggcagcgcacgtggtgacgtgcgagggggtgcggcgcgagcggtcggcggcggcggaggcagtgtctcccggtcgcgcgtggaggtcggtcgctcagagctgctgggcgcagtttctccgcctgctgcttcggcgcggctgtatcggcgagcgagcgagttcccgcgagttctcggtggcgctcccccttcctttcagtctccacggactggcccctcgtccttctacttgaccgctcccgtcttccgccgccttctggcgctttccgttgggccgattcccgcccgcttcctcctgcttcccatcgaagctctagaaatgaatgtttccatctcttcagagatgaaccagattatgatgcatcattatcacagaagaaattcgtgtctatagcttttaaggacttgattacatcattttcaagcctgatagttttggaatcaccattagagcttaagacacacctgccttcatttcaaccacctgtcttcataccctgacgaagtgcaccttttaacactcctttgtccttggattacttaagagttcccagaaatacatttgccaccaacagagtagccaaatttataaggaaaaatgattcccaatggatatttgatgtttgaggatgaaaattttattgagtcttctgttgccaaattaaatgccctgaggaaaagtggccagttctgtgatgttcgacttcaggtctgtggccatgaaatgttagcacacagagcagtgctagcttgctgcagtccctatttatttgaaatctttaatagtgatagtgatcctcatggaatttctcacgttaaatttgatgatctcaatccagaagctgttgaagtcttgttgaattatgcctacactgctcagttgaaagcagataaggaattggtaaaagatgtttattctgcagcaaaaaagctgaagatggatcgagtaaagcaggtttgtggtgattatttactgtctagaatggatgttaccagctgcatctcttaccgaaattttgcaagttgtatgggagactcccgtttgttgaataaggttgatgcttatattcaggagcatttgttacaaatttctgaagaggaggagtttcttaagcttccaaggctaaagttggaggtaatgcttgaagataatgtttgcttgcccagcaatggcaaattatatacaaaggtaatcaactgggtgcagcgtagcatctgggagaatggagacagtctggaagagctgatggaagaggttcaaaccttgtactactcagctgatcacaagctgcttgatgggaacctactagatggacaggctgaggtgtttggcagtgatgatgaccacattcagtttgtgcagaaaaagccaccacgtgagaatggccataagcagataagtagcagttcaactggatgtctctcttctccaaatgctacagtacaaagccctaagcatgagtggaaaatcgttgcttcagaaaagacttcaaataacacttacttgtgcctggctgtgctggatggtatattctgtgtcatttttcttcatgggagaaacagcccacagagctcaccaacaagtactccaaaactaagtaagagtttaagctttgagatgcaacaagatgagctaatcgaaaagcccatgtctcctatgcagtacgcacgatctggtctgggaacagcagagatgaatggcaaactcatagctgcaggtggctataacagagaggaatgtcttcgaacagtcgaatgctataatccacatacagatcactggtcctttcttgctcccatgagaacaccaagagcccgatttcaaatggctgtactcatgggccagctctatgtggtaggtggatcaaatggccactcagatgacctgagttgtggagagatgtatgattcaaacatagatgactggattcctgttccagaattgagaactaaccgttgtaatgcaggagtgtgtgctctgaatggaaagttatacatcgttggtggctctgatccatatggtcaaaaaggactgaaaaattgtgatgtatttgatcctgtaacaaagttgtggacaagctgtgcccctcttaacattcggagacaccagtctgcagtctgtgagcttggtggttatttgtacataatcggaggtgcagaatcttggaattgtctgaacacagtagaacgatacaatcctgaaaataatacctggactttaattgcacccatgaatgtggctaggcgaggagctggagtggctgttcttaatggaaaactgtttgtatgtggtggctttgatggttctcatgccatcagttgtgtggaaatgtatgatccaactagaaatgaatggaagatgatgggaaatatgacttcaccaaggagcaatgctgggattgcaactgtagggaacaccatttatgcagtgggaggattcgatggcaatgaatttctgaatacggtggaagtctataaccttgagtcaaatgaatggagcccctatacaaagattttccagttttaacaaatttaagaccctctcaaactaacaggcttagtgatgtaattatggttagcagaggtacacttgtgaataaagagggtgggtgggtatagatgttgctaacagcaacacaaagcttttgcatattgcatactattaaacatgctgtacatactttttgggtttatttggaaaggaatgcaaagatgaaggtctgttttgtgtacttttaagactttggttattttactttttggaaaagaataaaccaagaattgattgggca

SEQ ID NO: 312337 - DNA, 2753 bp, Homo sapiens
cgagacggaagcgggctgggaggcgtcggcggcggcagcgcacgtggtgacgtgcgagggggtgcggcgcgagcggtcggcggcggcggaggcagtgtctcccggtcgcgcgtggaggtcggtcgctcagagctgctgggcgcagtttctccgcctgctgcttcggcgcggctgtatcggcgagcgagcgagttcccgcgagttctcggtggcgctcccccttcctttcagtctccacggactggcccctcgtccttctacttgaccgctcccgtcttccgccgccttctggcgctttccgttgggccgattcccgcccgcttcctcctgcttcccatcgaagctctagaaatgaatgtttccatctcttcagagatgaaccagattatgatgcatcattatcacagaagaaattcgtgtctatagcttttaaggacttgattacatcattttcaagcctgatagttttggaatcaccattagagcttaagacacacctgccttcatttcaaccacctgtcttcataccctgacgaagtgcaccttttaacactcctttgtccttggattacttaagagttcccagaaatacatttgccaccaacagagtagccaaatttataaggaaaaatgattcccaatggatatttgatgtttgaggatgaaaattttattgagtcttctgttgccaaattaaatgccctgaggaaaagtggccagttctgtgatgttcgacttcaggtctgtggccatgaaatgttagcacacagagcagtgctagcttgctgcagtccctatttatttgaaatctttaatagtgatagtgatcctcatggaatttctcacgttaaatttgatgatctcaatccagaagctgttgaagtcttgttgaattatgcctacactgctcagttgaaagcagataaggaattggtaaaagatgtttattctgcagcaaaaaagctgaagatggatcgagtaaagcaggtttgtggtgattatttactgtctagaatggatgttaccagctgcatctcttaccgaaattttgcaagttgtatgggagactcccgtttgttgaataaggttgatgcttatattcaggagcatttgttacaaatttctgaagaggaggagtttcttaagcttccaaggctaaagttggaggtaatgcttgaagataatgtttgcttgcccagcaatggcaaattatatacaaaggtaatcaactgggtgcagcgtagcatctgggagaatggagacagtctggaagagctgatggaagaggttcaaaccttgtactactcagctgatcacaagctgcttgatgggaacctactagatggacaggctgaggtgtttggcagtgatgatgaccacattcagtttgtgcagaaaaagccaccacgtgagaatggccataagcagataagtagcagttcaactggatgtctctcttctccaaatgctacagtacaaagccctaagcatgagtggaaaatcgttgcttcagaaaagacttcaaataacacttacttgtgcctggctgtgctggatggtatattctgtgtcatttttcttcatgggagaaacagcccacagagctcaccaacaagtactccaaaactaagtaagagtttaagctttgagatgcaacaagatgagctaatcgaaaagcccatgtctcctatgcagtacgcacgatctggtctgggaacagcagagatgaatggcaaactcatagctgcaggtggctataacagagaggaatgtcttcgaacagtcgaatgctataatccacatacagatcactggtcctttcttgctcccatgagaacaccaagagcccgatttcaaatggctgtactcatgggccagctctatgtggtaggtggatcaaatggccactcagatgacctgagttgtggagagatgtatgattcaaacatagatgactggattcctgttccagaattgagaactaaccgttgtaatgcaggagtgtgtgctctgaatggaaagttatacatcgttggtggctctgatccatatggtcaaaaaggactgaaaaattgtgatgtatttgatcctgtaacaaagttgtggacaagctgtgcccctcttaacattcggagacaccagtctgcagtctgtgagcttggtggttatttgtacataatcggaggtgcagaatcttggaattgtctgaacacagtagaacgatacaatcctgaaaataatacctggactttaattgcacccatgaatgtggctaggcgaggagctggagtggctgttcttaatggaaaactgtttgtatgtggtggctttgatggttctcatgccatcagttgtgtggaaatgtatgatccaactagaaatgaatggaagatgatgggaaatatgacttcaccaaggagcaatgctgggattgcaactgtagggaacaccatttatgcagtgggaggattcgatggcaatgaatttctgaatacggtggaagtctataaccttgagtcaaatgaatggagcccctatacaaagattttccagttttaacaaatttaagaccttcatctttgcattcctttccaaataaacccaaaaagtatgtacagcatgtttaatagtatgcaatatgcaaaagctttgtgttgctgttagcaacatctatacccacccaccctctttattcacaagtgtacctctactaaccataattacatcactaagcctgttagtttgctcgtgcc

SEQ ID NO: 312338 - DNA, 2362 bp, Homo sapiens
cgagacggaagcgggctgggaggcgtcggcggcggcagcgcacgtggtgacgtgcgagggggtgcggcgcgagcggtcggcggcggcggaggcagtgtctcccggtcgcgcgtggaggtcggtcgctcagagctgctgggcgcagtttctccgcctgctgcttcggcgcggctgtatcggcgagcgagcgagttcccgcgagttctcggtggcgctcccccttcctttcagtctccacggactggcccctcgtccttctacttgaccgctcccgtcttccgccgccttctggcgctttccgttgggccgattcccgcccgcttcctcctgcttcccatcgaagctctagaaatgaatgtttccatctcttcagagatgaaccagattatgatgcatcattatcacagaagaaattcgtgtctatagcttttaaggacttgattacatcattttcaagcctgatagttttggaatcaccattagagcttaagacacacctgccttcatttcaaccacctgtcttcataccctgacgaagtgcaccttttaacactcctttgtccttggattacttaagagttcccagaaatacatttgccaccaacagagtagccaaatttataaggaaaaatgattcccaatggatatttgatgtttgaggatgaaaattttattgagtcttctgttgccaaattaaatgccctgaggaaaagtggccagttctgtgatgttcgacttcaggtctgtggccatgaaatgttagcacacagagcagtgctagcttgctgcagtccctatttatttgaaatctttaatagtgatagtgatcctcatggaatttctcacgttaaatttgatgatctcaatccagaagctgttgaagtcttgttgaattatgcctacactgctcagttgaaagcagataaggaattggtaaaagatgtttattctgcagcaaaaaagctgaagatggatcgagtaaagcaggtttgtggtgattatttactgtctagaatggatgttaccagctgcatctcttaccgaaattttgcaagttgtatgggagactcccgtttgttgaataaggttgatgcttatattcaggagcatttgttacaaatttctgaagaggaggagtttcttaagcttccaaggctaaagttggaggtaatgcttgaagataatgtttgcttgcccagcaatggcaaattatatacaaaggtaatcaactgggtgcagcgtagcatctgggagaatggagacagtctggaagagctgatggaagaggttcaaaccttgtactactcagctgatcacaagctgcttgatgggaacctactagatggacaggctgaggtgtttggcagtgatgatgaccacattcagtttgtgcagaaaaagccaccacgtgagaatggccataagcagataagtagcagttcaactggatgtctctcttctccaaatgctacagtacaaagccctaagcatgagtggaaaatcgttgcttcagaaaagacttcaaataacacttacttgtgcctggctgtgctggatggtatattctgtgtcatttttcttcatgggagaaacagcccacagagctcaccaacaagtactccaaaactaagtaagagtttaagctttgagatgcaacaagatgagctaatcgaaaagcccatgtctcctatgcagtacgcacgatctggtctgggaacagcagagatgaatggcaaactcatagctgcaggtggctataacagagaggaatgtcttcgaacagtcgaatgctataatccacatacagatcactggtcctttcttgctcccatgagaacaccaagagcccgatttcaaatggctgtactcatgggccagctctatgtggtaggtggatcaaatggccactcagatgacctgagttgtggagagatgtatgattcaaacatagatgactggattcctgttccagaattgagaactaaccgttgtaatgcaggagtgtgtgctctgaatggaaagttatacatcgttggtggctctgatccatatggtcaaaaaggactgaaaaattgtgatgtatttgatcctgtaacaaagttgtggacaagctgtgcccctcttaacattcggagacaccagtctgcagtctgtgagcttggtggttatttgtacataatcggaggtgcagaatcttggaattgtctgaacacagtagaacgatacaatcctgaaaataatacctggactttaattgcacccatgaatgtggctaggcgaggagctggagtggctgttcttaatgaaaactgtttgtggaggtagcactctgtttgtggagtagcactggtaccgagctcga

SEQ ID NO: 312339 - DNA, 3253 bp, Homo sapiens
cgagacggaagcgggctgggaggcgtcggcggcggcagcgcacgtggtgacgtgcgagggggtgcggcgcgagcggtcggcggcggcggaggcagtgtctcccggtcgcgcgtggaggtcggtcgctcagagctgctgggcgcagtttctccgcctgctgcttcggcgcggctgtatcggcgagcgagcgagttcccgcgagttctcggtggcgctcccccttcctttcagtctccacggactggcccctcgtccttctacttgaccgctcccgtcttccgccgccttctggcgctttccgttgggccgattcccgcccgcttcctcctgcttcccatcgaagctctagaaatgaatgtttccatctcttcagagatgaaccagattatgatgcatcattatcacagaagaaattcgtgtctatagcttttaaggacttgattacatcattttcaagcctgatagttttggaatcaccattagagcttaagacacacctgccttcatttcaaccacctgtcttcataccctgacgaagtgcaccttttaacactcctttgtccttggattacttaagagttcccagaaatacatttgccaccaacagagtagccaaatttataaggaaaaatgattcccaatggatatttgatgtttgaggatgaaaattttattgagtcttctgttgccaaattaaatgccctgaggaaaagtggccagttctgtgatgttcgacttcaggtctgtggccatgaaatgttagcacacagagcagtgctagcttgctgcagtccctatttatttgaaatctttaatagtgatagtgatcctcatggaatttctcacgttaaatttgatgatctcaatccagaagctgttgaagtcttgttgaattatgcctacactgctcagttgaaagcagataaggaattggtaaaagatgtttattctgcagcaaaaaagctgaagatggatcgagtaaagcaggtttgtggtgattatttactgtctagaatggatgttaccagctgcatctcttaccgaaattttgcaagttgtatgggagactcccgtttgttgaataaggttgatgcttatattcaggagcatttgttacaaatttctgaagaggaggagtttcttaagcttccaaggctaaagttggaggtaatgcttgaagataatgtttgcttgcccagcaatggcaaattatatacaaaggtaatcaactgggtgcagcgtagcatctgggagaatggagacagtctggaagagctgatggaagaggtttattaacaaaactaggatacccaagactgaagaaacaagaagaaacctcaagtgtattgacacgtaaagaagcagcagtcctgccccagttctcctaagaaaaatccgctgtgggcagagaacgatgatgatttaatggtgtttactcctttacaggattcttgtctttaaagctgtgtgtttttcaatggtgttgttcatacatatagtcactcacttaacttgggctacttttaaaaaaaatacacaagataaaattgatggagaaatggtgggaattgaaaacacgcaggtggagcagtggagtaaccttgagtttctctctccacttaaacctttcggagttcctttatgagggcttaccaaatctgttaggcctgcagaaacactgtcatcattatggtctaaaagggctaacagattatctttaaattctatgattcccacttgaaagtcagatgcatttgccatgtatttgcatctgtctcaatggagatgactctacagcttgcttgaatttttgcatttgttttttctttgtttttcttgacattgcttacaggaaggaaatatgtttatgcaaaccagaccacttatctgcaaaggtgtaaactatattcagtattttattgtaaatatgtatattctttaagagtatatattgtactagtgctttttttcttactgttatatgatagaagctatgaaaaaaatgaagatttctttcaagccaatcaagccaacgactcttcagccagtattggaagattttgtatttgattttggttttttgtttttgttttttaatttttaccaccatgacatgtatttttctttacctccggatcctgccagagtaatatgtcaagaagctcaagaagcacactggaggttaccttgaggcgtttgtgtaatctgcatactagtggagtagccatggtgaccgtagccacatgggtgttctgttgctgttttgcaggttcaaaccttgtactactcagctgatcacaagctgcttgatgggaacctactagatggacaggctgaggtgtttggcagtgatgatgaccacattcagtttgtgcaggtacacattgcacagtctgaggtaacctcaggttaaaatttgactagagaatttgatagcatacttaaattttcctttaataaaggaaagtggaccaatttcattggtataactggacagaaacatttttgggagaaaacaagcatatcttagagttagtatttttgccacatgaaaagatattaacaaattaggaaaccctattgaaatttttttctcataaagcaggaattacaaacagtaaaggccaataagatggaacaatatagaaattatttgggaagattatgaaaagcagttgtttgtgtcaggcatgactgatagttttttttaaaaaggggcagggggacttaaattgttgatggctatgaaagaaatttttggatgttaccttaactactgagctgtcttactggaaattagaaatggtatagttaagatggactatacaatgtaataagtctaaaagtggtggatcatatgttaaaacctgatctagatgtttctttaaccaagatgaattaaaatatagtagagttccactgtgctgattgagttactttgccttttataaaatccaatttcatttttcccctatgagtaaacacataattattcagacacattatcaacaattactagagaacaaacttctcaagtataaattttttaagtttatggacaaatacagaaaagtacacaagtcataattaccacatagtgaacctaccagtgtaaacactacccaagtcaagaagaggtttctagcatcccggcagcctttctcttgcctcttcccaaccgtttccgtatagtgctcccaaaggaaaccattatcctaccttctgacacattaaattagtttggctatgcttg

SEQ ID NO: 312340 - DNA, 1094 bp, Homo sapiens
cgagacggaagcgggctgggaggcgtcggcggcggcagcgcacgtggtgacgtgcgagggggtgcggcgcgagcggtcggcggcggcggaggcagtgtctcccggtcgcgcgtggaggtcggtcgctcagagctgctgggcgcagtttctccgcctgctgcttcggcgcggctgtatcggcgagcgagcgagttcccgcgagttctcggtggcgctcccccttcctttcagtctccacggactggcccctcgtccttctacttgaccgctcccgtcttccgccgccttctggcgctttccgttgggccgattcccgcccgcttcctcctgcttcccatcgaagctctagaaatgaatgtttccatctcttcagagatgaaccagattatgatgcatcattatcacagaagaaattcgtgtctatagcttttaaggacttgattacatcattttcaagcctgatagttttggaatcaccattagagcttaagacacacctgccttcatttcaaccacctgtcttcataccctgacgaagtgcaccttttaacactcctttgtccttggattacttaagagttcccagaaatacatttgccaccaacagagtagccaaatttataaggaaaaatgattcccaatggatatttgatgtttgaggatgatgggaaatatgacttcaccaaggagcaatgctgggattgcaactgtagggaacaccatttatgcagtgggaggattcgatggcaatgaatttctgaatacggtggaagtctataaccttgagtcaaatgaatggagcccctatacaaagattttccagttttaacaaatttaagaccctctcaaactaacaggcttagtgatgtaattatggttagcagaggtacacttgtgaataaagagggtgggtgggtatagatgttgctaacagcaacacaaagcttttgcatattgcatactattaaacatgctgtacatactttttgggtttatttggaaaggaatgcaaagatgaaggtctgttttgtgtacttttaagactttggttattttactttttggaaaagaataaaccaagaattgattgggca

SEQ ID NO: 312341 - DNA, 4225 bp, Homo sapiens
cgagacggaagcgggctgggaggcgtcggcggcggcagcgcacgtggtgacgtgcgagggggtgcggcgcgagcggtcggcggcggcggaggcagtgtctcccggtcgcgcgtggaggtcggtcgctcagagctgctgggcgcagtttctccgcctgctgcttcggcgcggctgtatcggcgagcgagcgagttcccgcgagttctcggtggcgctcccccttcctttcagtctccacggactggcccctcgtccttctacttgaccgctcccgtcttccgccgccttctggcgctttccgttgggccgattcccgcccgcttcctcctgcttcccatcgaagctctagaaatgaatgtttccatctcttcagagatgaaccagattatgatgcatcattatcacagaagaaattcgtgtctatagcttttaaggacttgattacatcattttcaagcctgatagttttggaatcaccattagagcttaagacacacctgccttcatttcaaccacctgtcttcataccctgacgaagtgcaccttttaacactcctttgtccttggattacttaagagttcccagaaatacatttgccaccaacagagtagccaaatttataaggaaaaatgattcccaatggatatttgatgtttgaggatgaaaattttattgagtcttctgttgccaaattaaatgccctgaggaaaagtggccagttctgtgatgttcgacttcaggtctgtggccatgaaatgttagcacacagagcagtgctagcttgctgcagtccctatttatttgaaatctttaatagtgatagtgatcctcatggaatttctcacgttaaatttgatgatctcaatccagaagctgttgaagtcttgttgaattatgcctacactgctcagttgaaagcagataaggaattggtaaaagatgtttattctgcagcaaaaaagctgaagatggatcgagtaaagcaggtttgtggtgattatttactgtctagaatggatgttaccagctgcatctcttaccgaaattttgcaagttgtatgggagactcccgtttgttgaataaggttgatgcttatattcaggagcatttgttacaaatttctgaagaggaggagtttcttaagcttccaaggctaaagttggaggtaatgcttgaagataatgtttgcttgcccagcaatggcaaattatatacaaaggtaatcaactgggtgcagcgtagcatctgggagaatggagacagtctggaagagctgatggaagaggttcaaaccttgtactactcagctgatcacaagctgcttgatgggaacctactagatggacaggctgaggtgtttggcagtgatgatgaccacattcagtttgtgcagaaaaagccaccacgtgagaatggccataagcagataagtagcagttcaactggatgtctctcttctccaaatgctacagtacaaagccctaagcatgagtggaaaatcgttgcttcagaaaagacttcaaataacacttacttgtgcctggctgtgctggatggtatattctgtgtcatttttcttcatgggagaaacagcccacagagctcaccaacaagtactccaaaactaagtaagagtttaagctttgagatgcaacaagatgagctaatcgaaaagcccatgtctcctatgcagtacgcacgatctggtctgggaacagcagagatgaatggcaaactcatagctgcaggtggctataacagagaggaatgtcttcgaacagtcgaatgctataatccacatacagatcactggtcctttcttgctcccatgagaacaccaagagcccgatttcaaatggctgtactcatgggccagctctatgtggtaggtggatcaaatggccactcagatgacctgagttgtggagagatgtatgattcaaacatagatgactggattcctgttccagaattgagaactaaccgttgtaatgcaggagtgtgtgctctgaatggaaagttatacatcgttggtggctctgatccatatggtcaaaaaggactgaaaaattgtgatgtatttgatcctgtaacaaagttgtggacaagctgtgcccctcttaacattcggagacaccagtctgcagtctgtgagcttggtggttatttgtacataatcggaggtgcagaatcttggaattgtctgaacacagtagaacgatacaatcctgaaaataatacctggactttaattgcacccatgaatgtggctaggcgaggagctggagtggctgttcttaatggaaaactgtttgtatgtggtggctttgatggttctcatgccatcagttgtgtggaaatgtatgatccaactagaaatgaatggaagatgatgggaaatatgacttcaccaaggagcaatgctgggattgcaactgtagggaacaccatttatgcagtgggaggattcgatggcaatgaatttctgaatacggtggaagtctataaccttgagtcaaatgaatggagcccctatacaaagattttccagttttaacaaatttaagaccctctcaaactaacaggcttagtgatgtaattatggttagcagaggtacacttgtgaataaagagggtgggtgggtatagatgttgctaacagcaacacaaagcttttgcatattgcatactattaaacatgctgtacatactttttgggtttatttggaaaggaatgcaaagatgaaggtctgttttgtgtacttttaagactttggttattttactttttggaaaagaataaaccaagaattgattgggcacatcatttcaagaagtcccctctcctccacatttgttttgccaatttgcacattaaatgactcttccctcaaatgtgtactatggggtaaaaggggtagggtttaaagatgtagacagttgggttttttaagggccctttttcaataactggaacactctataacaaaggatacttatttaaatagatgacattgactatttttgtttttattaaaaggaagcttacatgcctaccaatatttaatcttttatgattgcctttttataactttttatattctcagcagagtgctttaccaattgaagtaaaatgtggcaggctggagttattgaagcagagtggcagtcttcagtttgcagagtaggggtctgtcttttaaactctgagtgcaaacttcagagttcttgccttggctgcagtttttttccttcaagaatgcagtactaacatttatttgagtggagttactgaacagtaacatagctgtgatttttggtatttgaaacactggttttaaatattttgacttgttgagggtatgttttatatagcaagacattatatagcagtaaaaaatggtgttttatcttctatataattcctgtttttattattaacaaaacagtcctaaatagcagccctcaattgtgaaaaaatttactttaaactacattaggttgtgaatgcaggttttatcagaactatgtttttgttcagtttatctgttcatatggataaatattggttgggatgacttggtgtctaatgtgtagtgctacacacctaacttatggggccaaaatagcatgtcctaatgcttgctgctgatttaaacacattaaaggtactttgcaggaaatccttgcaccatgggattaatatccaattgctgcttgtacactcattcattactaaaagttttgagaaatttttttttccagtaatgagcttaagaaatttgtggaaaataactcacctggcatcttacatctgaaataaggaatgatataaggtttttttttctcacagaagatgaagcacacaggaacctaatgggccaactgggatgaggtgactattctgagatgactattcagtggctaacttgggttaggaagaaaataattaggtattttctccaaatgttcactggtactctgccactttatttctctcatctgttacacaaagaaccaccaggaaagcaaatcagtttggttggtaactctgtaattcctaactatcactggtttggttctggactaaaactacattgacagattgaatttgcctaatatgatgactgtttttaatatggatctgtatgtgttctattcagcacaaggaaataaaattttagttgaggattcagcactaaaatccttgagatcacttctca

SEQ ID NO: 312342 - DNA, 2892 bp, Homo sapiens
cgagacggaagcgggctgggaggcgtcggcggcggcagcgcacgtggtgacgtgcgagggggtgcggcgcgagcggtcggcggcggcggaggcagtgtctcccggtcgcgcgtggaggtcggtcgctcagagctgctgggcgcagtttctccgcctgctgcttcggcgcggctgtatcggcgagcgagcgagttcccgcgagttctcggtggcgctcccccttcctttcagtctccacggactggcccctcgtccttctacttgaccgctcccgtcttccgccgccttctggcgctttccgttgggccgattcccgcccgcttcctcctgcttcccatcgaagctctagaaatgaatgtttccatctcttcagagatgaaccagattatgatgcatcattatcacagaagaaattcgtgtctatagcttttaaggacttgattacatcattttcaagcctgatagttttggaatcaccattagagcttaagacacacctgccttcatttcaaccacctgtcttcataccctgacgaagtgcaccttttaacactcctttgtccttggattacttaagagttcccagaaatacatttgccaccaacagagtagccaaatttataaggaaaaatgattcccaatggatatttgatgtttgaggatgaaaattttattgagtcttctgttgccaaattaaatgccctgaggaaaagtggccagttctgtgatgttcgacttcaggtctgtggccatgaaatgttagcacacagagcagtgctagcttgctgcagtccctatttatttgaaatctttaatagtgatagtgatcctcatggaatttctcacgttaaatttgatgatctcaatccagaagctgttgaagtcttgttgaattatgcctacactgctcagttgaaagcagataaggaattggtaaaagatgtttattctgcagcaaaaaagctgaagatggatcgagtaaagcaggtttgtggtgattatttactgtctagaatggatgttaccagctgcatctcttaccgaaattttgcaagttgtatgggagactcccgtttgttgaataaggttgatgcttatattcaggagcatttgttacaaatttctgaagaggaggagtttcttaagcttccaaggctaaagttggaggtaatgcttgaagataatgtttgcttgcccagcaatggcaaattatatacaaaggtaatcaactgggtgcagcgtagcatctgggagaatggagacagtctggaagagctgatggaagaggttcaaaccttgtactactcagctgatcacaagctgcttgatgggaacctactagatggacaggctgaggtgtttggcagtgatgatgaccacattcagtttgtgcagaaaaagccaccacgtgagaatggccataagcagataagtagcagttcaactggatgtctctcttctccaaatgctacagtacaaagccctaagcatgagtggaaaatcgttgcttcagaaaagacttcaaataacacttacttgtgcctggctgtgctggatggtatattctgtgtcatttttcttcatgggagaaacagcccacagagctcaccaacaagtactccaaaactaagtaagagtttaagctttgagatgcaacaagatgagctaatcgaaaagcccatgtctcctatgcagtacgcacgatctggtctgggaacagcagagatgaatggcaaactcatagctgcaggtggctataacagagaggaatgtcttcgaacagtcgaatgctataatccacatacagatcactggtcctttcttgctcccatgagaacaccaagagcccgatttcaaatggctgtactcatgggccagctctatgtggtaggtggatcaaatggccactcagatgacctgagttgtggagagatgtatgattcaaacatagatgactggattcctgttccagaattgagaactaaccgttgtaatgcaggagtgtgtgctctgaatggaaagttatacatcgttggtggctctgatccatatggtcaaaaaggactgaaaaattgtgatgtatttgatcctgtaacaaagttgtggacaagctgtgcccctcttaacattcggagacaccagtctgcagtctgtgagcttggtggttatttgtacataatcggaggtgcagaatcttggaattgtctgaacacagtagaacgatacaatcctgaaaataatacctggactttaattgcacccatgaatgtggctaggcgaggagctggagtggctgttcttaatggaaaactgtttgtatgtggtggctttgatggttctcatgccatcagttgtgtggaaatgtatgatccaactagaaatgaatggaagatgatgggaaatatgacttcaccaaggagcaatgctgggattgcaactgtagggaacaccatttatgcagtgggaggattcgatggcaatgaatttctgaatacggtggaagtctataaccttgagtcaaatgaatggagcccctatacaaagattttccagttttaacaaatttaagaccctctcaaactaacaggcttagtgatgtaattatggttagcagaggtacacttgtgaataaagagggtgggtgggtatagatgttgctaacagcaacacaaagcttttgcatattgcatactattaaacatgctgtacatactttttgggtttatttggaaaggaatgcaaagatgaaggtctgttttgtgtacttttaagactttggttattttactttttggaaaagaataaaccaagaattgattgggcacatcatttcaagaagtcccctctcctccacatttgttttgccaatttgcacattaaatgactcttccc

SEQ ID NO: 312343 - DNA, 4366 bp, Homo sapiens
cgagacggaagcgggctgggaggcgtcggcggcggcagcgcacgtggtgacgtgcgagggggtgcggcgcgagcggtcggcggcggcggaggcagtgtctcccggtcgcgcgtggaggtcggtcgctcagagctgctgggcgcagtttctccgcctgctgcttcggcgcggctgtatcggcgagcgagcgagttcccgcgagttctcggtggcgctcccccttcctttcagtctccacggactggcccctcgtccttctacttgaccgctcccgtcttccgccgccttctggcgctttccgttgggccgattcccgcccgcttcctcctgcttcccatcgaagctctagaaatgaatgtttccatctcttcagagatgaaccagattatgatgcatcattatcacagaagaaattcgtgtctatagcttttaaggacttgattacatcattttcaagcctgatagttttggaatcaccattagagcttaagacacacctgccttcatttcaaccacctgtcttcataccctgacgaagtgcaccttttaacactcctttgtccttggattacttaagagttcccagaaatacatttgccaccaacagagtagccaaatttataaggaaaaatgattcccaatggatatttgatgtttgaggatgaaaattttattgagtcttctgttgccaaattaaatgccctgaggaaaagtggccagttctgtgatgttcgacttcaggtctgtggccatgaaatgttagcacacagagcagtgctagcttgctgcagtccctatttatttgaaatctttaatagtgatagtgatcctcatggaatttctcacgttaaatttgatgatctcaatccagaagctgttgaagtcttgttgaattatgcctacactgctcagttgaaagcagataaggaattggtaaaagatgtttattctgcagcaaaaaagctgaagatggatcgagtaaagcaggtttgtggtgattatttactgtctagaatggatgttaccagctgcatctcttaccgaaattttgcaagttgtatgggagactcccgtttgttgaataaggttgatgcttatattcaggagcatttgttacaaatttctgaagaggaggagtttcttaagcttccaaggctaaagttggaggtaatgcttgaagataatgtttgcttgcccagcaatggcaaattatatacaaaggtaatcaactgggtgcagcgtagcatctgggagaatggagacagtctggaagagctgatggaagaggtttattaacaaaactaggatacccaagactgaagaaacaagaagaaacctcaagtgtattgacacgtaaagaagcagcagtcctgccccagttctcctaagaaaaatccgctgtgggcagagaacgatgatgatttaatggttcaaaccttgtactactcagctgatcacaagctgcttgatgggaacctactagatggacaggctgaggtgtttggcagtgatgatgaccacattcagtttgtgcagaaaaagccaccacgtgagaatggccataagcagataagtagcagttcaactggatgtctctcttctccaaatgctacagtacaaagccctaagcatgagtggaaaatcgttgcttcagaaaagacttcaaataacacttacttgtgcctggctgtgctggatggtatattctgtgtcatttttcttcatgggagaaacagcccacagagctcaccaacaagtactccaaaactaagtaagagtttaagctttgagatgcaacaagatgagctaatcgaaaagcccatgtctcctatgcagtacgcacgatctggtctgggaacagcagagatgaatggcaaactcatagctgcaggtggctataacagagaggaatgtcttcgaacagtcgaatgctataatccacatacagatcactggtcctttcttgctcccatgagaacaccaagagcccgatttcaaatggctgtactcatgggccagctctatgtggtaggtggatcaaatggccactcagatgacctgagttgtggagagatgtatgattcaaacatagatgactggattcctgttccagaattgagaactaaccgttgtaatgcaggagtgtgtgctctgaatggaaagttatacatcgttggtggctctgatccatatggtcaaaaaggactgaaaaattgtgatgtatttgatcctgtaacaaagttgtggacaagctgtgcccctcttaacattcggagacaccagtctgcagtctgtgagcttggtggttatttgtacataatcggaggtgcagaatcttggaattgtctgaacacagtagaacgatacaatcctgaaaataatacctggactttaattgcacccatgaatgtggctaggcgaggagctggagtggctgttcttaatggaaaactgtttgtatgtggtggctttgatggttctcatgccatcagttgtgtggaaatgtatgatccaactagaaatgaatggaagatgatgggaaatatgacttcaccaaggagcaatgctgggattgcaactgtagggaacaccatttatgcagtgggaggattcgatggcaatgaatttctgaatacggtggaagtctataaccttgagtcaaatgaatggagcccctatacaaagattttccagttttaacaaatttaagaccctctcaaactaacaggcttagtgatgtaattatggttagcagaggtacacttgtgaataaagagggtgggtgggtatagatgttgctaacagcaacacaaagcttttgcatattgcatactattaaacatgctgtacatactttttgggtttatttggaaaggaatgcaaagatgaaggtctgttttgtgtacttttaagactttggttattttactttttggaaaagaataaaccaagaattgattgggcacatcatttcaagaagtcccctctcctccacatttgttttgccaatttgcacattaaatgactcttccctcaaatgtgtactatggggtaaaaggggtagggtttaaagatgtagacagttgggttttttaagggccctttttcaataactggaacactctataacaaaggatacttatttaaatagatgacattgactatttttgtttttattaaaaggaagcttacatgcctaccaatatttaatcttttatgattgcctttttataactttttatattctcagcagagtgctttaccaattgaagtaaaatgtggcaggctggagttattgaagcagagtggcagtcttcagtttgcagagtaggggtctgtcttttaaactctgagtgcaaacttcagagttcttgccttggctgcagtttttttccttcaagaatgcagtactaacatttatttgagtggagttactgaacagtaacatagctgtgatttttggtatttgaaacactggttttaaatattttgacttgttgagggtatgttttatatagcaagacattatatagcagtaaaaaatggtgttttatcttctatataattcctgtttttattattaacaaaacagtcctaaatagcagccctcaattgtgaaaaaatttactttaaactacattaggttgtgaatgcaggttttatcagaactatgtttttgttcagtttatctgttcatatggataaatattggttgggatgacttggtgtctaatgtgtagtgctacacacctaacttatggggccaaaatagcatgtcctaatgcttgctgctgatttaaacacattaaaggtactttgcaggaaatccttgcaccatgggattaatatccaattgctgcttgtacactcattcattactaaaagttttgagaaatttttttttccagtaatgagcttaagaaatttgtggaaaataactcacctggcatcttacatctgaaataaggaatgatataaggtttttttttctcacagaagatgaagcacacaggaacctaatgggccaactgggatgaggtgactattctgagatgactattcagtggctaacttgggttaggaagaaaataattaggtattttctccaaatgttcactggtactctgccactttatttctctcatctgttacacaaagaaccaccaggaaagcaaatcagtttggttggtaactctgtaattcctaactatcactggtttggttctggactaaaactacattgacagattgaatttgcctaatatgatgactgtttttaatatggatctgtatgtgttctattcagcacaaggaaataaaattttagttgaggattcagcactaaaatccttgagatcacttctca

SEQ ID NO: 312344 - DNA, 4189 bp, Homo sapiens
cgagacggaagcgggctgggaggcgtcggcggcggcagcgcacgtggtgacgtgcgagggggtgcggcgcgagcggtcggcggcggcggaggcagtgtctcccggtcgcgcgtggaggtcggtcgctcagagctgctgggcgcagtttctccgcctgctgcttcggcgcggctgtatcggcgagcgagcgagttcccgcgagttctcggtggcgctcccccttcctttcagtctccacggactggcccctcgtccttctacttgaccgctcccgtcttccgccgccttctggcgctttccgttgggccgattcccgcccgcttcctcctgcttcccatcgaagctctagaaatgaatgtttccatctcttcagagatgaaccagattatgatgcatcattatcacagaagaaattcgtgtctatagcttttaaggacttgattacatcattttcaagcctgatagttttggaatcaccattagagcttaagacacacctgccttcatttcaaccacctgtcttcataccctgacgaagtgcaccttttaacactcctttgtccttggattacttaagagttcccagaaatacatttgccaccaacagagtagccaaatttataaggaaaaatgattcccaatggatatttgatgtttgaggatgaaaattttattgagtcttctgttgccaaattaaatgccctgaggaaaagtggccagttctgtgatgttcgacttcaggtctgtggccatgaaatgttagcacacagagcagtgctagcttgctgcagtccctatttatttgaaatctttaatagtgatagtgatcctcatggaatttctcacgttaaatttgatgatctcaatccagaagctgttgaagtcttgttgaattatgcctacactgctcagttgaaagcagataaggaattggtaaaagatgtttattctgcagcaaaaaagctgaagatggatcgagtaaagcaggtttgtggtgattatttactgtctagaatggatgttaccagctgcatctcttaccgaaattttgcaagttgtatgggagactcccgtttgttgaataaggttgatgcttatattcaggagcatttgttacaaatttctgaagaggaggagtttcttaagcttccaaggctaaagttggaggtaatgcttgaagataatgtttgcttgcccagcaatggcaaattatatacaaaggtaatcaactgggtgcagcgtagcatctgggagaatggagacagtctggaagagctgatggaagaggttcaaaccttgtactactcagctgatcacaagctgcttgatgggaacctactagatggacaggctgaggtgtttggcagtgatgatgaccacattcagtttgtgcagaaaaagccaccacgtgagaatggccataagcagataagtagcagttcaactggatgtctctcttctccaaatgctacagtacaaagccctaagcatgagtggaaaatcgttgcttcagaaaagacttcaaataacacttacttgtgcctggctgtgctggatggtatattctgtgtcatttttcttcatgggagaaacagcccacagagctcaccaacaagtactccaaaactaagtaagagtttaagctttgagatgcaacaagatgagctaatcgaaaagcccatgtctcctatgcagtacgcacgatctggtctgggaacagcagagatgaatggcaaactcatagctgcaggtggctataacagagaggaatgtcttcgaacagtcgaatgctataatccacatacagatcactggtcctttcttgctcccatgagaacaccaagagcccgatttcaaatggctgtactcatgggccagctctatgtggtaggtggatcaaatggccactcagatgacctgagttgtggagagatgtatgattcaaacatagatgactggattcctgttccagaattgagaactaaccgttgtaatgcaggtggctctgatccatatggtcaaaaaggactgaaaaattgtgatgtatttgatcctgtaacaaagttgtggacaagctgtgcccctcttaacattcggagacaccagtctgcagtctgtgagcttggtggttatttgtacataatcggaggtgcagaatcttggaattgtctgaacacagtagaacgatacaatcctgaaaataatacctggactttaattgcacccatgaatgtggctaggcgaggagctggagtggctgttcttaatggaaaactgtttgtatgtggtggctttgatggttctcatgccatcagttgtgtggaaatgtatgatccaactagaaatgaatggaagatgatgggaaatatgacttcaccaaggagcaatgctgggattgcaactgtagggaacaccatttatgcagtgggaggattcgatggcaatgaatttctgaatacggtggaagtctataaccttgagtcaaatgaatggagcccctatacaaagattttccagttttaacaaatttaagaccctctcaaactaacaggcttagtgatgtaattatggttagcagaggtacacttgtgaataaagagggtgggtgggtatagatgttgctaacagcaacacaaagcttttgcatattgcatactattaaacatgctgtacatactttttgggtttatttggaaaggaatgcaaagatgaaggtctgttttgtgtacttttaagactttggttattttactttttggaaaagaataaaccaagaattgattgggcacatcatttcaagaagtcccctctcctccacatttgttttgccaatttgcacattaaatgactcttccctcaaatgtgtactatggggtaaaaggggtagggtttaaagatgtagacagttgggttttttaagggccctttttcaataactggaacactctataacaaaggatacttatttaaatagatgacattgactatttttgtttttattaaaaggaagcttacatgcctaccaatatttaatcttttatgattgcctttttataactttttatattctcagcagagtgctttaccaattgaagtaaaatgtggcaggctggagttattgaagcagagtggcagtcttcagtttgcagagtaggggtctgtcttttaaactctgagtgcaaacttcagagttcttgccttggctgcagtttttttccttcaagaatgcagtactaacatttatttgagtggagttactgaacagtaacatagctgtgatttttggtatttgaaacactggttttaaatattttgacttgttgagggtatgttttatatagcaagacattatatagcagtaaaaaatggtgttttatcttctatataattcctgtttttattattaacaaaacagtcctaaatagcagccctcaattgtgaaaaaatttactttaaactacattaggttgtgaatgcaggttttatcagaactatgtttttgttcagtttatctgttcatatggataaatattggttgggatgacttggtgtctaatgtgtagtgctacacacctaacttatggggccaaaatagcatgtcctaatgcttgctgctgatttaaacacattaaaggtactttgcaggaaatccttgcaccatgggattaatatccaattgctgcttgtacactcattcattactaaaagttttgagaaatttttttttccagtaatgagcttaagaaatttgtggaaaataactcacctggcatcttacatctgaaataaggaatgatataaggtttttttttctcacagaagatgaagcacacaggaacctaatgggccaactgggatgaggtgactattctgagatgactattcagtggctaacttgggttaggaagaaaataattaggtattttctccaaatgttcactggtactctgccactttatttctctcatctgttacacaaagaaccaccaggaaagcaaatcagtttggttggtaactctgtaattcctaactatcactggtttggttctggactaaaactacattgacagattgaatttgcctaatatgatgactgtttttaatatggatctgtatgtgttctattcagcacaaggaaataaaattttagttgaggattcagcactaaaatccttgagatcacttctca

SEQ ID NO: 312345 - DNA, 4172 bp, Homo sapiens
cgagacggaagcgggctgggaggcgtcggcggcggcagcgcacgtggtgacgtgcgagggggtgcggcgcgagcggtcggcggcggcggaggcagtgtctcccggtcgcgcgtggaggtcggtcgctcagagctgctgggcgcagtttctccgcctgctgcttcggcgcggctgtatcggcgagcgagcgagttcccgcgagttctcggtggcgctcccccttcctttcagtctccacggactggcccctcgtccttctacttgaccgctcccgtcttccgccgccttctggcgctttccgttgggccgattcccgcccgcttcctcctgcttcccatcgaagctctagaaatgaatgtttccatctcttcagagatgaaccagattatgatgcatcattatcacagaagaaattcgtgtctatagcttttaaggacttgattacatcattttcaagcctgatagttttggaatcaccattagagcttaagacacacctgccttcatttcaaccacctgtcttcataccctgacgaagtgcaccttttaacactcctttgtccttggattacttaagagttcccagaaatacatttgccaccaacagagtagccaaatttataaggaaaaatgattcccaatggatatttgatgtttgaggatgaaaattttattgagtcttctgttgccaaattaaatgccctgaggaaaagtggccagttctgtgatgttcgacttcaggtctgtggccatgaaatgttagcacacagagcagtgctagcttgctgcagtccctatttatttgaaatctttaatagtgatagtgatcctcatggaatttctcacgttaaatttgatgatctcaatccagaagctgttgaagtcttgttgaattatgcctacactgctcagttgaaagcagataaggaattggtaaaagatgtttattctgcagcaaaaaagctgaagatggatcgagtaaagcaggtttgtggtgattatttactgtctagaatggatgttaccagctgcatctcttaccgaaattttgcaagttgtatgggagactcccgtttgttgaataaggttgatgcttatattcaggagcatttgttacaaatttctgaagaggaggagtttcttaagcttccaaggctaaagttggaggtaatgcttgaagataatgtttgcttgcccagcaatggcaaattatatacaaaggtaatcaactgggtgcagcgtagcatctgggagaatggagacagtctggaagagctgatggaagaggttcaaaccttgtactactcagctgatcacaagctgcttgatgggaacctactagatggacaggctgaggtgtttggcagtgatgatgaccacattcagtttgtgcagaaaaagccaccacgtgagaatggccataagcagataagtagcagttcaactggatgtctctcttctccaaatgctacagtacaaagccctaagcatgagtggaaaatcgttgcttcagaaaagacttcaaataacacttacttgtgcctggctgtgctggatggtatattctgtgtcatttttcttcatgggagaaacagcccacagagctcaccaacaagtactccaaaactaagtaagagtttaagctttgagatgcaacaagatgagctaatcgaaaagcccatgtctcctatgcagtacgcacgatctggtctgggaacagcagagatgaatggcaaactcatagctgcaggtggctataacagagaggaatgtcttcgaacagtcgaatgctataatccacatacagatcactggtcctttcttgctcccatgagaacaccaagagcccgatttcaaatggctgtactcatgggccagctctatgtggtaggtggatcaaatggccactcagatgacctgagttgtggagagatgtatgattcaaacatagatgactggattcctgttccagaattgagaactaaccgttgtaatgcaggagtgtgtgctctgaatggaaagttatacatcgttggtggctctgatccatatggtcaaaaaggactgaaaaattgtgatgtatttgatcctgtaacaaagttgtggacaagctgtgcccctcttaacattcggagacaccagtctgcagtctgtgagcttggtggttatttgtacataatcggaggtgcagaatcttggaattgtctgaacacagtagaacgatacaatcctgaaaataatacctggactttaattgcacccatgaatgtggctaggcgaggagctggagtggctgttcttaatggaaatgtatgatccaactagaaatgaatggaagatgatgggaaatatgacttcaccaaggagcaatgctgggattgcaactgtagggaacaccatttatgcagtgggaggattcgatggcaatgaatttctgaatacggtggaagtctataaccttgagtcaaatgaatggagcccctatacaaagattttccagttttaacaaatttaagaccctctcaaactaacaggcttagtgatgtaattatggttagcagaggtacacttgtgaataaagagggtgggtgggtatagatgttgctaacagcaacacaaagcttttgcatattgcatactattaaacatgctgtacatactttttgggtttatttggaaaggaatgcaaagatgaaggtctgttttgtgtacttttaagactttggttattttactttttggaaaagaataaaccaagaattgattgggcacatcatttcaagaagtcccctctcctccacatttgttttgccaatttgcacattaaatgactcttccctcaaatgtgtactatggggtaaaaggggtagggtttaaagatgtagacagttgggttttttaagggccctttttcaataactggaacactctataacaaaggatacttatttaaatagatgacattgactatttttgtttttattaaaaggaagcttacatgcctaccaatatttaatcttttatgattgcctttttataactttttatattctcagcagagtgctttaccaattgaagtaaaatgtggcaggctggagttattgaagcagagtggcagtcttcagtttgcagagtaggggtctgtcttttaaactctgagtgcaaacttcagagttcttgccttggctgcagtttttttccttcaagaatgcagtactaacatttatttgagtggagttactgaacagtaacatagctgtgatttttggtatttgaaacactggttttaaatattttgacttgttgagggtatgttttatatagcaagacattatatagcagtaaaaaatggtgttttatcttctatataattcctgtttttattattaacaaaacagtcctaaatagcagccctcaattgtgaaaaaatttactttaaactacattaggttgtgaatgcaggttttatcagaactatgtttttgttcagtttatctgttcatatggataaatattggttgggatgacttggtgtctaatgtgtagtgctacacacctaacttatggggccaaaatagcatgtcctaatgcttgctgctgatttaaacacattaaaggtactttgcaggaaatccttgcaccatgggattaatatccaattgctgcttgtacactcattcattactaaaagttttgagaaatttttttttccagtaatgagcttaagaaatttgtggaaaataactcacctggcatcttacatctgaaataaggaatgatataaggtttttttttctcacagaagatgaagcacacaggaacctaatgggccaactgggatgaggtgactattctgagatgactattcagtggctaacttgggttaggaagaaaataattaggtattttctccaaatgttcactggtactctgccactttatttctctcatctgttacacaaagaaccaccaggaaagcaaatcagtttggttggtaactctgtaattcctaactatcactggtttggttctggactaaaactacattgacagattgaatttgcctaatatgatgactgtttttaatatggatctgtatgtgttctattcagcacaaggaaataaaattttagttgaggattcagcactaaaatccttgagatcacttctca

SEQ ID NO: 312346 - DNA, 2763 bp, Homo sapiens
catcagtttacacaaaccaaaagtaataattacatcttaaacatggaactcttgtgcttacagataacacttacttgtgcctggctgtgctggatggtatattctgtgtcatttttcttcatgggagaaacagcccacagagctcaccaacaagtactccaaaactaagtaagagtttaagctttgagatgcaacaagatgagctaatcgaaaagcccatgtctcctatgcagtacgcacgatctggtctgggaacagcagagatgaatggcaaactcatagctgcaggtggctataacagagaggaatgtcttcgaacagtcgaatgctataatccacatacagatcactggtcctttcttgctcccatgagaacaccaagagcccgatttcaaatggctgtactcatgggccagctctatgtggtaggtggatcaaatggccactcagatgacctgagttgtggagagatgtatgattcaaacatagatgactggattcctgttccagaattgagaactaaccgttgtaatgcaggagtgtgtgctctgaatggaaagttatacatcgttggtggctctgatccatatggtcaaaaaggactgaaaaattgtgatgtatttgatcctgtaacaaagttgtggacaagctgtgcccctcttaacattcggagacaccagtctgcagtctgtgagcttggtggttatttgtacataatcggaggtgcagaatcttggaattgtctgaacacagtagaacgatacaatcctgaaaataatacctggactttaattgcacccatgaatgtggctaggcgaggagctggagtggctgttcttaatggaaaactgtttgtatgtggtggctttgatggttctcatgccatcagttgtgtggaaatgtatgatccaactagaaatgaatggaagatgatgggaaatatgacttcaccaaggagcaatgctgggattgcaactgtagggaacaccatttatgcagtgggaggattcgatggcaatgaatttctgaatacggtggaagtctataaccttgagtcaaatgaatggagcccctatacaaagattttccagttttaacaaatttaagaccctctcaaactaacaggcttagtgatgtaattatggttagcagaggtacacttgtgaataaagagggtgggtgggtatagatgttgctaacagcaacacaaagcttttgcatattgcatactattaaacatgctgtacatactttttgggtttatttggaaaggaatgcaaagatgaaggtctgttttgtgtacttttaagactttggttattttactttttggaaaagaataaaccaagaattgattgggcacatcatttcaagaagtcccctctcctccacatttgttttgccaatttgcacattaaatgactcttccctcaaatgtgtactatggggtaaaaggggtagggtttaaagatgtagacagttgggttttttaagggccctttttcaataactggaacactctataacaaaggatacttatttaaatagatgacattgactatttttgtttttattaaaaggaagcttacatgcctaccaatatttaatcttttatgattgcctttttataactttttatattctcagcagagtgctttaccaattgaagtaaaatgtggcaggctggagttattgaagcagagtggcagtcttcagtttgcagagtaggggtctgtcttttaaactctgagtgcaaacttcagagttcttgccttggctgcagtttttttccttcaagaatgcagtactaacatttatttgagtggagttactgaacagtaacatagctgtgatttttggtatttgaaacactggttttaaatattttgacttgttgagggtatgttttatatagcaagacattatatagcagtaaaaaatggtgttttatcttctatataattcctgtttttattattaacaaaacagtcctaaatagcagccctcaattgtgaaaaaatttactttaaactacattaggttgtgaatgcaggttttatcagaactatgtttttgttcagtttatctgttcatatggataaatattggttgggatgacttggtgtctaatgtgtagtgctacacacctaacttatggggccaaaatagcatgtcctaatgcttgctgctgatttaaacacattaaaggtactttgcaggaaatccttgcaccatgggattaatatccaattgctgcttgtacactcattcattactaaaagttttgagaaatttttttttccagtaatgagcttaagaaatttgtggaaaataactcacctggcatcttacatctgaaataaggaatgatataaggtttttttttctcacagaagatgaagcacacaggaacctaatgggccaactgggatgaggtgactattctgagatgactattcagtggctaacttgggttaggaagaaaataattaggtattttctccaaatgttcactggtactctgccactttatttctctcatctgttacacaaagaaccaccaggaaagcaaatcagtttggttggtaactctgtaattcctaactatcactggtttggttctggactaaaactacattgacagattgaatttgcctaatatgatgactgtttttaatatggatctgtatgtgttctattcagcacaaggaaataaaattttagttgaggattcagcactaaaatccttgagatcacttctca

SEQ ID NO: 312347 - DNA, 3202 bp, Homo sapiens
  misc_feature (3202)..(3202): n is a, c, g, or t
cgagacggaagcgggctgggaggcgtcggcggcggcagcgcacgtggtgacgtgcgagggggtgcggcgcgagcggtcggcggcggcggaggcagtgtctcccggtcgcgcgtggaggtcggtcgctcagagctgctgggcgcagtttctccgcctgctgcttcggcgcggctgtatcggcgagcgagcgagttcccgcgagttctcggtggcgctcccccttcctttcagtctccacggactggcccctcgtccttctacttgaccgctcccgtcttccgccgccttctggcgctttccgttgggccgattcccgcccgcttcctcctgcttcccatcgaagctctagaaatgaatgtttccatctcttcagagatgaaccagattatgatgcatcattatcacagaagaaattcgtgtctatagcttttaaggacttgattacatcattttcaagcctgatagttttggaatcaccattagagcttaagacacacctgccttcatttcaaccacctgtcttcataccctgacgaagtgcaccttttaacactcctttgtccttggattacttaagagttcccagaaatacatttgccaccaacagagtagccaaatttataaggaaaaatgattcccaatggatatttgatgtttgaggatgaaaattttattgagtcttctgttgccaaattaaatgccctgaggaaaagtggccagttctgtgatgttcgacttcaggtctgtggccatgaaatgttagcacacagagcagtgctagcttgctgcagtccctatttatttgaaatctttaatagtgatagtgatcctcatggaatttctcacgttaaatttgatgatctcaatccagaagctgttgaagtcttgttgaattatgcctacactgctcagttgaaagcagataaggaattggtaaaagatgtttattctgcagcaaaaaagctgaagatggatcgagtaaagcaggtttgtggtgattatttactgtctagaatggatgttaccagctgcatctcttaccgaaattttgcaagttgtatgggagactcccgtttgttgaataaggttgatgcttatattcaggagcatttgttacaaatttctgaagaggaggagtttcttaagcttccaaggctaaagttggaggtaatgcttgaagataatgtttgcttgcccagcaatggcaaattatatacaaaggtaatcaactgggtgcagcgtagcatctgggagaatggagacagtctggaagagctgatggaagaggttcaaaccttgtactactcagctgatcacaagctgcttgatgggaacctactagatggacaggctgaggtgtttggcagtgatgatgaccacattcagtttgtgcagaaaaagccaccacgtgagaatggccataagcagataagtagcagttcaactggatgtctctcttctccaaatgctacagtacaaagccctaagcatgagtggaaaatcgttgcttcagaaaagacttcaaataacacttacttgtgcctggctgtgctggatggtatattctgtgtcatttttcttcatgggagaaacagcccacagagctcaccaacaagtactccaaaactaagtaagagtttaagctttgagatgcaacaagatgagctaatcgaaaagcccatgtctcctatgcagtacgcacgatctggtctgggaacagcagagatgaatggcaaactcatagctgcaggtggctataacagagaggaatgtcttcgaacagtcgaatgctataatccacatacagatcactggtcctttcttgctcccatgagaacaccaagagcccgatttcaaatggctgtactcatgggccagctctatgtggtaggtggatcaaatggccactcagatgacctgagttgtggagagatgtatgattcaaacatagatgactggattcctgttccagaattgagaactaaccgttgtaatgcaggagtgtgtgctctgaatggaaagttatacatcgttggtggctctgatccatatggtcaaaaaggactgaaaaattgtgatgtatttgatcctgtaacaaagttgtggacaagctgtgcccctcttaacattcggagacaccagtctgcagtctgtgagcttggtggttatttgtacataatcggaggtgcagaatcttggaattgtctgaacacagtagaacgatacaatcctgaaaataatacctggactttaattgcacccatgaatgtggctaggcgaggagctggagtggctgttcttaatggaaaactgtttgtatgtggtggctttgatggttctcatgccatcagttgtgtggaaatgtatgatccaactagaaatgaatggaagatgatgggaaatatgacttcaccaaggagcaatgctgggattgcaactgtagggaacaccatttatgcagtgggaggattcgatggcaatgaatttctgaatacggtggaagtctataaccttgagtcaaatgaatggagcccctatacaaagattttccagttttaacaaatttaagaccctctcaaactaacaggcttagtgatgtaattatggttagcagaggtacacttgtgaataaagagggtgggtgggtatagatgttgctaacagcaacacaaagcttttgcatattgcatactattaaacatgctgtacatactttttgggtttatttggaaaggaatgcaaagatgaaggtctgttttgtgtacttttaagactttggttattttactttttggaaaagaataaaccaagaattgattgggcaacaaaaaaaacaaaaataaaaaaaaaaaaaaaatttttgggggcaatgggacctcagggaaaaagcttttatagaacacatctggtgttggaggcagagggggccccagattcaagacacggtcgaacaatgggccacacacacggggtgacccaaaaagagaaagactcccgaggcgcaagaaacaacgaggcgcgagggagattactccaacacaaaataaaaaacaccgccggggagaggacaacaagcggcgggatgcgtaacacaaccaacagaggagcggaaccagaagagcgaatgaaggggggctaaacagaccaggagcacgacaggagcagccacgaaataaaaattaccgcccgacactgtgggagn

SEQ ID NO: 312348 - DNA, 2584 bp, Homo sapiens
cgagacggaagcgggctgggaggcgtcggcggcggcagcgcacgtggtgacgtgcgagggggtgcggcgcgagcggtcggcggcggcggaggcagtgtctcccggtcgcgcgtggaggtcggtcgctcagagctgctgggcgcagtttctccgcctgctgcttcggcgcggctgtatcggcgagcgagcgagttcccgcgagttctcggtggcgctcccccttcctttcagtctccacggactggcccctcgtccttctacttgaccgctcccgtcttccgccgccttctggcgctttccgttgggccgattcccgcccgcttcctcctgcttcccatcgaagctctagaaatgaatgtttccatctcttcagagatgaaccagattatgatgcatcattatcacagaagaaattcgtgtctatagcttttaaggacttgattacatcattttcaagcctgatagttttggaatcaccattagagcttaagacacacctgccttcatttcaaccacctgtcttcataccctgacgaagtgcaccttttaacactcctttgtccttggattacttaagagttcccagaaatacatttgccaccaacagagtagccaaatttataaggaaaaatgattcccaatggatatttgatgtttgaggatgaaaattttattgagtcttctgttgccaaattaaatgccctgaggaaaagtggccagttctgtgatgttcgacttcaggtctgtggccatgaaatgttagcacacagagcagtgctagcttgctgcagtccctatttatttgaaatctttaatagtgatagtgatcctcatggaatttctcacgttaaatttgatgatctcaatccagaagctgttgaagtcttgttgaattatgcctacactgctcagttgaaagcagataaggaattggtaaaagatgtttattctgcagcaaaaaagctgaagatggatcgagtaaagcaggtttgtggtgattatttactgtctagaatggatgttaccagctgcatctcttaccgaaattttgcaagttgtatgggagactcccgtttgttgaataaggttgatgcttatattcaggagcatttgttacaaatttctgaagaggaggagtttcttaagcttccaaggctaaagttggaggtaatgcttgaagataatgtttgcttgcccagcaatggcaaattatatacaaaggtaatcaactgggtgcagcgtagcatctgggagaatggagacagtctggaagagctgatggaagaggttcaaaccttgtactactcagctgatcacaagctgcttgatgggaacctactagatggacaggctgaggtgtttggcagtgatgatgaccacattcagtttgtgcagaaaaagccaccacgtgagaatggccataagcagataagtagcagttcaactggatgtctctcttctccaaatgctacagtacaaagccctaagcatgagtggaaaatcgttgcttcagaaaagacttcaaataacacttacttgtgcctggctgtgctggatggtatattctgtgtcatttttcttcatgggagaaacagcccacagagctcaccaacaagtactccaaaactaagtaagagtttaagctttgagatgcaacaagatgagctaatcgaaaagcccatgtctcctatgcagtacgcacgatctggtctgggaacagcagagatgaatggcaaactcatagctgcaggtggctataacagagaggaatgtcttcgaacagtcgaatgctataatccacatacagatcactggtcctttcttgctcccatgagaacaccaagagcccgatttcaaatggctgtactcatgggccagctctatgtggtaggtggatcaaatggccactcagatgacctgagttgtggagagatgtatgattcaaacatagatgactggattcctgttccagaattgagaactaaccgttgtaatgcaggagtgtgtgctctgaatggaaagttatacatcgttggtggctctgatccatatggtcaaaaaggactgaaaaattgtgatgtatttgatcctgtaacaaagttgtggacaagctgtgcccctcttaacattcggagacaccagtctgcagtctgtgagcttggtggttatttgtacataatcggaggtgcagaatcttggaattgtctgaacacagtagaacgatacaatcctgaaaataatacctggactttaattgcacccatgaatgtggctaggcgaggagctggagtggctgttcttaatggaaaactgtttgtatgtggtggctttgatggttctcatgccatcagttgtgtggaaatgtatgatccaactagaaatgaatggaagatgatgggaaatatgacttcaccaaggagcaatgctgggattgcaactgtagggaacaccatttatgcagtgggaggattcgatggcaatgaatttctgaatacggtggaagtataacattttttagttgtatgtttggagtcactataccccgatttttaagatgttacaaattcgcttcctcactagtctt

SEQ ID NO: 312349 - DNA, 1959 bp, Homo sapiens
cgagacggaagcgggctgggaggcgtcggcggcggcagcgcacgtggtgacgtgcgagggggtgcggcgcgagcggtcggcggcggcggaggcagtgtctcccggtcgcgcgtggaggtcggtcgctcagagctgctgggcgcagtttctccgcctgctgcttcggcgcggctgtatcggcgagcgagcgagttcccgcgagttctcggtggcgctcccccttcctttcagtctccacggactggcccctcgtccttctacttgaccgctcccgtcttccgccgccttctggcgctttccgttgggccgattcccgcccgcttcctcctgcttcccatcgaagctctagaaatgaatgtttccatctcttcagagatgaaccagattatgatgcatcattatcacagaagaaattcgtgtctatagcttttaaggacttgattacatcattttcaagcctgatagttttggaatcaccattagagcttaagacacacctgccttcatttcaaccacctgtcttcataccctgacgaagtgcaccttttaacactcctttgtccttggattacttaagagttcccagaaatacatttgccaccaacagagtagccaaatttataaggaaaaatgattcccaatggatatttgatgtttgaggatgaaaattttattgagtcttctgttgccaaattaaatgccctgaggaaaagtggccagttctgtgatgttcgacttcaggtctgtggccatgaaatgttagcacacagagcagtgctagcttgctgcagtccctatttatttgaaatctttaatagtgatagtgatcctcatggaatttctcacgttaaatttgatgatctcaatccagaagctgttgaagtcttgttgaattatgcctacactgctcagttgaaagcagataaggaattggtaaaagatgtttattctgcagcaaaaaagctgaagatggatcgagtaaagcaggtttgtggtgattatttactgtctagaatggatgttaccagctgcatctcttaccgaaattttgcaagttgtatgggagactcccgtttgttgaataaggttgatgcttatattcaggagcatttgttacaaatttctgaagaggaggagtttcttaagcttccaaggctaaagttggaggtaatgcttgaagataatgtttgcttgcccagcaatggcaaattatatacaaaggtaatcaactgggtgcagcgtagcatctgggagaatggagacagtctggaagagctgatggaagaggttcaaaccttgtactactcagctgatcacaagctgcttgatgggaacctactagatggacaggctgaggtgtttggcagtgatgatgaccacattcagtttgtgcagaaaaagccaccacgtgagaatggccataagcagataagtagcagttcaactggatgtctctcttctccaaatgctacagtacaaagccctaagcatgagtggaaaatcgttgcttcagaaaagacttcaaataacacttacttgtgcctggctgtgctggatggtatattctgtgtcatttttcttcatgggagaaacagcccacagagctcaccaacaagtactccaaaactaagtaagagtttaagctttgagatgcaacaagatgagctaatcgaaaagcccatgtctcctatgcagtacgcacgatctggtctgggaacagcagagatgaatggcaaactcatagctgcagggtacacttgtgaataaagagggtgggtgggtatagatgttgctaacagcaacacaaagcttttgcatattgcatactattaaacatgctgtacatactttttgggtttatttggaaaggaatgcaaagatgaaggtctgttttgtgtacttttaagactttggttattttactttttggaaaagaataaaccaagaattgattgggca

SEQ ID NO: 312350 - DNA, 653 bp, Homo sapiens
gcacggaggaacaggggactcactgcttttctcccctttgggcccttgagcaggcatttgactgctgcatatgaacctgggagccatggggtcttaaggctttctacttgattctcagtgtggccagaattctgtttagggcactgctccaaatctcggtgacactccatctgtaaaattgggtggcagtgtagtgtgtgtgtgtgtgtgtgtgtattttcttatacaggactggaagagaatggcggaagaaggataatgacttaaaagcgaaaacaattgaattctttgagctacagtgctgtgtcctgagagtgcagttattttccactgcagtaatgctttcaaaaacatttatctagcttctctcactttctcatttgctgtcattggtgtgaaaaatcgagttaccagaaggttcacccatgttccacaggtatgaatactgaacgttttatttagtgtctcattaacagctggcctgtggctcctccttctcggcttgactctgccctgtccagggaaatggggaatcacgcttaaggattagcagggtgcctattttcacttacagtgcttcattcctgtgttcatgttacctattccctttacaaaatatgaatgagtatctttttgtgacaggctatattcta

SEQ ID NO: 312351 - DNA, 574 bp, Homo sapiens
ccagtggccagctcagttataggaaaggacacaagccacttgtgttcctggttcccttggtgtggtttgagagctacatttttctctaaaagcagaggttgcggtgagccgagatcgcgccattgcactccagcctgcgcaacaagagcgaaactccatcttaaaaaacaaacaaacaaacaaaaacaactagagcacatgctttgtaaaaatactcagaacagaattatatacagtaaaaagtaaaagattgaaccatgcaccctcagacaccccccacacaaataccctgttactccaatctacctccccagagtaaccagagcgatttggtgtgtagatcactgtgtgtcagatctgtttctataaatatgcaaccatatgtacataaatattagctaatattagctgggcatggtagtgctctgatagccctagctactcaggaggctgagcctagtagttagaggctgcagtgaactatgattgtgccaaggtactccagcccaggtgacagagcaagacctttgtctctaaaaatcaaatcaataaagaaaaagttttaaaaatgtgg

SEQ ID NO: 312352 - DNA, 4846 bp, Homo sapiens
actgacgcgtccccggggtgccgctataacccgccgctcgcagggctgctccacagccgcgcgacgccgccgccttagaacgcctttccagtactgctagcagcagcccgaccacgcgttaccgcacgctcgcgcctttcccttgacacggcggacgccggaggattggggcggcaatttgtcttttccttttttattaaaattatttttcctgcctgttgttggatttggggaaattttttgtttgttttttatgatttgtatttgactgagagaaacccactgaagacgtctgcgtgagaatagagaccaccgaggccgactcgcgggccgctgcacccaccgccaaggacaaaaggagcccagcgctactagctgcacccgattcctcccagtgcttagcatgaagaaggccgaaatgggacgattcagtatttccccggatgaagacagcagcagctacagttccaacagcgacttcaactactcctaccccaccaagcaagctgctctgaaaagccattatgcagatgtagatcctgaaaaccagaactttttacttgaatcgaatttggggaagaagaagtatgaaacagaatttcatccaggtactacttcctttggaatgtcagtatttaatctgagcaatgcgattgtgggcagtggaatccttgggctttcttatgccatggctaatactggaattgctctttttataattctcttgacatttgtgtcaatattttccctgtattctgttcatctccttttgaagactgccaatgaaggagggtctttattatatgaacaattgggatataaggcatttggattagttggaaagcttgcagcatctggatcaattacaatgcagaacattggagctatgtcaagctacctcttcatagtgaaatatgagttgcctttggtgatccaggcattaacgaacattgaagataaaactggattgtggtatctgaacgggaactatttggttctgttggtgtcattggtggtcattcttcctttgtcgctgtttagaaatttaggatatttgggatataccagtggcctttccttgttgtgtatggtgttctttctgattgtggtcatttgcaagaaatttcaggttccgtgtcctgtggaagctgctttgataattaacgaaacaataaacaccaccttaacacagccaacagctcttgtacctgctttgtcacataacgtgactgaaaatgactcttgcagacctcactattttattttcaactcacagactgtctatgctgtgccaattctgatcttttcatttgtctgtcatcctgctgttcttcccatctatgaagaactgaaagaccgcagccgtagaagaatgatgaatgtgtccaagatttcattttttgctatgtttctcatgtatctgcttgccgccctctttggatacctaacattttacgaacatgttgagtcagaattgcttcatacctactcttctatcttgggaactgatattcttcttctcattgtccgtctggctgtgttaatggctgtgaccctgacagtaccagtagttattttcccaatccggagttctgtaactcacttgttgtgtgcatcaaaagatttcagttggtggcgtcatagtctcattacagtgtctatcttggcatttaccaatttacttgtcatctttgtcccaactattagggatatctttggttttattggtgcatctgcagcttctatgttgatttttattcttccttctgccttctatatcaagttggtgaagaaagaacctatgaaatctgtacaaaagattggggctttgttcttcctgttaagtggtgtactggtgatgaccggaagcatggccttgattgttttggattgggtacacaatgcacctggaggtggccattaattggcaccactcaaactcaaactcagtccatctgatgccagtgttgagtaaactcaactactatgaaatttcacctaatgttttcagtttcacttccttttgaagtgcagattcctcgctggttcttctgagtgcagaataagtgaacttttttgttttgttttgtttttttaagaaacttatctgtatgttagaaatggatatgaacaacaaaaccacgagtctcgggttaagggaagtgacaattttattccattccagagaatggacaaactcttaacttttatcaagccacatgcttggctgtgtcattgtttaacttggatattttatgattttacttgaatgtgcctaatggaaccatttgatgtgagaaacaattctttttaatttacagcaaaatattgaataaccattgacaaaaacactattattttttgtaccaaaaatacttaaagacctcagaagcactcttttacttttaagaaattgcttttttgaactttattcagaagcagttatcaataaattccataaaataatgtcattggtatttaaaaatgaatattaatataatgaaatggtttgcctttttgtaggcataataagccaaatacttttttacccaaaataatttttagagaaaatgatgtaatgaaaaattgtaccatgaattaggagcatagttttttccatttaaacgtcaccattacttaaaagatgattgattattgctataccaaatcagatgaactctgttcatcacttttcttctctgtccccaaacaatttggttcattcagactgaaatgtttgtgtcttcaacttattagaatggaagataatgcagatatttctgtgggaaataaaataactaattttgaggtaccaaatagtgcaattgggtaaaacagggtttattcagttgcatctgtctccagtgttgtattgacagctctgggtctttttttgggccagcccttttttgacattgcttccagcagtggaaaatgggcatttgatggcaataggccaaaattattgtgtccagagagtacactttttcaaaatgctcacctactggaagtgtgaattacttgacaatgtatggcttagttgtgttcatgttttgtctacagtagaggtctaatccacaggttacacctatgtttgatatgatataagttctctttgcgtaggccactgggtttctcatgcagtaagctttataaaaactcatttgcactggactgtcatctcattcttgtacaacgtagaattacttgtttacatccaacaaatggttagctagggaaaacagtgcaaactgagtgttagtagtcattttggtccaactgcatgtcaacccttccatttcaatcccagttagaaatgaaaataattactttgaaacttggctttaagagcacatttatcgtacgtcacagtgtatggtgaatatattattaaataatgtggtacttcgctcatcaggcataatgtctaaaatctaatatacataattccattaagtggttgaaggaagcaaataatggaattgtcaattggtcatctggctgtaaggtttgcccttgaactaaaaatgttgtttggggcaagggccagaaatgtggagacatggtttttgttacgcattcttgtattatatgtgactaaatttacaaacaagatacatgtgtaattaaagacccttatggaactggaagacgtcttgtagtgctacattgggtgaaaccgttggtccatttttgtctgtttctatgaagataaaataattgggggccatctagaaatagaaaggcagtgggaagacagattctacggcactgctttcatttaattgggctttaggcactccattcgaatgcagaacctcacctctagttgagaccaagaattggcaaatttgcatgagctcctggaaagagttgctgactttgtatctaagacctgccagggaataccaagagttgtttctacagactttttttttttttttgtatgggagaagatactgtggcaaccaggaaggaatggaaaaaaaattcttttctctacagcaaattaatgtgaggaagctcctccaatcctctggctatttaaggttcaaaatcaagtgcctagggaaaattccaatggatgattttctgggagctatcttgtctaccttgaggttcctgaacaatgaattcccattaatgagcagtcttcagtattaaaaccactgtcttgtcacctcattttgcattactgtcttccgtggatgtttcagttacaactgtaatgttatttatagaacaacattaatccattaaagctaacctatttttcaatatttatgataatctatgtacatatattgtctgtccatatgtatttgtaaataggttgtatataatgtcaggtttgggtcttgggttcaagtgtatatattcctgtaagtttcttaactgcattttgatgaattcacattatgtaactataagaattgtcccaaaagtacctgtacagaaaattgaatattgaaaaattgacaaattgtgtacaaacactaaaaaaaacttgtttaaattgtatttgcaataaacaacatcaaattttttcatgaaatcttggtacaaattcagatctcttatttaaaatttaaataaggaatacattttcaaaatgcagtaatcaaaatgtgatctagtgtaatgaaataaaatgtgatctagtgtaatggaagacctttgagaacctgggtgtattaactttgtgtatatagtgtaaatatccccactgtactgttagaggccaacaattctagtatggcttgttggcaaagagtgctacaccgtttcaatgaaacaatgtatgtttgttttaactgaactaaaataaatacatgcttaatcctga

SEQ ID NO: 312353 - DNA, 411 bp, Homo sapiens
actgacgcgtccccggggtgccgctataacccgccgctcgcagggctgctccacagccgcgcgacgccgccgccttagaacgcctttccagtactgctagcagcagcccgaccacgcgttaccgcacgctcgcgcctttcccttgacacggcggacgccggaggattggggcggcaatttgtcttttccttttttattaaaattatttttcctgcctgttgttggatttggggaaattttttgtttgttttttatgatttgtatttgactgagagaaacccactgaagacgtctgcgtgagaatagagaccaccgagaacgcgtgcgggggggcgtctgtgggaagggcgcggggcccgggcgagagtgggggaggggcttccgggaggggccgcgcgggaaggcggccgc

SEQ ID NO: 312354 - DNA, 541 bp, Homo sapiens
aaaggcttagaggatatacataatgttttctaaagttcaaaagggatatttttggctgtctttggagttaaaggtgggtcaagatgtcacaacatactctgataacctggaataagtcctggtttgggggactgagttttataattttttttatggggggggcagtttgcctgtgcattttatgaaaacgtttcctcattgaaatatttaataatatttgctaacgcatctggaaaaaaacttgttttaaaattttttagtttccagcattagaaattacatgctaaagctgtaccaaagttggtgtacaatttttctgaaagtgcttaaagataagattactggcttaacaaacaagctttgttccctgcattagtatcaagtctttgagaagcattttgtgttatgaatcagctggcagccttcccagagcaagtagtgggacaaaagttacactgttttatacccgacttctaacctgagtaaatgttcatctagcacacaaagttaaaaagttattcctatcttgaacaggggaaac

SEQ ID NO: 312355 - DNA, 301 bp, Homo sapiens
  misc_feature (1)..(1): n is a, c, g, or t
  misc_feature (71)..(71): n is a, c, g, or t
natttaaataaaggaaatacattttctacaaaatgcacgtaatacaaaaatgttggatttctaacgctggntcacaatggcacacaatcacaaaaattggctggtattccctaaaggtgtaatggaagacctttgagaacctgggtgtattaactttgtgtatatagtgtaaatatccccactgtactgttagaggccaacaattctagtatggcttgttggcaaagagtgctacaccgtttcaatgaaacaatgtatgtttgttttaactgaactaaaataaatacatgcttaatcctga

SEQ ID NO: 312356 - DNA, 4720 bp, Homo sapiens
caactctcaggatcccccctacagcgccttgccggaggattggggcggcaatttgtcttttccttttttattaaaattatttttcctgcctgttgttggatttggggaaattttttgtttgttttttatgatttgtatttgactgagagaaacccactgaagacgtctgcgtgagaatagagaccaccgaggccgactcgcgggccgctgcacccaccgccaaggacaaaaggagcccagcgctactagctgcacccgattcctcccagtgcttagcatgaagaaggccgaaatgggacgattcagtatttccccggatgaagacagcagcagctacagttccaacagcgacttcaactactcctaccccaccaagcaagctgctctgaaaagccattatgcagatgtagatcctgaaaaccagaactttttacttgaatcgaatttggggaagaagaagtatgaaacagaatttcatccaggtactacttcctttggaatgtcagtatttaatctgagcaatgcgattgtgggcagtggaatccttgggctttcttatgccatggctaatactggaattgctctttttataattctcttgacatttgtgtcaatattttccctgtattctgttcatctccttttgaagactgccaatgaaggagggtctttattatatgaacaattgggatataaggcatttggattagttggaaagcttgcagcatctggatcaattacaatgcagaacattggagctatgtcaagctacctcttcatagtgaaatatgagttgcctttggtgatccaggcattaacgaacattgaagataaaactggattgtggtatctgaacgggaactatttggttctgttggtgtcattggtggtcattcttcctttgtcgctgtttagaaatttaggatatttgggatataccagtggcctttccttgttgtgtatggtgttctttctgattgtggtcatttgcaagaaatttcaggttccgtgtcctgtggaagctgctttgataattaacgaaacaataaacaccaccttaacacagccaacagctcttgtacctgctttgtcacataacgtgactgaaaatgactcttgcagacctcactattttattttcaactcacagactgtctatgctgtgccaattctgatcttttcatttgtctgtcatcctgctgttcttcccatctatgaagaactgaaagaccgcagccgtagaagaatgatgaatgtgtccaagatttcattttttgctatgtttctcatgtatctgcttgccgccctctttggatacctaacattttacgaacatgttgagtcagaattgcttcatacctactcttctatcttgggaactgatattcttcttctcattgtccgtctggctgtgttaatggctgtgaccctgacagtaccagtagttattttcccaatccggagttctgtaactcacttgttgtgtgcatcaaaagatttcagttggtggcgtcatagtctcattacagtgtctatcttggcatttaccaatttacttgtcatctttgtcccaactattagggatatctttggttttattggtgcatctgcagcttctatgttgatttttattcttccttctgccttctatatcaagttggtgaagaaagaacctatgaaatctgtacaaaagattggggctttgttcttcctgttaagtggtgtactggtgatgaccggaagcatggccttgattgttttggattgggtacacaatgcacctggaggtggccattaattggcaccactcaaactcaaactcagtccatctgatgccagtgttgagtaaactcaactactatgaaatttcacctaatgttttcagtttcacttccttttgaagtgcagattcctcgctggttcttctgagtgcagaataagtgaacttttttgttttgttttgtttttttaagaaacttatctgtatgttagaaatggatatgaacaacaaaaccacgagtctcgggttaagggaagtgacaattttattccattccagagaatggacaaactcttaacttttatcaagccacatgcttggctgtgtcattgtttaacttggatattttatgattttacttgaatgtgcctaatggaaccatttgatgtgagaaacaattctttttaatttacagcaaaatattgaataaccattgacaaaaacactattattttttgtaccaaaaatacttaaagacctcagaagcactcttttacttttaagaaattgcttttttgaactttattcagaagcagttatcaataaattccataaaataatgtcattggtatttaaaaatgaatattaatataatgaaatggtttgcctttttgtaggcataataagccaaatacttttttacccaaaataatttttagagaaaatgatgtaatgaaaaattgtaccatgaattaggagcatagttttttccatttaaacgtcaccattacttaaaagatgattgattattgctataccaaatcagatgaactctgttcatcacttttcttctctgtccccaaacaatttggttcattcagactgaaatgtttgtgtcttcaacttattagaatggaagataatgcagatatttctgtgggaaataaaataactaattttgaggtaccaaatagtgcaattgggtaaaacagggtttattcagttgcatctgtctccagtgttgtattgacagctctgggtctttttttgggccagcccttttttgacattgcttccagcagtggaaaatgggcatttgatggcaataggccaaaattattgtgtccagagagtacactttttcaaaatgctcacctactggaagtgtgaattacttgacaatgtatggcttagttgtgttcatgttttgtctacagtagaggtctaatccacaggttacacctatgtttgatatgatataagttctctttgcgtaggccactgggtttctcatgcagtaagctttataaaaactcatttgcactggactgtcatctcattcttgtacaacgtagaattacttgtttacatccaacaaatggttagctagggaaaacagtgcaaactgagtgttagtagtcattttggtccaactgcatgtcaacccttccatttcaatcccagttagaaatgaaaataattactttgaaacttggctttaagagcacatttatcgtacgtcacagtgtatggtgaatatattattaaataatgtggtacttcgctcatcaggcataatgtctaaaatctaatatacataattccattaagtggttgaaggaagcaaataatggaattgtcaattggtcatctggctgtaaggtttgcccttgaactaaaaatgttgtttggggcaagggccagaaatgtggagacatggtttttgttacgcattcttgtattatatgtgactaaatttacaaacaagatacatgtgtaattaaagacccttatggaactggaagacgtcttgtagtgctacattgggtgaaaccgttggtccatttttgtctgtttctatgaagataaaataattgggggccatctagaaatagaaaggcagtgggaagacagattctacggcactgctttcatttaattgggctttaggcactccattcgaatgcagaacctcacctctagttgagaccaagaattggcaaatttgcatgagctcctggaaagagttgctgactttgtatctaagacctgccagggaataccaagagttgtttctacagactttttttttttttttgtatgggagaagatactgtggcaaccaggaaggaatggaaaaaaaattcttttctctacagcaaattaatgtgaggaagctcctccaatcctctggctatttaaggttcaaaatcaagtgcctagggaaaattccaatggatgattttctgggagctatcttgtctaccttgaggttcctgaacaatgaattcccattaatgagcagtcttcagtattaaaaccactgtcttgtcacctcattttgcattactgtcttccgtggatgtttcagttacaactgtaatgttatttatagaacaacattaatccattaaagctaacctatttttcaatatttatgataatctatgtacatatattgtctgtccatatgtatttgtaaataggttgtatataatgtcaggtttgggtcttgggttcaagtgtatatattcctgtaagtttcttaactgcattttgatgaattcacattatgtaactataagaattgtcccaaaagtacctgtacagaaaattgaatattgaaaaattgacaaattgtgtacaaacactaaaaaaaacttgtttaaattgtatttgcaataaacaacatcaaattttttcatgaaatcttggtacaaattcagatctcttatttaaaatttaaataaggaatacattttcaaaatgcagtaatcaaaatgtgatctagtgtaatgaaataaaatgtgatctagtgtaatggaagacctttgagaacctgggtgtattaactttgtgtatatagtgtaaatatccccactgtactgttagaggccaacaattctagtatggcttgttggcaaagagtgctacaccgtttcaatgaaacaatgtatgtttgttttaactgaactaaaataaatacatgcttaatcctga

SEQ ID NO: 312357 - DNA, 4792 bp, Homo sapiens
actgacgcgtccccggggtgccgctataacccgccgctcgcagggctgctccacagccgcgcgacgccgccgccttagaacgcctttccagtactgctagcagcagcccgaccacgcgttaccgcacgctcgcgcctttcccttgacacggcggacgccggaggattggggcggcaatttgtcttttccttttttatttatgatttgtatttgactgagagaaacccactgaagacgtctgcgtgagaatagagaccaccgaggccgactcgcgggccgctgcacccaccgccaaggacaaaaggagcccagcgctactagctgcacccgattcctcccagtgcttagcatgaagaaggccgaaatgggacgattcagtatttccccggatgaagacagcagcagctacagttccaacagcgacttcaactactcctaccccaccaagcaagctgctctgaaaagccattatgcagatgtagatcctgaaaaccagaactttttacttgaatcgaatttggggaagaagaagtatgaaacagaatttcatccaggtactacttcctttggaatgtcagtatttaatctgagcaatgcgattgtgggcagtggaatccttgggctttcttatgccatggctaatactggaattgctctttttataattctcttgacatttgtgtcaatattttccctgtattctgttcatctccttttgaagactgccaatgaaggagggtctttattatatgaacaattgggatataaggcatttggattagttggaaagcttgcagcatctggatcaattacaatgcagaacattggagctatgtcaagctacctcttcatagtgaaatatgagttgcctttggtgatccaggcattaacgaacattgaagataaaactggattgtggtatctgaacgggaactatttggttctgttggtgtcattggtggtcattcttcctttgtcgctgtttagaaatttaggatatttgggatataccagtggcctttccttgttgtgtatggtgttctttctgattgtggtcatttgcaagaaatttcaggttccgtgtcctgtggaagctgctttgataattaacgaaacaataaacaccaccttaacacagccaacagctcttgtacctgctttgtcacataacgtgactgaaaatgactcttgcagacctcactattttattttcaactcacagactgtctatgctgtgccaattctgatcttttcatttgtctgtcatcctgctgttcttcccatctatgaagaactgaaagaccgcagccgtagaagaatgatgaatgtgtccaagatttcattttttgctatgtttctcatgtatctgcttgccgccctctttggatacctaacattttacgaacatgttgagtcagaattgcttcatacctactcttctatcttgggaactgatattcttcttctcattgtccgtctggctgtgttaatggctgtgaccctgacagtaccagtagttattttcccaatccggagttctgtaactcacttgttgtgtgcatcaaaagatttcagttggtggcgtcatagtctcattacagtgtctatcttggcatttaccaatttacttgtcatctttgtcccaactattagggatatctttggttttattggtgcatctgcagcttctatgttgatttttattcttccttctgccttctatatcaagttggtgaagaaagaacctatgaaatctgtacaaaagattggggctttgttcttcctgttaagtggtgtactggtgatgaccggaagcatggccttgattgttttggattgggtacacaatgcacctggaggtggccattaattggcaccactcaaactcaaactcagtccatctgatgccagtgttgagtaaactcaactactatgaaatttcacctaatgttttcagtttcacttccttttgaagtgcagattcctcgctggttcttctgagtgcagaataagtgaacttttttgttttgttttgtttttttaagaaacttatctgtatgttagaaatggatatgaacaacaaaaccacgagtctcgggttaagggaagtgacaattttattccattccagagaatggacaaactcttaacttttatcaagccacatgcttggctgtgtcattgtttaacttggatattttatgattttacttgaatgtgcctaatggaaccatttgatgtgagaaacaattctttttaatttacagcaaaatattgaataaccattgacaaaaacactattattttttgtaccaaaaatacttaaagacctcagaagcactcttttacttttaagaaattgcttttttgaactttattcagaagcagttatcaataaattccataaaataatgtcattggtatttaaaaatgaatattaatataatgaaatggtttgcctttttgtaggcataataagccaaatacttttttacccaaaataatttttagagaaaatgatgtaatgaaaaattgtaccatgaattaggagcatagttttttccatttaaacgtcaccattacttaaaagatgattgattattgctataccaaatcagatgaactctgttcatcacttttcttctctgtccccaaacaatttggttcattcagactgaaatgtttgtgtcttcaacttattagaatggaagataatgcagatatttctgtgggaaataaaataactaattttgaggtaccaaatagtgcaattgggtaaaacagggtttattcagttgcatctgtctccagtgttgtattgacagctctgggtctttttttgggccagcccttttttgacattgcttccagcagtggaaaatgggcatttgatggcaataggccaaaattattgtgtccagagagtacactttttcaaaatgctcacctactggaagtgtgaattacttgacaatgtatggcttagttgtgttcatgttttgtctacagtagaggtctaatccacaggttacacctatgtttgatatgatataagttctctttgcgtaggccactgggtttctcatgcagtaagctttataaaaactcatttgcactggactgtcatctcattcttgtacaacgtagaattacttgtttacatccaacaaatggttagctagggaaaacagtgcaaactgagtgttagtagtcattttggtccaactgcatgtcaacccttccatttcaatcccagttagaaatgaaaataattactttgaaacttggctttaagagcacatttatcgtacgtcacagtgtatggtgaatatattattaaataatgtggtacttcgctcatcaggcataatgtctaaaatctaatatacataattccattaagtggttgaaggaagcaaataatggaattgtcaattggtcatctggctgtaaggtttgcccttgaactaaaaatgttgtttggggcaagggccagaaatgtggagacatggtttttgttacgcattcttgtattatatgtgactaaatttacaaacaagatacatgtgtaattaaagacccttatggaactggaagacgtcttgtagtgctacattgggtgaaaccgttggtccatttttgtctgtttctatgaagataaaataattgggggccatctagaaatagaaaggcagtgggaagacagattctacggcactgctttcatttaattgggctttaggcactccattcgaatgcagaacctcacctctagttgagaccaagaattggcaaatttgcatgagctcctggaaagagttgctgactttgtatctaagacctgccagggaataccaagagttgtttctacagactttttttttttttttgtatgggagaagatactgtggcaaccaggaaggaatggaaaaaaaattcttttctctacagcaaattaatgtgaggaagctcctccaatcctctggctatttaaggttcaaaatcaagtgcctagggaaaattccaatggatgattttctgggagctatcttgtctaccttgaggttcctgaacaatgaattcccattaatgagcagtcttcagtattaaaaccactgtcttgtcacctcattttgcattactgtcttccgtggatgtttcagttacaactgtaatgttatttatagaacaacattaatccattaaagctaacctatttttcaatatttatgataatctatgtacatatattgtctgtccatatgtatttgtaaataggttgtatataatgtcaggtttgggtcttgggttcaagtgtatatattcctgtaagtttcttaactgcattttgatgaattcacattatgtaactataagaattgtcccaaaagtacctgtacagaaaattgaatattgaaaaattgacaaattgtgtacaaacactaaaaaaaacttgtttaaattgtatttgcaataaacaacatcaaattttttcatgaaatcttggtacaaattcagatctcttatttaaaatttaaataaggaatacattttcaaaatgcagtaatcaaaatgtgatctagtgtaatgaaataaaatgtgatctagtgtaatggaagacctttgagaacctgggtgtattaactttgtgtatatagtgtaaatatccccactgtactgttagaggccaacaattctagtatggcttgttggcaaagagtgctacaccgtttcaatgaaacaatgtatgtttgttttaactgaactaaaataaatacatgcttaatcctga

SEQ ID NO: 312358 - DNA, 5165 bp, Homo sapiens
actgacgcgtccccggggtgccgctataacccgccgctcgcagggctgctccacagccgcgcgacgccgccgccttagaacgcctttccagtactgctagcagcagcccgaccacgcgttaccgcacgctcgcgcctttcccttgacacggcggacgccggaggattggggcggcaatttgtcttttccttttttattaaaattatttttcctgcctgttgttggatttggggaaattttttgtttgttttttatgatttgtatttgactgagagaaacccactgaagacgtctgcgtgagaatagagaccaccgaggccgactcgcgggccgctgcacccaccgccaaggacaaaaggagcccagcgctactagctgcacccgattcctcccagtgcttagcatgaagaaggccgaaatgggacgattcagtatttccccggatgaagacagcagcagctacagttccaacagcgacttcaactactcctaccccaccaagcaagctgctctgaaaagccattatgcagatgtagatcctgaaaaccagaactttttacttgaatcgaatttggggaagaagaagtatgaaacagaatttaattctcttgacatttgtgtcaatattttccctgtattctgttcatctccttttgaagactgccaatgaaggagggtctttattatatgaacaattgggatataaggcatttggattagttggaaagcttgcagcatctggatcaattacaatgcagaacattggagctatgtcaagctacctcttcatagtgaaatatgagttgcctttggtgatccaggcattaacgaacattgaagataaaactggattgtggtatctgaacgggaactatttggttctgttggtgtcattggtggtcattcttcctttgtcgctgtttagaaatttaggatatttgggatataccagtggcctttccttgttgtgtatggtgttctttctgattgtggtcatttgcaagaaatttcaggttccgtgtcctgtggaagctgctttgataattaacgaaacaataaacaccaccttaacacagccaacagctcttgtacctgctttgtcacataacgtgactgaaaatgactcttgcagacctcactattttattttcaactcacagactgtctatgctgtgccaattctgatcttttcatttgtctgtcatcctgctgttcttcccatctatgaagaactgaaagaccgcagccgtagaagaatgatgaatgtgtccaagatttcattttttgctatgtttctcatgtatctgcttgccgccctctttggatacctaacattttacgaacatgttgagtcagaattgcttcatacctactcttctatcttgggaactgatattcttcttctcattgtccgtctggctgtgttaatggctgtgaccctgacagtaccagtagttattttcccaatccggagttctgtaactcacttgttgtgtgcatcaaaagatttcagttggtggcgtcatagtctcattacagtgtctatcttggcatttaccaatttacttgtcatctttgtcccaactattagggatatctttggttttattggtgcatctgcagcttctatgttgatttttattcttccttctgccttctatatcaagttggtgaagaaagaacctatgaaatctgtacaaaagattggggctttgttcttcctgttaagtggtgtactggtgatgaccggaagcatggccttgattgttttggattgggtacacaatgcacctggaggtggccattaattggcaccactcaaactcaaactcagtccatctgatgccagtgttgagtaaactcaactactatgaaatttcacctaatgttttcagtttcacttccttttgaagtgcagattcctcgctggttcttctgagtgcagaataagtgaacttttttgttttgttttgtttttttaagaaacttatctgtatgttagaaatggatatgaacaacaaaaccacgagtctcgggttaagggaagtgacaattttattccattccagagaatggacaaactcttaacttttatcaagccacatgcttggctgtgtcattgtttaacttggatattttatgattttacttgaatgtgcctaatggaaccatttgatgtgagaaacaattctttttaatttacagcaaaatattgaataaccattgacaaaaacactattattttttgtaccaaaaatacttaaagacctcagaagcactcttttacttttaagaaattgcttttttgaactttattcagaagcagttatcaataaattccataaaataatgtcattggtatttaaaaatgaatattaatataatgaaatggtttgcctttttgtaggcataataagccaaatacttttttacccaaaataatttttagagaaaatgatgtaatgaaaaattgtaccatgaattaggagcatagttttttccatttaaacgtcaccattacttaaaagatgattgattattgctataccaaatcagatgaactctgttcatcacttttcttctctgtccccaaacaatttggttcattcagactgaaatgtttgtgtcttcaacttattagaatggaagataatgcagatatttctgtgggaaataaaataactaattttgaggtaccaaatagtgcaattgggtaaaacagggtttattcagttgcatctgtctccagtgttgtattgacagctctgggtctttttttgggccagcccttttttgacattgcttccagcagtggaaaatgggcatttgatggcaataggccaaaattattgtgtccagagagtacactttttcaaaatgctcacctactggaagtgtgaattacttgacaatgtatggcttagttgtgttcatgttttgtctacagtagaggtctaatccacaggttacacctatgtttgatatgatataagttctctttgcgtaggccactgggtttctcatgcagtaagctttataaaaactcatttgcactggactgtcatctcattcttgtacaacgtagaattacttgtttacatccaacaaatggttagctagggaaaacagtgcaaactgagtgttagtagtcattttggtccaactgcatgtcaacccttccatttcaatcccagttagaaatgaaaataattactttgaaacttggctttaagagcacatttatcgtacgtcacagtgtatggtgaatatattattaaataatgtggtacttcgctcatcaggcataatgtctaaaatctaatatacataattccattaagtggttgaaggaagcaaataatggaattgtcaattggtcatctggctgtaaggtttgcccttgaactaaaaatgttgtttggggcaagggccagaaatgtggagacatggtttttgttacgcattcttgtattatatgtgactaaatttacaaacaagatacatgtgtaattaaagacccttatggaactggaagacgtcttgtagtgctacattgggtgaaaccgttggtccatttttgtctgtttctatgaagataaaataattgggggccatctagaaatagaaaggcagtgggaagacagattctacggcactgctttcatttaattgggctttaggcactccattcgaatgcagaacctcacctctagttgagaccaagaattggcaaatttgcatgagctcctggaaagagttgctgactttgtatctaagacctgccagggaataccaagagttgtttctacagactttttttttttttttgtatgggagaagatactgtggcaaccaggaaggaatggaaaaaaaattcttttctctacagcaaattaatgtgaggaagctcctccaatcctctggctatttaaggttcaaaatcaagtgcctagggaaaattccaatggatgattttctgggagctatcttgtctaccttgaggttcctgaacaatgaattcccattaatgagcagtcttcagtattaaaaccactgtcttgtcacctcattttgcattactgtcttccgtggatgtttcagttacaactgtaatgttatttatagaacaacattaatccattaaagctaacctatttttcaatatttatgataatctatgtacatatattgtctgtccatatgtatttgtaaataggttgtatataatgtcaggtttgggtcttgggttcaagtgtatatattcctgtaagtttcttaactgcattttgatgaattcacattatgtaactataagaattgtcccaaaagtacctgtacagaaaattgaatattgaaaaattgacaaattgtgtacaaacactaaaaaaaacttgtttaaattgtatttgcaataaacaacatcaaattttttcatgaaatcttggtacaaattcagatctcttatttaaaatttaaataaggaatacattttcaaaatgcagtaatcaaaatgtgatctagtgtaatgaaataaaatgtgatctagtgtaatggaagacctttgagaacctgggtgtattaactttgtgtatatagtgtaaatatccccactgtactgttagaggccaacaattctagtatggcttgttggcaaagagtgctacaccgtttcaatgaaacaatgtatgtttgttttaactgaactaaaataaatacatgcttaatcctgaaaaaaaaaaacaaaaaaaaaaaaaacaacaaaaaacacaaaaaacaaaaaaagaagaaaaaacgacaaaaaaagatgtgggcggcgcgcgcaccggcgggccccaggagaaagtctctttgaaagacacacggcgggggagggcggcggggcccacagtagggcagagtaaacatcggggaccaaacgagggtgtccaccacgaagaaacaaccgggggggtgaacacaacagacaggggggggggggagtttctccacacaaaaaaaaaaaaaacgacgcggcggggagagaaaacaaagagcgcggcttttgaggaaaaaacaccgcaccaagaaggagggatcatcagcaagagggagacaacaaggggggggactaacatacagaggcgagagtcaaagagaagagacgcaagaaaaaaataaaatagccg

SEQ ID NO: 312359 - DNA, 5166 bp, Homo sapiens
actgacgcgtccccggggtgccgctataacccgccgctcgcagggctgctccacagccgcgcgacgccgccgccttagaacgcctttccagtactgctagcagcagcccgaccacgcgttaccgcacgctcgcgcctttcccttgacacggcggacgccggaggattggggcggcaatttgtcttttccttttttattaaaattatttttcctgcctgttgttggatttggggaaattttttgtttgttttttatgatttgtatttgactgagagaaacccactgaagacgtctgcgtgagaatagagaccaccgaggccgactcgcgggccgctgcacccaccgccaaggacaaaaggagcccagcgctactagctgcacccgattcctcccagtgcttagcatgaagaaggccgaaatgggacgattcagtatttccccggatgaagacagcagcagctacagttccaacagcgacttcaactactcctaccccaccaagcaagctgctctgaaaaggtgggagaagttgtgacacttttgaaaaaacggcttgcatgggttgggttcagggagttacctaggactctgcttccattgctttaatttgctatagcatttagagaaggtgcgtaatctctgaaagagtatccgattatcttgttgtaatgacaagatagctggtgtgaaagtcaactcctagttaatatttatacattaagtaaagatgttgtatcagagctatgctgttggagggtattttatgttaaagcagtcttgtgtgtaatgatagatatttcaatccagtttacaattatatatgtctatattttttgcagccattatgcagatgtagatcctgaaaaccagaactttttacttgaatcgaatttggggaagaagaagtatgaaacagaatttcatccaggtactacttcctttggaatgtcagtatttaatctgagcaatgcgattgtgggcagtggaatccttgggctttcttatgccatggctaatactggaattgctctttttataattctcttgacatttgtgtcaatattttccctgtattctgttcatctccttttgaagactgccaatgaaggagggtctttattatatgaacaattgggatataaggcatttggattagttggaaagcttgcagcatctggatcaattacaatgcagaacattggagctatgtcaagctacctcttcatagtgaaatatgagttgcctttggtgatccaggcattaacgaacattgaagataaaactggattgtggtatctgaacgggaactatttggttctgttggtgtcattggtggtcattcttcctttgtcgctgtttagaaatttaggatatttgggatataccagtggcctttccttgttgtgtatggtgttctttctgattgtggtcatttgcaagaaatttcaggttccgtgtcctgtggaagctgctttgataattaacgaaacaataaacaccaccttaacacagccaacagctcttgtacctgctttgtcacataacgtgactgaaaatgactcttgcagacctcactattttattttcaactcacagactgtctatgctgtgccaattctgatcttttcatttgtctgtcatcctgctgttcttcccatctatgaagaactgaaagaccgcagccgtagaagaatgatgaatgtgtccaagatttcattttttgctatgtttctcatgtatctgcttgccgccctctttggatacctaacattttacgaacatgttgagtcagaattgcttcatacctactcttctatcttgggaactgatattcttcttctcattgtccgtctggctgtgttaatggctgtgaccctgacagtaccagtagttattttcccaatccggagttctgtaactcacttgttgtgtgcatcaaaagatttcagttggtggcgtcatagtctcattacagtgtctatcttggcatttaccaatttacttgtcatctttgtcccaactattagggatatctttggttttattggtgcatctgcagcttctatgttgatttttattcttccttctgccttctatatcaagttggtgaagaaagaacctatgaaatctgtacaaaagattggggctttgttcttcctgttaagtggtgtactggtgatgaccggaagcatggccttgattgttttggattgggtacacaatgcacctggaggtggccattaattggcaccactcaaactcaaactcagtccatctgatgccagtgttgagtaaactcaactactatgaaatttcacctaatgttttcagtttcacttccttttgaagtgcagattcctcgctggttcttctgagtgcagaataagtgaacttttttgttttgttttgtttttttaagaaacttatctgtatgttagaaatggatatgaacaacaaaaccacgagtctcgggttaagggaagtgacaattttattccattccagagaatggacaaactcttaacttttatcaagccacatgcttggctgtgtcattgtttaacttggatattttatgattttacttgaatgtgcctaatggaaccatttgatgtgagaaacaattctttttaatttacagcaaaatattgaataaccattgacaaaaacactattattttttgtaccaaaaatacttaaagacctcagaagcactcttttacttttaagaaattgcttttttgaactttattcagaagcagttatcaataaattccataaaataatgtcattggtatttaaaaatgaatattaatataatgaaatggtttgcctttttgtaggcataataagccaaatacttttttacccaaaataatttttagagaaaatgatgtaatgaaaaattgtaccatgaattaggagcatagttttttccatttaaacgtcaccattacttaaaagatgattgattattgctataccaaatcagatgaactctgttcatcacttttcttctctgtccccaaacaatttggttcattcagactgaaatgtttgtgtcttcaacttattagaatggaagataatgcagatatttctgtgggaaataaaataactaattttgaggtaccaaatagtgcaattgggtaaaacagggtttattcagttgcatctgtctccagtgttgtattgacagctctgggtctttttttgggccagcccttttttgacattgcttccagcagtggaaaatgggcatttgatggcaataggccaaaattattgtgtccagagagtacactttttcaaaatgctcacctactggaagtgtgaattacttgacaatgtatggcttagttgtgttcatgttttgtctacagtagaggtctaatccacaggttacacctatgtttgatatgatataagttctctttgcgtaggccactgggtttctcatgcagtaagctttataaaaactcatttgcactggactgtcatctcattcttgtacaacgtagaattacttgtttacatccaacaaatggttagctagggaaaacagtgcaaactgagtgttagtagtcattttggtccaactgcatgtcaacccttccatttcaatcccagttagaaatgaaaataattactttgaaacttggctttaagagcacatttatcgtacgtcacagtgtatggtgaatatattattaaataatgtggtacttcgctcatcaggcataatgtctaaaatctaatatacataattccattaagtggttgaaggaagcaaataatggaattgtcaattggtcatctggctgtaaggtttgcccttgaactaaaaatgttgtttggggcaagggccagaaatgtggagacatggtttttgttacgcattcttgtattatatgtgactaaatttacaaacaagatacatgtgtaattaaagacccttatggaactggaagacgtcttgtagtgctacattgggtgaaaccgttggtccatttttgtctgtttctatgaagataaaataattgggggccatctagaaatagaaaggcagtgggaagacagattctacggcactgctttcatttaattgggctttaggcactccattcgaatgcagaacctcacctctagttgagaccaagaattggcaaatttgcatgagctcctggaaagagttgctgactttgtatctaagacctgccagggaataccaagagttgtttctacagactttttttttttttttgtatgggagaagatactgtggcaaccaggaaggaatggaaaaaaaattcttttctctacagcaaattaatgtgaggaagctcctccaatcctctggctatttaaggttcaaaatcaagtgcctagggaaaattccaatggatgattttctgggagctatcttgtctaccttgaggttcctgaacaatgaattcccattaatgagcagtcttcagtattaaaaccactgtcttgtcacctcattttgcattactgtcttccgtggatgtttcagttacaactgtaatgttatttatagaacaacattaatccattaaagctaacctatttttcaatatttatgataatctatgtacatatattgtctgtccatatgtatttgtaaataggttgtatataatgtcaggtttgggtcttgggttcaagtgtatatattcctgtaagtttcttaactgcattttgatgaattcacattatgtaactataagaattgtcccaaaagtacctgtacagaaaattgaatattgaaaaattgacaaattgtgtacaaacactaaaaaaaacttgtttaaattgtatttgcaataaacaacatcaaattttttcatgaaatcttggtacaaattcagatctcttatttaaaatttaaataaggaatacattttcaaaatgcagtaatcaaaatgtgatctagtgtaatgaaataaaatgtgatctagtgtaatggaagacctttgagaacctgggtgtattaactttgtgtatatagtgtaaatatccccactgtactgttagaggccaacaattctagtatggcttgttggcaaagagtgctacaccgtttcaatgaaacaatgtatgtttgttttaactgaactaaaataaatacatgcttaatcctga

SEQ ID NO: 312360 - DNA, 4733 bp, Homo sapiens
tccaagctgatctcgaactcctggcctcaagcagtcatcctgccccagcctcctagagtgctgggattacaggcatgagccactgcacctggcctgtcattcctgtttttgtgtatacggtccatgtggtcttaaaacctttcctgaacgtgtctcagttgaatttcccaagaaccttgtgggctgggtttagtggcggatattactaatattttacagataaggggaactactgaaatgcagaaaggtggcaagcatacagctcattattgtggtgccagaatcaaaatacaagtttcaaactccatcactgggaagttgagctttccagtgtctcatgctatgtttggctcagtgggtagacatccttgttcctaaccaatgctgtagaactatcacctgagaaatgatgcaagtttttactgccagccaagagacagtgttgccattccagttagtaggagaggaaatgccagttcttcagggcattttgacacaaataggacaagttgcacacataatgttatttaaacatccagaaagagttgtctttaaatatagccatgcttatttataaccctatgccttttccttctctcatcagaattctcttgacatttgtgtcaatattttccctgtattctgttcatctccttttgaagactgccaatgaaggagggtctttattatatgaacaattgggatataaggcatttggattagttggaaagcttgcagcatctggatcaattacaatgcagaacattggagctatgtcaagctacctcttcatagtgaaatatgagttgcctttggtgatccaggcattaacgaacattgaagataaaactggattgtggtatctgaacgggaactatttggttctgttggtgtcattggtggtcattcttcctttgtcgctgtttagaaatttaggatatttgggatataccagtggcctttccttgttgtgtatggtgttctttctgattgtggtcatttgcaagaaatttcaggttccgtgtcctgtggaagctgctttgataattaacgaaacaataaacaccaccttaacacagccaacagctcttgtacctgctttgtcacataacgtgactgaaaatgactcttgcagacctcactattttattttcaactcacagactgtctatgctgtgccaattctgatcttttcatttgtctgtcatcctgctgttcttcccatctatgaagaactgaaagaccgcagccgtagaagaatgatgaatgtgtccaagatttcattttttgctatgtttctcatgtatctgcttgccgccctctttggatacctaacattttacgaacatgttgagtcagaattgcttcatacctactcttctatcttgggaactgatattcttcttctcattgtccgtctggctgtgttaatggctgtgaccctgacagtaccagtagttattttcccaatccggagttctgtaactcacttgttgtgtgcatcaaaagatttcagttggtggcgtcatagtctcattacagtgtctatcttggcatttaccaatttacttgtcatctttgtcccaactattagggatatctttggttttattggtgcatctgcagcttctatgttgatttttattcttccttctgccttctatatcaagttggtgaagaaagaacctatgaaatctgtacaaaagattggggctttgttcttcctgttaagtggtgtactggtgatgaccggaagcatggccttgattgttttggattgggtacacaatgcacctggaggtggccattaattggcaccactcaaactcaaactcagtccatctgatgccagtgttgagtaaactcaactactatgaaatttcacctaatgttttcagtttcacttccttttgaagtgcagattcctcgctggttcttctgagtgcagaataagtgaacttttttgttttgttttgtttttttaagaaacttatctgtatgttagaaatggatatgaacaacaaaaccacgagtctcgggttaagggaagtgacaattttattccattccagagaatggacaaactcttaacttttatcaagccacatgcttggctgtgtcattgtttaacttggatattttatgattttacttgaatgtgcctaatggaaccatttgatgtgagaaacaattctttttaatttacagcaaaatattgaataaccattgacaaaaacactattattttttgtaccaaaaatacttaaagacctcagaagcactcttttacttttaagaaattgcttttttgaactttattcagaagcagttatcaataaattccataaaataatgtcattggtatttaaaaatgaatattaatataatgaaatggtttgcctttttgtaggcataataagccaaatacttttttacccaaaataatttttagagaaaatgatgtaatgaaaaattgtaccatgaattaggagcatagttttttccatttaaacgtcaccattacttaaaagatgattgattattgctataccaaatcagatgaactctgttcatcacttttcttctctgtccccaaacaatttggttcattcagactgaaatgtttgtgtcttcaacttattagaatggaagataatgcagatatttctgtgggaaataaaataactaattttgaggtaccaaatagtgcaattgggtaaaacagggtttattcagttgcatctgtctccagtgttgtattgacagctctgggtctttttttgggccagcccttttttgacattgcttccagcagtggaaaatgggcatttgatggcaataggccaaaattattgtgtccagagagtacactttttcaaaatgctcacctactggaagtgtgaattacttgacaatgtatggcttagttgtgttcatgttttgtctacagtagaggtctaatccacaggttacacctatgtttgatatgatataagttctctttgcgtaggccactgggtttctcatgcagtaagctttataaaaactcatttgcactggactgtcatctcattcttgtacaacgtagaattacttgtttacatccaacaaatggttagctagggaaaacagtgcaaactgagtgttagtagtcattttggtccaactgcatgtcaacccttccatttcaatcccagttagaaatgaaaataattactttgaaacttggctttaagagcacatttatcgtacgtcacagtgtatggtgaatatattattaaataatgtggtacttcgctcatcaggcataatgtctaaaatctaatatacataattccattaagtggttgaaggaagcaaataatggaattgtcaattggtcatctggctgtaaggtttgcccttgaactaaaaatgttgtttggggcaagggccagaaatgtggagacatggtttttgttacgcattcttgtattatatgtgactaaatttacaaacaagatacatgtgtaattaaagacccttatggaactggaagacgtcttgtagtgctacattgggtgaaaccgttggtccatttttgtctgtttctatgaagataaaataattgggggccatctagaaatagaaaggcagtgggaagacagattctacggcactgctttcatttaattgggctttaggcactccattcgaatgcagaacctcacctctagttgagaccaagaattggcaaatttgcatgagctcctggaaagagttgctgactttgtatctaagacctgccagggaataccaagagttgtttctacagactttttttttttttttgtatgggagaagatactgtggcaaccaggaaggaatggaaaaaaaattcttttctctacagcaaattaatgtgaggaagctcctccaatcctctggctatttaaggttcaaaatcaagtgcctagggaaaattccaatggatgattttctgggagctatcttgtctaccttgaggttcctgaacaatgaattcccattaatgagcagtcttcagtattaaaaccactgtcttgtcacctcattttgcattactgtcttccgtggatgtttcagttacaactgtaatgttatttatagaacaacattaatccattaaagctaacctatttttcaatatttatgataatctatgtacatatattgtctgtccatatgtatttgtaaataggttgtatataatgtcaggtttgggtcttgggttcaagtgtatatattcctgtaagtttcttaactgcattttgatgaattcacattatgtaactataagaattgtcccaaaagtacctgtacagaaaattgaatattgaaaaattgacaaattgtgtacaaacactaaaaaaaacttgtttaaattgtatttgcaataaacaacatcaaattttttcatgaaatcttggtacaaattcagatctcttatttaaaatttaaataaggaatacattttcaaaatgcagtaatcaaaatgtgatctagtgtaatgaaataaaatgtgatctagtgtaatggaagacctttgagaacctgggtgtattaactttgtgtatatagtgtaaatatccccactgtactgttagaggccaacaattctagtatggcttgttggcaaagagtgctacaccgtttcaatgaaacaatgtatgtttgttttaactgaactaaaataaatacatgcttaatcctga

SEQ ID NO: 312361 - DNA, 3535 bp, Homo sapiens
caggaaacagcagagaaagaggcacagttttatttagaaatagttacattttggatagattccttgttacttgggcattcttttcattcattgaagctggatttttaaattttatattgctgctatttttaaaatacattttatttattttttttgcagatccggagttctgtaactcacttgttgtgtgcatcaaaagatttcagttggtggcgtcatagtctcattacagtgtctatcttggcatttaccaatttacttgtcatctttgtcccaactattagggatatctttggttttattggtaagttttagaaagtatccaagtggattcaaacatcagggattttaagatttaaagaatgaatgacgagtggttcattgaatcctcaagaaacataaatgttgttttacaggtgcatctgcagcttctatgttgatttttattcttccttctgccttctatatcaagttggtgaagaaagaacctatgaaatctgtacaaaagattggggctttgttcttcctgttaagtggtgtactggtgatgaccggaagcatggccttgattgttttggattgggtacacaatgcacctggaggtggccattaattggcaccactcaaactcaaactcagtccatctgatgccagtgttgagtaaactcaactactatgaaatttcacctaatgttttcagtttcacttccttttgaagtgcagattcctcgctggttcttctgagtgcagaataagtgaacttttttgttttgttttgtttttttaagaaacttatctgtatgttagaaatggatatgaacaacaaaaccacgagtctcgggttaagggaagtgacaattttattccattccagagaatggacaaactcttaacttttatcaagccacatgcttggctgtgtcattgtttaacttggatattttatgattttacttgaatgtgcctaatggaaccatttgatgtgagaaacaattctttttaatttacagcaaaatattgaataaccattgacaaaaacactattattttttgtaccaaaaatacttaaagacctcagaagcactcttttacttttaagaaattgcttttttgaactttattcagaagcagttatcaataaattccataaaataatgtcattggtatttaaaaatgaatattaatataatgaaatggtttgcctttttgtaggcataataagccaaatacttttttacccaaaataatttttagagaaaatgatgtaatgaaaaattgtaccatgaattaggagcatagttttttccatttaaacgtcaccattacttaaaagatgattgattattgctataccaaatcagatgaactctgttcatcacttttcttctctgtccccaaacaatttggttcattcagactgaaatgtttgtgtcttcaacttattagaatggaagataatgcagatatttctgtgggaaataaaataactaattttgaggtaccaaatagtgcaattgggtaaaacagggtttattcagttgcatctgtctccagtgttgtattgacagctctgggtctttttttgggccagcccttttttgacattgcttccagcagtggaaaatgggcatttgatggcaataggccaaaattattgtgtccagagagtacactttttcaaaatgctcacctactggaagtgtgaattacttgacaatgtatggcttagttgtgttcatgttttgtctacagtagaggtctaatccacaggttacacctatgtttgatatgatataagttctctttgcgtaggccactgggtttctcatgcagtaagctttataaaaactcatttgcactggactgtcatctcattcttgtacaacgtagaattacttgtttacatccaacaaatggttagctagggaaaacagtgcaaactgagtgttagtagtcattttggtccaactgcatgtcaacccttccatttcaatcccagttagaaatgaaaataattactttgaaacttggctttaagagcacatttatcgtacgtcacagtgtatggtgaatatattattaaataatgtggtacttcgctcatcaggcataatgtctaaaatctaatatacataattccattaagtggttgaaggaagcaaataatggaattgtcaattggtcatctggctgtaaggtttgcccttgaactaaaaatgttgtttggggcaagggccagaaatgtggagacatggtttttgttacgcattcttgtattatatgtgactaaatttacaaacaagatacatgtgtaattaaagacccttatggaactggaagacgtcttgtagtgctacattgggtgaaaccgttggtccatttttgtctgtttctatgaagataaaataattgggggccatctagaaatagaaaggcagtgggaagacagattctacggcactgctttcatttaattgggctttaggcactccattcgaatgcagaacctcacctctagttgagaccaagaattggcaaatttgcatgagctcctggaaagagttgctgactttgtatctaagacctgccagggaataccaagagttgtttctacagactttttttttttttttgtatgggagaagatactgtggcaaccaggaaggaatggaaaaaaaattcttttctctacagcaaattaatgtgaggaagctcctccaatcctctggctatttaaggttcaaaatcaagtgcctagggaaaattccaatggatgattttctgggagctatcttgtctaccttgaggttcctgaacaatgaattcccattaatgagcagtcttcagtattaaaaccactgtcttgtcacctcattttgcattactgtcttccgtggatgtttcagttacaactgtaatgttatttatagaacaacattaatccattaaagctaacctatttttcaatatttatgataatctatgtacatatattgtctgtccatatgtatttgtaaataggttgtatataatgtcaggtttgggtcttgggttcaagtgtatatattcctgtaagtttcttaactgcattttgatgaattcacattatgtaactataagaattgtcccaaaagtacctgtacagaaaattgaatattgaaaaattgacaaattgtgtacaaacactaaaaaaaacttgtttaaattgtatttgcaataaacaacatcaaattttttcatgaaatcttggtacaaattcagatctcttatttaaaatttaaataaggaatacattttcaaaatgcagtaatcaaaatgtgatctagtgtaatgaaataaaatgtgatctagtgtaatggaagacctttgagaacctgggtgtattaactttgtgtatatagtgtaaatatccccactgtactgttagaggccaacaattctagtatggcttgttggcaaagagtgctacaccgtttcaatgaaacaatgtatgtttgttttaactgaactaaaataaatacatgcttaatcctga

SEQ ID NO: 312362 - DNA, 3700 bp, Homo sapiens
actgacgcgtccccggggtgccgctataacccgccgctcgcagggctgctccacagccgcgcgacgccgccgccttagaacgcctttccagtactgctagcagcagcccgaccacgcgttaccgcacgctcgcgcctttcccttgacacggcggacgccggaggattggggcggcaatttgtcttttccttttttattaaaattatttttcctgcctgttgttggatttggggaaattttttgtttgttttttatgatttgtatttgactgagagaaacccactgaagacgtctgcgtgagaatagagaccaccgaggccgactcgcgggccgctgcacccaccgccaaggacaaaaggagcccagcgctactagctgcacccgattcctcccagtgcttagcatgaagaaggccgaaatgggacgattcagtatttccccggatgaagacagcagcagctacagttccaacagcgacttcaactactcctaccccaccaagcaagctgctctgaaaagccattatgcagatgtagatcctgaaaaccagaactttttacttgaatcgaatttggggaagaagaagtatgaaacagaatttcatccaggtactacttcctttggaatgtcagtatttaatctgagcaatgcgattgtgggcagtggaatccttgggctttcttatgccatggctaatactggaattgctctttttataattctcttgacatttgtgtcaatattttccctgtattctgttcatctccttttgaagactgccaatgaaggagggtctttattatatgaacaattgggatataaggcatttggattagttggaaagcttgcagcatctggatcaattacaatgcagaacattggagctatgtcaagctacctcttcatagtgaaatatgagttgcctttggtgatccaggcattaacgaacattgaagataaaactggattgtggtatctgaacgggaactatttggttctgttggtgtcattggtggtcattcttcctttgtcgctgtttagaaatttaggatatttgggatataccagtggcctttccttgttgtgtcattgtttaacttggatattttatgattttacttgaatgtgcctaatggaaccatttgatgtgagaaacaattctttttaatttacagcaaaatattgaataaccattgacaaaaacactattattttttgtaccaaaaatacttaaagacctcagaagcactcttttacttttaagaaattgcttttttgaactttattcagaagcagttatcaataaattccataaaataatgtcattggtatttaaaaatgaatattaatataatgaaatggtttgcctttttgtaggcataataagccaaatacttttttacccaaaataatttttagagaaaatgatgtaatgaaaaattgtaccatgaattaggagcatagttttttccatttaaacgtcaccattacttaaaagatgattgattattgctataccaaatcagatgaactctgttcatcacttttcttctctgtccccaaacaatttggttcattcagactgaaatgtttgtgtcttcaacttattagaatggaagataatgcagatatttctgtgggaaataaaataactaattttgaggtaccaaatagtgcaattgggtaaaacagggtttattcagttgcatctgtctccagtgttgtattgacagctctgggtctttttttgggccagcccttttttgacattgcttccagcagtggaaaatgggcatttgatggcaataggccaaaattattgtgtccagagagtacactttttcaaaatgctcacctactggaagtgtgaattacttgacaatgtatggcttagttgtgttcatgttttgtctacagtagaggtctaatccacaggttacacctatgtttgatatgatataagttctctttgcgtaggccactgggtttctcatgcagtaagctttataaaaactcatttgcactggactgtcatctcattcttgtacaacgtagaattacttgtttacatccaacaaatggttagctagggaaaacagtgcaaactgagtgttagtagtcattttggtccaactgcatgtcaacccttccatttcaatcccagttagaaatgaaaataattactttgaaacttggctttaagagcacatttatcgtacgtcacagtgtatggtgaatatattattaaataatgtggtacttcgctcatcaggcataatgtctaaaatctaatatacataattccattaagtggttgaaggaagcaaataatggaattgtcaattggtcatctggctgtaaggtttgcccttgaactaaaaatgttgtttggggcaagggccagaaatgtggagacatggtttttgttacgcattcttgtattatatgtgactaaatttacaaacaagatacatgtgtaattaaagacccttatggaactggaagacgtcttgtagtgctacattgggtgaaaccgttggtccatttttgtctgtttctatgaagataaaataattgggggccatctagaaatagaaaggcagtgggaagacagattctacggcactgctttcatttaattgggctttaggcactccattcgaatgcagaacctcacctctagttgagaccaagaattggcaaatttgcatgagctcctggaaagagttgctgactttgtatctaagacctgccagggaataccaagagttgtttctacagactttttttttttttttgtatgggagaagatactgtggcaaccaggaaggaatggaaaaaaaattcttttctctacagcaaattaatgtgaggaagctcctccaatcctctggctatttaaggttcaaaatcaagtgcctagggaaaattccaatggatgattttctgggagctatcttgtctaccttgaggttcctgaacaatgaattcccattaatgagcagtcttcagtattaaaaccactgtcttgtcacctcattttgcattactgtcttccgtggatgtttcagttacaactgtaatgttatttatagaacaacattaatccattaaagctaacctatttttcaatatttatgataatctatgtacatatattgtctgtccatatgtatttgtaaataggttgtatataatgtcaggtttgggtcttgggttcaagtgtatatattcctgtaagtttcttaactgcattttgatgaattcacattatgtaactataagaattgtcccaaaagtacctgtacagaaaattgaatattgaaaaattgacaaattgtgtacaaacactaaaaaaaacttgtttaaattgtatttgcaataaacaacatcaaattttttcatgaaatcttggtacaaattcagatctcttatttaaaatttaaataaggaatacattttcaaaatgcagtaatcaaaatgtgatctagtgtaatgaaataaaatgtgatctagtgtaatggaagacctttgagaacctgggtgtattaactttgtgtatatagtgtaaatatccccactgtactgttagaggccaacaattctagtatggcttgttggcaaagagtgctacaccgtttcaatgaaacaatgtatgtttgttttaactgaactaaaataaatacatgcttaatcctga

SEQ ID NO: 312363 - DNA, 2215 bp, Homo sapiens
tgcctgtgattagaggatccggtcgacggggatcaaatcagatgaactctgttcatcacttttcttctctgtccccaaacaatttggttcattcagactgaaatgtttgtgtcttcaacttattagaatggaagataatgcagatatttctgtgggaaataaaataactaattttgaggtaccaaatagtgcaattgggtaaaacagggtttattcagttgcatctgtctccagtgttgtattgacagctctgggtctttttttgggccagcccttttttgacattgcttccagcagtggaaaatgggcatttgatggcaataggccaaaattattgtgtccagagagtacactttttcaaaatgctcacctactggaagtgtgaattacttgacaatgtatggcttagttgtgttcatgttttgtctacagtagaggtctaatccacaggttacacctatgtttgatatgatataagttctctttgcgtaggccactgggtttctcatgcagtaagctttataaaaactcatttgcactggactgtcatctcattcttgtacaacgtagaattacttgtttacatccaacaaatggttagctagggaaaacagtgcaaactgagtgttagtagtcattttggtccaactgcatgtcaacccttccatttcaatcccagttagaaatgaaaataattactttgaaacttggctttaagagcacatttatcgtacgtcacagtgtatggtgaatatattattaaataatgtggtacttcgctcatcaggcataatgtctaaaatctaatatacataattccattaagtggttgaaggaagcaaataatggaattgtcaattggtcatctggctgtaaggtttgcccttgaactaaaaatgttgtttggggcaagggccagaaatgtggagacatggtttttgttacgcattcttgtattatatgtgactaaatttacaaacaagatacatgtgtaattaaagacccttatggaactggaagacgtcttgtagtgctacattgggtgaaaccgttggtccatttttgtctgtttctatgaagataaaataattgggggccatctagaaatagaaaggcagtgggaagacagattctacggcactgctttcatttaattgggctttaggcactccattcgaatgcagaacctcacctctagttgagaccaagaattggcaaatttgcatgagctcctggaaagagttgctgactttgtatctaagacctgccagggaataccaagagttgtttctacagactttttttttttttttgtatgggagaagatactgtggcaaccaggaaggaatggaaaaaaaattcttttctctacagcaaattaatgtgaggaagctcctccaatcctctggctatttaaggttcaaaatcaagtgcctagggaaaattccaatggatgattttctgggagctatcttgtctaccttgaggttcctgaacaatgaattcccattaatgagcagtcttcagtattaaaaccactgtcttgtcacctcattttgcattactgtcttccgtggatgtttcagttacaactgtaatgttatttatagaacaacattaatccattaaagctaacctatttttcaatatttatgataatctatgtacatatattgtctgtccatatgtatttgtaaataggttgtatataatgtcaggtttgggtcttgggttcaagtgtatatattcctgtaagtttcttaactgcattttgatgaattcacattatgtaactataagaattgtcccaaaagtacctgtacagaaaattgaatattgaaaaattgacaaattgtgtacaaacactaaaaaaaacttgtttaaattgtatttgcaataaacaacatcaaattttttcatgaaatcttggtacaaattcagatctcttatttaaaatttaaataaggaatacattttcaaaatgcagtaatcaaaatgtgatctagtgtaatgaaataaaatgtgatctagtgtaatggaagacctttgagaacctgggtgtattaactttgtgtatatagtgtaaatatccccactgtactgttagaggccaacaattctagtatggcttgttggcaaagagtgctacaccgtttcaatgaaacaatgtatgtttgttttaactgaactaaaataaatacatgcttaatcctga

SEQ ID NO: 312364 - DNA, 4015 bp, Homo sapiens
  misc_feature (4002)..(4003): n is a, c, g, or t
actgacgcgtccccggggtgccgctataacccgccgctcgcagggctgctccacagccgcgcgacgccgccgccttagaacgcctttccagtactgctagcagcagcccgaccacgcgttaccgcacgctcgcgcctttcccttgacacggcggacgccggaggattggggcggcaatttgtcttttccttttttattaaaattatttttcctgcctgttgttggatttggggaaattttttgtttgttttttatgatttgtatttgactgagagaaacccactgaagacgtctgcgtgagaatagagaccaccgaggccgactcgcgggccgctgcacccaccgccaaggacaaaaggagcccagcgctactagctgcacccgattcctcccagtgcttagcatgaagaaggccgaaatgggacgattcagtatttccccggatgaagacagcagcagctacagttccaacagcgacttcaactactcctaccccaccaagcaagctgctctgaaaagccattatgcagatgtagatcctgaaaaccagaactttttacttgaatcgaatttggggaagaagaagtatgaaacagaatttcatccaggtactacttcctttggaatgtcagtatttaatctgagcaatgcgattgtgggcagtggaatccttgggctttcttatgccatggctaatactggaattgctctttttataattctcttgacatttgtgtcaatattttccctgtattctgttcatctccttttgaagactgccaatgaaggagggtctttattatatgaacaattgggatataaggcatttggattagttggaaagcttgcagcatctggatcaattacaatgcagaacattggagctatgtcaagctacctcttcatagtgaaatatgagttgcctttggtgatccaggcattaacgaacattgaagataaaactggattgtggtatctgaacgggaactatttggttctgttggtgtcattggtggtcattcttcctttgtcgctgtttagaaatttaggatatttgggatataccagtggcctttccttgttgtgtatggtgttctttctgattgtggtcatttgcaagaaatttcaggttccgtgtcctgtggaagctgctttgataattaacgaaacaataaacaccaccttaacacagccaacagctcttgtacctgctttgtcacataacgtgactgaaaatgactcttgcagacctcactattttattttcaactcacagactgtctatgctgtgccaattctgatcttttcatttgtctgtcatcctgctgttcttcccatctatgaagaactgaaagaccgcagccgtagaagaatgatgaatgtgtccaagatttcattttttgctatgtttctcatgtatctgcttgccgccctctttggatacctaacattttacgaacatgttgagtcagaattgcttcatacctactcttctatcttgggaactgatattcttcttctcattgtccgtctggctgtgttaatggctgtgaccctgacagtaccagtagttattttcccaatccggagttctgtaactcacttgttgtgtgcatcaaaagatttcagttggtggcgtcatagtctcattacagtgtctatcttggcatttaccaatttacttgtcatctttgtcccaactattagggatatctttggttttattggtgcatctgcagcttctatgttgatttttattcttccttctgccttctatatcaagttggtgaagaaagaacctatgaaatctgtacaaaagattggggctttgttcttcctgttaagtggtgtactggtgatgaccggaagcatggccttgattgttttggattgggtacacaatgcacctggaggtggccattaattggcaccactcaaactcaaactcagtccatctgatgccagtgttgagtaaactcaactactatgaaatttcacctaatgttttcagtttcacttccttttgaagtgcagattcctcgctggttcttctgagtgcagaataagtgaacttttttgttttgttttgtttttttaagaaacttatctgtatgttagaaatggatatgaacaacaaaaccacgagtctcgggttaagggaagtgacaattttattccattccagagaatggacaaactcttaacttttatcaagccacatgcttggctgtgtcattgtttaacttggatattttatgattttacttgaatgtgcctaatggaaccatttgatgtgagaaacaattctttttaatttacagcaaaatattgaataaccattgacaaaaacactattattttttgtaccaaaaatacttaaagacctcagaagcactcttttacttttaagaaattgcttttttgaactttattcagaagcagttatcaataaattccataaaataatgtcattggtatttaaaaatgaatattaatataatgaaatggtttgcctttttgtaggcataataagccaaatacttttttacccaaaataatttttagagaaaatgatgtaatgaaaaattgtaccatgaattaggagcatagttttttccatttaaacgtcaccattacttaaaagatgattgattattgctataccaaatcagatgaactctgttcatcacttttcttctctgtccccaaacaatttggttcattcagactgaaatgtttgtgtcttcaacttattagaatggaagataatgcagatatttctgtgggaaataaaataactaattttgaggtaccaaatagtgcaattgggtaaaacagggtttattcagttgcatctgtctccagtgttgtattgacagctctgggtctttttttgggccagcccttttttgacattgcttccagcagtggaaaatgggcatttgatggcaataggccaaaattattgtgtccagagagtacactttttcaaaatgctcacctactggaagtgtgaattacttgacaatgtatggcttagttgtgttcatgttttgtctacagtagaggtctaatccacaggttacacctatgtttgatatgatataagttctctttgcgtaggccactgggtttctcatgcagtaagctttataaaaactcatttgcactggactgtcatctcattcttgtacaacgtagaattacttgtttacatccaacaaatggttagctagggaaaacagtgcaaactgagtgttagtagtcattttggtccaactgcatgtcaacccttccatttcaatcccagttagaaatgaaaataattactttgaaacttggctttaagagcacatttatcgtacgtcacagtgtatggtgaatatattattaaataatgtggtacttcgctcatcaggcataatgtctaaaatctaatatacataattccattaagtggttgaaggaagcaaataatggaattgtcaattggtcatctggctgtaaggtttgcccttgaactaaaaatgttgtttggggcaagggccagaaatgtggagacatggtttttgttacgcattcttgtattatatgtgactaaatttacaaacaagatacatgtgtaattaaagacccttatggaactggaagacgtcttgtagtgctacattgggtgaaaccgttggtccatttttgtctgtttctatgaagataaaataattgggggccatctagaaatagaaaggcagtgggaagacagattctacggcactgctttcatttaattgggctttaggcactccattcgaatgcagaacctcacctctagttgagaccaagaattggcaaatttgcatgagctcctggaaagagttgctgactttgtatctaagacctgccagggaataccaagagttgtttctacagactttttttttttttttgtatgggagaagatactgtggcaaccgtcgacgcggccgcgaatttagtagtagtagnngtaggcggccgc

SEQ ID NO: 312365 - DNA, 4003 bp, Homo sapiens
actgacgcgtccccggggtgccgctataacccgccgctcgcagggctgctccacagccgcgcgacgccgccgccttagaacgcctttccagtactgctagcagcagcccgaccacgcgttaccgcacgctcgcgcctttcccttgacacggcggacgccggaggattggggcggcaatttgtcttttccttttttattaaaattatttttcctgcctgttgttggatttggggaaattttttgtttgttttttatgatttgtatttgactgagagaaacccactgaagacgtctgcgtgagaatagagaccaccgaggccgactcgcgggccgctgcacccaccgccaaggacaaaaggagcccagcgctactagctgcacccgattcctcccagtgcttagcatgaagaaggccgaaatgggacgattcagtatttccccggatgaagacagcagcagctacagttccaacagcgacttcaactactcctaccccaccaagcaagctgctctgaaaagccattatgcagatgtagatcctgaaaaccagaactttttacttgaatcgaatttggggaagaagaagtatgaaacagaatttcatccaggtactacttcctttggaatgtcagtatttaatctgagcaatgcgattgtgggcagtggaatccttgggctttcttatgccatggctaatactggaattgctctttttataattctcttgacatttgtgtcaatattttccctgtattctgttcatctccttttgaagactgccaatgaaggagggtctttattatatgaacaattgggatataaggcatttggattagttggaaagcttgcagcatctggatcaattacaatgcagaacattggagctatgtcaagctacctcttcatagtgaaatatgagttgcctttggtgatccaggcattaacgaacattgaagataaaactggattgtggtatctgaacgggaactatttggttctgttggtgtcattggtggtcattcttcctttgtcgctgtttagaaatttaggatatttgggatataccagtggcctttccttgttgtgtatggtgttctttctgattgtggtcatttgcaagaaatttcaggttccgtgtcctgtggaagctgctttgataattaacgaaacaataaacaccaccttaacacagccaacagctcttgtacctgctttgtcacataacgtgactgaaaatgactcttgcagacctcactattttattttcaactcacagactgtctatgctgtgccaattctgatcttttcatttgtctgtcatcctgctgttcttcccatctatgaagaactgaaagaccgcagccgtagaagaatgatgaatgtgtccaagatttcattttttgctatgtttctcatgtatctgcttgccgccctctttggatacctaacattttacgaacatgttgagtcagaattgcttcatacctactcttctatcttgggaactgatattcttcttctcattgtccgtctggctgtgttaatggctgtgaccctgacagtaccagtagttattttcccaatccggagttctgtaactcacttgttgtgtgcatcaaaagatttcagttggtggcgtcatagtctcattacagtgtctatcttggcatttaccaatttacttgtcatctttgtcccaactattagggatatctttggttttattggtgcatctgcagcttctatgttgatttttattcttccttctgccttctatatcaagttggtgaagaaagaacctatgaaatctgtacaaaagattggggctttgttcttcctgttaagtggtgtactggtgatgaccggaagcatggccttgattgttttggattgggtacacaatgcacctggaggtggccattaattggcaccactcaaactcaaactcagtccatctgatgccagtgttgagtaaactcaactactatgaaatttcacctaatgttttcagtttcacttccttttgaagtgcagattcctcgctggttcttctgagtgcagaataagtgaacttttttgttttgttttgtttttttaagaaacttatctgtatgttagaaatggatatgaacaacaaaaccacgagtctcgggttaagggaagtgacaattttattccattccagagaatggacaaactcttaacttttatcaagccacatgcttggctgtgtcattgtttaacttggatattttatgattttacttgaatgtgcctaatggaaccatttgatgtgagaaacaattctttttaatttacagcaaaatattgaataaccattgacaaaaacactattattttttgtaccaaaaatacttaaagacctcagaagcactcttttacttttaagaaattgcttttttgaactttattcagaagcagttatcaataaattccataaaataatgtcattggtatttaaaaatgaatattaatataatgaaatggtttgcctttttgtaggcataataagccaaatacttttttacccaaaataatttttagagaaaatgatgtaatgaaaaattgtaccatgaattaggagcatagttttttccatttaaacgtcaccattacttaaaagatgattgattattgctataccaaatcagatgaactctgttcatcacttttcttctctgtccccaaacaatttggttcattcagactgaaatgtttgtgtcttcaacttattagaatggaagataatgcagatatttctgtgggaaataaaataactaattttgaggtaccaaatatgctacattgggtgaaaccgttggtccatttttgtctgtttctatgaagataaaataattgggggccatctagaaatagaaaggcagtgggaagacagattctacggcactgctttcatttaattgggctttaggcactccattcgaatgcagaacctcacctctagttgagaccaagaattggcaaatttgcatgagctcctggaaagagttgctgactttgtatctaagacctgccagggaataccaagagttgtttctacagactttttttttttttttgtatgggagaagatactgtggcaaccaggaaggaatggaaaaaaaattcttttctctacagcaaattaatgtgaggaagctcctccaatcctctggctatttaaggttcaaaatcaagtgcctagggaaaattccaatggatgattttctgggagctatcttgtctaccttgaggttcctgaacaatgaattcccattaatgagcagtcttcagtattaaaaccactgtcttgtcacctcattttgcattactgtcttccgtggatgtttcagttacaactgtaatgttatttatagaacaacattaatccattaaagctaacctatttttcaatatttatgataatctatgtacatatattgtctgtccatatgtatttgtaaataggttgtatataatgtcaggtttgggtcttgggttcaagtgtatatattcctgtaagtttcttaactgcattttgatgaattcacattatgtaactataagaattgtcccaaaagtacctgtacagaaaattgaatattgaaaaattgacaaattgtgtacaaacactaaaaaaaacttgtttaaattgtatttgcaataaacaacatcaaattttttcatgaaatcttggtacaaattcagatctcttatttaaaatttaaataaggaatacattttcaaaatgcagtaatcaaaatgtgatctagtgtaatgaaataaaatgtgatctagtgtaatggaagacctttgagaacctgggtgtattaactttgtgtatatagtgtaaatatccccactgtactgttagaggccaacaattctagtatggcttgttggcaaagagtgctacaccgtttcaatgaaacaatgtatgtttgttttaactgaactaaaataaatacatgcttaatcctga

SEQ ID NO: 312366 - DNA, 1679 bp, Homo sapiens
ctcagtttgcactgttttccctagctaaccatttgttggatgtaaacaagtaattctacgttgtacaagattgagatgacagtccagtgcaaatgagtttttataaagcttactgcatgtcaacccttccatttcaatcccagttagaaatgaaaataattactttgaaacttggctttaagagcacatttatcgtacgtcacagtgtatggtgaatatattattaaataatgtggtacttcgctcatcaggcataatgtctaaaatctaatatacataattccattaagtggttgaaggaagcaaataatggaattgtcaattggtcatctggctgtaaggtttgcccttgaactaaaaatgttgtttggggcaagggccagaaatgtggagacatggtttttgttacgcattcttgtattatatgtgactaaatttacaaacaagatacatgtgtaattaaagacccttatggaactggaagacgtcttgtagtgctacattgggtgaaaccgttggtccatttttgtctgtttctatgaagataaaataattgggggccatctagaaatagaaaggcagtgggaagacagattctacggcactgctttcatttaattgggctttaggcactccattcgaatgcagaacctcacctctagttgagaccaagaattggcaaatttgcatgagctcctggaaagagttgctgactttgtatctaagacctgccagggaataccaagagttgtttctacagactttttttttttttttgtatgggagaagatactgtggcaaccaggaaggaatggaaaaaaaattcttttctctacagcaaattaatgtgaggaagctcctccaatcctctggctatttaaggttcaaaatcaagtgcctagggaaaattccaatggatgattttctgggagctatcttgtctaccttgaggttcctgaacaatgaattcccattaatgagcagtcttcagtattaaaaccactgtcttgtcacctcattttgcattactgtcttccgtggatgtttcagttacaactgtaatgttatttatagaacaacattaatccattaaagctaacctatttttcaatatttatgataatctatgtacatatattgtctgtccatatgtatttgtaaataggttgtatataatgtcaggtttgggtcttgggttcaagtgtatatattcctgtaagtttcttaactgcattttgatgaattcacattatgtaactataagaattgtcccaaaagtacctgtacagaaaattgaatattgaaaaattgacaaattgtgtacaaacactaaaaaaaacttgtttaaattgtatttgcaataaacaacatcaaattttttcatgaaatcttggtacaaattcagatctcttatttaaaatttaaataaggaatacattttcaaaatgcagtaatcaaaatgtgatctagtgtaatgaaataaaatgtgatctagtgtaatggaagacctttgagaacctgggtgtattaactttgtgtatatagtgtaaatatccccactgtactgttagaggccaacaattctagtatggcttgttggcaaagagtgctacaccgtttcaatgaaacaatgtatgtttgttttaactgaactaaaataaatacatgcttaatcctga

SEQ ID NO: 312367 - DNA, 3487 bp, Homo sapiens
actgacgcgtccccggggtgccgctataacccgccgctcgcagggctgctccacagccgcgcgacgccgccgccttagaacgcctttccagtactgctagcagcagcccgaccacgcgttaccgcacgctcgcgcctttcccttgacacggcggacgccggaggattggggcggcaatttgtcttttccttttttattaaaattatttttcctgcctgttgttggatttggggaaattttttgtttgttttttatgatttgtatttgactgagagaaacccactgaagacgtctgcgtgagaatagagaccaccgaggccgactcgcgggccgctgcacccaccgccaaggacaaaaggagcccagcgctactagctgcacccgattcctcccagtgcttagcatgaagaaggccgaaatgggacgattcagtatttccccggatgaagacagcagcagctacagttccaacagcgacttcaactactcctaccccaccaagcaagctgctctgaaaagccattatgcagatgtagatcctgaaaaccagaactttttacttgaatcgaatttggggaagaagaagtatgaaacagaatttcatccaggtactacttcctttggaatgtcagtatttaatctgagcaatgcgattgtgggcagtggaatccttgggctttcttatgccatggctaatactggaattgctctttttataattctcttgacatttgtgtcaatattttccctgtattctgttcatctccttttgaagactgccaatgaaggagggtctttattatatgaacaattgggatataaggcatttggattagttggaaagcttgcagcatctggatcaattacaatgcagaacattggagctatgtcaagctacctcttcatagtgaaatatgagttgcctttggtgatccaggcattaacgaacattgaagataaaactggattgtggtatctgaacgggaactatttggttctgttggtgtcattggtggtcattcttcctttgtcgctgtttagaaatttaggatatttgggatataccagtggcctttccttgttgtgtatggtgttctttctgattgtggtcatttgcaagaaatttcaggttccgtgtcctgtggaagctgctttgataattaacgaaacaataaacaccaccttaacacagccaacagctcttgtacctgctttgtcacataacgtgactgaaaatgactcttgcagacctcactattttattttcaactcacagactgtctatgctgtgccaattctgatcttttcatttgtctgtcatcctgctgttcttcccatctatgaagaactgaaagaccgcagccgtagaagaatgatgaatgtgtccaagatttcattttttgctatgtttctcatgtatctgcttgccgccctctttggatacctaacattttacgaacatgttgagtcagaattgcttcatacctactcttctatcttgggaactgatattcttcttctcattgtccgtctggctgtgttaatggctgtgaccctgacagtaccagtagttattttcccaatccggagttctgtaactcacttgttgtgtgcatcaaaagatttcagttggtggcgtcatagtctcattacagtgtctatcttggcatttaccaatttacttgtcatctttgtcccaactattagggatatctttggttttattggtgcatctgcagcttctatgttgatttttattcttccttctgccttctatatcaagttggtgaagaaagaacctatgaaatctgtacaaaagattggggctttgttcttcctgttaagtggtgtactggtgatgaccggaagcatggccttgattgttttggattgggtacacaatgcacctggaggtggccattaattggcaccactcaaactcaaactcagtccatctgatgccagtgttgagtaaactcaactactatgaaatttcacctaatgttttcagtttcacttccttttgaagtgcagattcctcgctggttcttctgagtgcagaataagtgaacttttttgttttgttttgtttttttaagaaacttatctgtatgttagaaatggatatgaacaacaaaaccacgagtctcgggttaagggaagtgacaattttattccattccagagaatggacaaactcttaacttttatcaagccacatgcttggctgtgtcattgtttaacttggatattttatgattttacttgaatgtgcctaatggaaccatttgatgtgagaaacaattctttttaatttacagcaaaatattgaataaccattgacaaaaacactattattttttgtaccaaaaatacttaaagacctcagaagcactcttttacttttaagaaattgcttttttgaactttattcagaagcagttatcaataaattccataaaataatgtcattggtatttaaaaatgaatattaatataatgaaatggtttgcctttttgtaggcataataagccaaatacttttttacccaaaataatttttagagaaaatgatgtaatgaaaaattgtaccatgaattaggagcatagttttttccatttaaacgtcaccattacttaaaagatgattgattattgctataccaaatcagatgaactctgttcatcacttttcttctctgtccccaaacaatttggttcattcagactgaaatgtttgtgtcttcaacttattagaatggaagataatgcagatatttctgtgggaaataaaataactaattttgaggtaccaaatagtgcaattgggtaaaacagggtttattcagttgcatctgtctccagtgttgtattgacagctctgggtctttttttgggccagcccttttttgacattgcttccagcagtggaaaatgggcatttgatggcaataggccaaaattattgtgtccagagagtacactttttcaaaatgctcacctactggaagtgtgaattacttgacaatgtatggcttagttgtgttcatgttttgtctacagtagaggtctaatccacaggttacacctatgtttgatatgatataagttctctttgcgtaggccactgggtttctcatgcagtaagctttataaaaactcatttgcactggactgtcatctcattcttgtacaacgtagaattacttgtttacatccaacaaatggttagctagggaaaacagtgcaaactgagtgttagtagtcattttggtccaactgcatgtcaacccttccatttcaatcccagttagaaatgaaaataattactttgaaacttggctttaagagcacatttatcgtacgtcacagtgtatggtgaatatattattaaataatgtggtacttcgctcatcaggcataatgtctaaaatctaatatacataattccattccttcctggttgccacagtatcttctcccatac

SEQ ID NO: 312368 - DNA, 3170 bp, Homo sapiens
actgacgcgtccccggggtgccgctataacccgccgctcgcagggctgctccacagccgcgcgacgccgccgccttagaacgcctttccagtactgctagcagcagcccgaccacgcgttaccgcacgctcgcgcctttcccttgacacggcggacgccggaggattggggcggcaatttgtcttttccttttttattaaaattatttttcctgcctgttgttggatttggggaaattttttgtttgttttttatgatttgtatttgactgagagaaacccactgaagacgtctgcgtgagaatagagaccaccgaggccgactcgcgggccgctgcacccaccgccaaggacaaaaggagcccagcgctactagctgcacccgattcctcccagtgcttagcatgaagaaggccgaaatgggacgattcagtatttccccggatgaagacagcagcagctacagttccaacagcgacttcaactactcctaccccaccaagcaagctgctctgaaaagccattatgcagatgtagatcctgaaaaccagaactttttacttgaatcgaatttggggaagaagaagtatgaaacagaatttcatccaggtactacttcctttggaatgtcagtatttaatctgagcaatgcgattgtgggcagtggaatccttgggctttcttatgccatggctaatactggaattgctctttttataattctcttgacatttgtgtcaatattttccctgtattctgttcatctccttttgaagactgccaatgaaggagggtctttattatatgaacaattgggatataaggcatttggattagttggaaagcttgcagcatctggatcaattacaatgcagaacattggagctatgtcaagctacctcttcatagtgaaatatgagttgcctttggtgatccaggcattaacgaacattgaagataaaactggattgtggtatctgaacgggaactatttggttctgttggtgtcattggtggtcattcttcctttgtcgctgtttagaaatttaggatatttgggatataccagtggcctttccttgttgtgtatggtgttctttctgattgtggtcatttgcaagaaatttcaggttccgtgtcctgtggaagctgctttgataattaacgaaacaataaacaccaccttaacacagccaacagctcttgtacctgctttgtcacataacgtgactgaaaatgactcttgcagacctcactattttattttcaactcacagactgtctatgctgtgccaattctgatcttttcatttgtctgtcatcctgctgttcttcccatctatgaagaactgaaagaccgcagccgtagaagaatgatgaatgtgtccaagatttcattttttgctatgtttctcatgtatctgcttgccgccctctttggatacctaacattttacgaacatgttgagtcagaattgcttcatacctactcttctatcttgggaactgatattcttcttctcattgtccgtctggctgtgttaatggctgtgaccctgacagtaccagtagttattttcccaatccggagttctgtaactcacttgttgtgtgcatcaaaagatttcagttggtggcgtcatagtctcattacagtgtctatcttggcatttaccaatttacttgtcatctttgtcccaactattagggatatctttggttttattggtgcatctgcagcttctatgttgatttttattcttccttctgccttctatatcaagttggtgaagaaagaacctatgaaatctgtacaaaagattggggctttgttcttcctgttaagtggtgtactggtgatgaccggaagcatggccttgattgttttggattgggtacacaatgcacctggaggtggccattaattggcaccactcaaactcaaactcagtccatctgatgccagtgttgagtaaactcaactactatgaaatttcacctaatgttttcagtttcacttccttttgaagtgcagattcctcgctggttcttctgagtgcagaataagtgaacttttttgttttgttttgtttttttaagaaacttatctgtatgttagaaatggatatgaacaacaaaaccacgagtctcgggttaagggaagtgacaattttattccattccagagaatggacaaactcttaacttttatcaagccacatgcttggctgtgtcattgtttaacttggatattttatgattttacttgaatgtgcctaatggaaccatttgatgtgagaaacaattctttttaatttacagcaaaatattgaataaccattgacaaaaacactattattttttgtaccaaaaatacttaaagacctcagaagcactcttttacttttaagaaattgcttttttgaactttattcagaagcagttatcaataaattccataaaataatgtcattggtatttaaaaatgaatattaatataatgaaatggtttgcctttttgtaggcataataagccaaatacttttttacccaaaataatttttagagaaaatgatgtaatgaaaaattgtaccatgaattaggagcatagttttttccatttaaacgtcaccattacttaaaagatgattgattattgctataccaaatcagatgaactctgttcatcacttttcttctctgtccccaaacaatttggttcattcagactgaaatgtttgtgtcttcaacttattagaatggaagataatgcagatatttctgtgggaaataaaataactaattttgaggtaccaaatagtgcaattgggtaaaacagggtttattcagttgcatctgtctccagtgttgtattgacagctctgggtctttttttgggccagcccttttttgacattgcttccagcagtggaaaatgggcatttgatggcaataggccaaaattattgtgtccagagagtacactttttcaaaatgctcacctactggaagtgtgaattacttgacaatgtatggcttagttgtgttcatgttttgtctacagtagaggtctaatccacaggttacacctatgtttgatatgattagtctcttgctagccatggttctatcaaagctataaactattgatgatgcattattttcaagaaa

SEQ ID NO: 312369 - DNA, 2292 bp, Homo sapiens
actgacgcgtccccggggtgccgctataacccgccgctcgcagggctgctccacagccgcgcgacgccgccgccttagaacgcctttccagtactgctagcagcagcccgaccacgcgttaccgcacgctcgcgcctttcccttgacacggcggacgccggaggattggggcggcaatttgtcttttccttttttattaaaattatttttcctgcctgttgttggatttggggaaattttttgtttgttttttatgatttgtatttgactgagagaaacccactgaagacgtctgcgtgagaatagagaccaccgaggccgactcgcgggccgctgcacccaccgccaaggacaaaaggagcccagcgctactagctgcacccgattcctcccagtgcttagcatgaagaaggccgaaatgggacgattcagtatttccccggatgaagacagcagcagctacagttccaacagcgacttcaactactcctaccccaccaagcaagctgctctgaaaagccattatgcagatgtagatcctgaaaaccagaactttttacttgaatcgaatttggggaagaagaagtatgaaacagaatttcatccaggtactacttcctttggaatgtcagtatttaatctgagcaatgcgattgtgggcagtggaatccttgggctttcttatgccatggctaatactggaattgctctttttataattctcttgacatttgtgtcaatattttccctgtattctgttcatctccttttgaagactgccaatgaaggagggtctttattatatgaacaattgggatataaggcatttggattagttggaaagcttgcagcatctggatcaattacaatgcagaacattggagctatgtcaagctacctcttcatagtgaaatatgagttgcctttggtgatccaggcattaacgaacattgaagataaaactggattgtggtatctgaacgggaactatttggttctgttggtgtcattggtggtcattcttcctttgtcgctgtttagaaatttaggatatttgggatataccagtggcctttccttgttgtgtatggtgttctttctgattgtggtcatttgcaagaaatttcaggttccgtgtcctgtggaagctgctttgataattaacgaaacaataaacaccaccttaacacagccaacagctcttgtacctgctttgtcacataacgtgactgaaaatgactcttgcagacctcactattttattttcaactcacagactgtctatgctgtgccaattctgatcttttcatttgtctgtcatcctgctgttcttcccatctatgaagaactgaaagaccgcagccgtagaagaatgatgaatgtgtccaagatttcattttttgctatgtttctcatgtatctgcttgccgccctctttggatacctaacattttacgaacatgttgagtcagaattgcttcatacctactcttctatcttgggaactgatattcttcttctcattgtccgtctggctgtgttaatggctgtgaccctgacagtaccagtagttattttcccaatccggagttctgtaactcacttgttgtgtgcatcaaaagatttcagttggtggcgtcatagtctcattacagtgtctatcttggcatttaccaatttacttgtcatctttgtcccaactattagggatatctttggttttattggtgcatctgcagcttctatgttgatttttattcttccttctgccttctatatcaagttggtgaagaaagaacctatgaaatctgtacaaaagattggggctttgttcttcctgttaagtggtgtactggtgatgaccggaagcatggccttgattgttttggattgggtacacaatgcacctggaggtggccattaattggcaccactcaaactcaaactcagtccatctgatgccagtgttgagtaaactcaactactatgaaatttcacctaatgttttcagtttcacttccttttgaagtgcagattcctcgctggttcttctgagtgcagaataagtgaacttttttgttttgttttgtttttttaagaaacttatctgtatgttagaaatggatatgaacaacaaaaccacgagtctcgggttaagggaagtgacaattttattccattccagagaatggacaaactcttaacttttatcaagccacatgcttggctgtgtcattgttccattaggcacattcaaaaaaaatcataaaatatccaagttaaacagtcgac

SEQ ID NO: 312370 - DNA, 1565 bp, Homo sapiens
actgacgcgtccccggggtgccgctataacccgccgctcgcagggctgctccacagccgcgcgacgccgccgccttagaacgcctttccagtactgctagcagcagcccgaccacgcgttaccgcacgctcgcgcctttcccttgacacggcggacgccggaggattggggcggcaatttgtcttttccttttttattaaaattatttttcctgcctgttgttggatttggggaaattttttgtttgttttttatgatttgtatttgactgagagaaacccactgaagacgtctgcgtgagaatagagaccaccgaggccgactcgcgggccgctgcacccaccgccaaggacaaaaggagcccagcgctactagctgcacccgattcctcccagtgcttagcatgaagaaggccgaaatgggacgattcagtatttccccggatgaagacagcagcagctacagttccaacagcgacttcaactactcctaccccaccaagcaagctgctctgaaaagccattatgcagatgtagatcctgaaaaccagaactttttacttgaatcgaatttggggaagaagaagtatgaaacagaatttcatccaggtactacttcctttggaatgtcagtatttaatctgagcaatgcgattgtgggcagtggaatccttgggctttcttatgccatggctaatactggaattgctctttttataattctcttgacatttgtgtcaatattttccctgtattctgttcatctccttttgaagactgccaatgaaggagggtctttattatatgaacaattgggatataaggcatttggattagttggaaagcttgcagcatctggatcaattacaatgcagaacattggagctatgtcaagctacctcttcatagtgaaatatgagttgcctttggtgatccaggcattaacgaacattgaagataaaactggattgtggtatctgaacgggaactatttggttctgttggtgtcattggtggtcattcttcctttgtcgctgtttagaaatttaggatatttgggatataccagtggcctttccttgttgtgtatggtgttctttctgattgtggtgggtatgattttttttttagaaaaaattttttataagccctgccatgtcacttagtttaacacatgcaaaataatatatttttaggtcatttgcaagaaatttcaggttccgtgtcctgtggaagctgctttgataattaacgaaacaataaacaccaccttaacacagccaacagctcttgtacctgctttgtcacataacgtgactgaaaatgactcttgcagacctcactattttattttcaactcacagactgtctatgctgtgccaattctgatcttttcatttgtctgtcatcctgctgttcttcccatctatgaagaactgaaagaccgcagccgtagaagaatgatgaatgtgtccaagatttcattttttgctatgtttctcatgtatctgcttgccgccctctttggatacctaacattttacggtaagtaacgcctcctttacc

SEQ ID NO: 312371 - DNA, 411 bp, Homo sapiens
gtgagtgaaagattataaccatagaaacagtaataatatcataaatttccccaactgattttaattttattctcatagctgttatttgttatggtttcacttttaagtttccagcaaacatttctgtaatggtatacttcacagatggaagattgcagagggaaggggaaagatagtttgccatctaatgaacacttaaattaattgcaataaagttattagatactttggagataggaatagggatgaagactagatgagatactcagctttcaacatttgttcaaccagttttcactggactgcctactgtgtgacaggcacttaaatgggcattgaatatataaaagagaaggaagggctgtttagttgaatgagactgaccatcttcagagcgaagctctcagggag

SEQ ID NO: 312372 - DNA, 361 bp, Homo sapiens
ggaaatgtgacagcatgagttcgttacatcagattaagtagatttttacgttttctttcagactgtctatgctgtgccaattctgatcttttcatttgtctgtcatcctgctgttcttcccatctatgaagaactgaaagagtgagtatttcatttttacataaatttgagaaaatattagacaattgctgtaactgctgctgaaatatatatttgaattttctcttgaattacatagccgcagccgtagaagaatgatgaatgtgtccaagatttcattttttgctatgtttctcatgtatctgcttgccgccctctttggatacctaacattttacggtaagtaacgcctcctttacca

SEQ ID NO: 312373 - DNA, 357 bp, Homo sapiens
gtaaatgttcatctagcacacaaagttaaaaagttattcctatcttgaacaggggaaactttttccaaacatgtcttttttgtgtgtttgttttcatggtattcctatgaaatgagtcctgttagaagatgtgtatatttttcagaggatatttgtgactgttttgaccttgtttctgttttctttagattgtggtatctgaacgggaactatttggttctgttggtgtcattggtggtcattcttcctttgtcgctgtttagaaatttaggtgagcaaactcatctctaaagagaattgaaatgagcctctcaccagttagttgggctttctctgaatagaaattaatcagaatga

SEQ ID NO: 312374 - DNA, 5281 bp, Homo sapiens
actgacgcgtccccggggtgccgctataacccgccgctcgcagggctgctccacagccgcgcgacgccgccgccttagaacgcctttccagtactgctagcagcagcccgaccacgcgttaccgcacgctcgcgcctttcccttgacacggcggacgccggaggattggggcggcaatttgtcttttccttttttattaaaattatttttcctgcctgttgttggatttggggaaattttttgtttgttttttatgatttgtatttgactgagagaaacccactgaagacgtctgcgtgagaatagagaccaccgaggccgactcgcgggccgctgcacccaccgccaaggacaaaaggagcccagcgctactagctgcacccgattcctcccagtgcttagcatgaagaaggccgaaatgggacgattcagtatttccccggatgaagacagcagcagctacagttccaacagcgacttcaactactcctaccccaccaagcaagctgctctgaaaagccattatgcagatgtagatcctgaaaaccagaactttttacttgaatcgaatttggggaagaagaagtatgaaacagaatttcatccaggtactacttcctttggaatgtcagtatttaatctgagcaatgcgattgtgggcagtggaatccttgggctttcttatgccatggctaatactggaattgctctttttataattctcttgacatttgtgtcaatattttccctgtattctgttcatctccttttgaagactgccaatgaaggagggtctttattatatgaacaattgggatataaggcatttggattagttggaaagcttgcagcatctggatcaattacaatgcagaacattggagctatgtcaagctacctcttcatagtgaaatatgagttgcctttggtgatccaggcattaacgaacattgaagataaaactggattgtggtatctgaacgggaactatttggttctgttggtgtcattggtggtcattcttcctttgtcgctgtttagaaatttaggatatttgggatataccagtggcctttccttgttgtgtatggtgttctttctgattgtggtcatttgcaagaaatttcaggttccgtgtcctgtggaagctgctttgataattaacgaaacaataaacaccaccttaacacagccaacagctcttgtacctgctttgtcacataacgtgactgaaaatgactcttgcagacctcactattttattttcaactcacagactgtctatgctgtgccaattctgatcttttcatttgtctgtcatcctgctgttcttcccatctatgaagaactgaaagaccgcagccgtagaagaatgatgaatgtgtccaagatttcattttttgctatgtttctcatgtatctgcttgccgccctctttggatacctaacattttacgaacatgttgagtcagaattgcttcatacctactcttctatcttgggaactgatattcttcttctcattgtccgtctggctgtgttaatggctgtgaccctgacagtaccagtagttattttcccaatccggagttctgtaactcacttgttgtgtgcatcaaaagatttcagttggtggcgtcatagtctcattacagtgtctatcttggcatttaccaatttacttgtcatctttgtcccaactattagggatatctttggttttattggtgcatctgcagcttctatgttgatttttattcttccttctgccttctatatcaagttggtgaagaaagaacctatgaaatctgtacaaaagattggggctttgttcttcctgttaagtggtgtactggtgatgaccggaagcatggccttgattgttttggattgggtacacaatgcacctggaggtggccattaattggcaccactcaaactcaaactcagtccatctgatgccagtgttgagtaaactcaactactatgaaatttcacctaatgttttcagtttcacttccttttgaagtgcagattcctcgctggttcttctgagtgcagaataagtgaacttttttgttttgttttgtttttttaagaaacttatctgtatgttagaaatggatatgaacaacaaaaccacgagtctcgggttaagggaagtgacaattttattccattccagagaatggacaaactcttaacttttatcaagccacatgcttggctgtgtcattgtttaacttggatattttatgattttacttgaatgtgcctaatggaaccatttgatgtgagaaacaattctttttaatttacagcaaaatattgaataaccattgacaaaaacactattattttttgtaccaaaaatacttaaagacctcagaagcactcttttacttttaagaaattgcttttttgaactttattcagaagcagttatcaataaattccataaaataatgtcattggtatttaaaaatgaatattaatataatgaaatggtttgcctttttgtaggcataataagccaaatacttttttacccaaaataatttttagagaaaatgatgtaatgaaaaattgtaccatgaattaggagcatagttttttccatttaaacgtcaccattacttaaaagatgattgattattgctataccaaatcagatgaactctgttcatcacttttcttctctgtccccaaacaatttggttcattcagactgaaatgtttgtgtcttcaacttattagaatggaagataatgcagatatttctgtgggaaataaaataactaattttgaggtaccaaatagtgcaattgggtaaaacagggtttattcagttgcatctgtctccagtgttgtattgacagctctgggtctttttttgggccagcccttttttgacattgcttccagcagtggaaaatgggcatttgatggcaataggccaaaattattgtgtccagagagtacactttttcaaaatgctcacctactggaagtgtgaattacttgacaatgtatggcttagttgtgttcatgttttgtctacagtagaggtctaatccacaggttacacctatgtttgatatgatataagttctctttgcgtaggccactgggtttctcatgcagtaagctttataaaaactcatttgcactggactgtcatctcattcttgtacaacgtagaattacttgtttacatccaacaaatggttagctagggaaaacagtgcaaactgagtgttagtagtcattttggtccaactgcatgtcaacccttccatttcaatcccagttagaaatgaaaataattactttgaaacttggctttaagagcacatttatcgtacgtcacagtgtatggtgaatatattattaaataatgtggtacttcgctcatcaggcataatgtctaaaatctaatatacataattccattaagtggttgaaggaagcaaataatggaattgtcaattggtcatctggctgtaaggtttgcccttgaactaaaaatgttgtttggggcaagggccagaaatgtggagacatggtttttgttacgcattcttgtattatatgtgactaaatttacaaacaagatacatgtgtaattaaagacccttatggaactggaagacgtcttgtagtgctacattgggtgaaaccgttggtccatttttgtctgtttctatgaagataaaataattgggggccatctagaaatagaaaggcagtgggaagacagattctacggcactgctttcatttaattgggctttaggcactccattcgaatgcagaacctcacctctagttgagaccaagaattggcaaatttgcatgagctcctggaaagagttgctgactttgtatctaagacctgccagggaataccaagagttgtttctacagactttttttttttttttgtatgggagaagatactgtggcaaccaggaaggaatggaaaaaaaattcttttctctacagcaaattaatgtgaggaagctcctccaatcctctggctatttaaggttcaaaatcaagtgcctagggaaaattccaatggatgattttctgggagctatcttgtctaccttgaggttcctgaacaatgaattcccattaatgagcagtcttcagtattaaaaccactgtcttgtcacctcattttgcattactgtcttccgtggatgtttcagttacaactgtaatgttatttatagaacaacattaatccattaaagctaacctatttttcaatatttatgataatctatgtacatatattgtctgtccatatgtatttgtaaataggttgtatataatgtcaggtttgggtcttgggttcaagtgtatatattcctgtaagtttcttaactgcattttgatgaattcacattatgtaactataagaattgtcccaaaagtacctgtacagaaaattgaatattgaaaaattgacaaattgtgtacaaacactaaaaaaaacttgtttaaattgtatttgcaataaacaacatcaaattttttcatgaaatcttggtacaaattcagatctcttatttaaaatttaaataaggaatacattttcaaaatgcagtaatcaaaatgtgatctagtgtaatgaaataaaatgtgatctagtgtaatggaagacctttgagaacctgggtgtattaactttgtgtatatagtgtaaatatccccactgtactgttagaggccaacaattctagtatggcttgttggcaaagagtgctacaccgtttcaatgaaacaatgtatgtttgttttaactgaactaaaataaatacatgcttaatcctgaaaaaaaaaaacaaaaaaaaaaaaaacaacaaaaaacacaaaaaacaaaaaaagaagaaaaaacgacaaaaaaagatgtgggcggcgcgcgcaccggcgggccccaggagaaagtctctttgaaagacacacggcgggggagggcggcggggcccacagtagggcagagtaaacatcggggaccaaacgagggtgtccaccacgaagaaacaaccgggggggtgaacacaacagacaggggggggggggagtttctccacacaaaaaaaaaaaaaacgacgcggcggggagagaaaacaaagagcgcggcttttgaggaaaaaacaccgcaccaagaaggagggatcatcagcaagagggagacaacaaggggggggactaacatacagaggcgagagtcaaagagaagagacgcaagaaaaaaataaaatagccg

SEQ ID NO: 312375 - DNA, 4730 bp, Homo sapiens
actgacgcgtccccggggtgccgctataacccgccgctcgcagggctgctccacagccgcgcgacgccgccgccttagaacgcctttccagtactgctagcagcagcccgaccacgcgttaccgcacgctcgcgcctttcccttgacacggcggacgccggaggattggggcggcaatttgtcttttccttttttattaaaattatttttcctgcctgttgttggatttggggaaattttttgtttgttttttatgatttgtatttgactgagagaaacccactgaagacgtctgcgtgagaatagagaccaccgaggccgactcgcgggccgctgcacccaccgccaaggacaaaaggagcccagcgctactagctgcacccgattcctcccagtgcttagcatgaagaaggccgaaatgggacgattcagtatttccccggatgaagacagcagcagctacagttccaacagcgacttcaactactcctaccccaccaagcaagctgctctgaaaagccattatgcagatgtagatcctgaaaaccagaactttttacttgaatcgaatttggggaagaagaagtatgaaacagaatttaattctcttgacatttgtgtcaatattttccctgtattctgttcatctccttttgaagactgccaatgaaggagggtctttattatatgaacaattgggatataaggcatttggattagttggaaagcttgcagcatctggatcaattacaatgcagaacattggagctatgtcaagctacctcttcatagtgaaatatgagttgcctttggtgatccaggcattaacgaacattgaagataaaactggattgtggtatctgaacgggaactatttggttctgttggtgtcattggtggtcattcttcctttgtcgctgtttagaaatttaggatatttgggatataccagtggcctttccttgttgtgtatggtgttctttctgattgtggtcatttgcaagaaatttcaggttccgtgtcctgtggaagctgctttgataattaacgaaacaataaacaccaccttaacacagccaacagctcttgtacctgctttgtcacataacgtgactgaaaatgactcttgcagacctcactattttattttcaactcacagactgtctatgctgtgccaattctgatcttttcatttgtctgtcatcctgctgttcttcccatctatgaagaactgaaagaccgcagccgtagaagaatgatgaatgtgtccaagatttcattttttgctatgtttctcatgtatctgcttgccgccctctttggatacctaacattttacgaacatgttgagtcagaattgcttcatacctactcttctatcttgggaactgatattcttcttctcattgtccgtctggctgtgttaatggctgtgaccctgacagtaccagtagttattttcccaatccggagttctgtaactcacttgttgtgtgcatcaaaagatttcagttggtggcgtcatagtctcattacagtgtctatcttggcatttaccaatttacttgtcatctttgtcccaactattagggatatctttggttttattggtgcatctgcagcttctatgttgatttttattcttccttctgccttctatatcaagttggtgaagaaagaacctatgaaatctgtacaaaagattggggctttgttcttcctgttaagtggtgtactggtgatgaccggaagcatggccttgattgttttggattgggtacacaatgcacctggaggtggccattaattggcaccactcaaactcaaactcagtccatctgatgccagtgttgagtaaactcaactactatgaaatttcacctaatgttttcagtttcacttccttttgaagtgcagattcctcgctggttcttctgagtgcagaataagtgaacttttttgttttgttttgtttttttaagaaacttatctgtatgttagaaatggatatgaacaacaaaaccacgagtctcgggttaagggaagtgacaattttattccattccagagaatggacaaactcttaacttttatcaagccacatgcttggctgtgtcattgtttaacttggatattttatgattttacttgaatgtgcctaatggaaccatttgatgtgagaaacaattctttttaatttacagcaaaatattgaataaccattgacaaaaacactattattttttgtaccaaaaatacttaaagacctcagaagcactcttttacttttaagaaattgcttttttgaactttattcagaagcagttatcaataaattccataaaataatgtcattggtatttaaaaatgaatattaatataatgaaatggtttgcctttttgtaggcataataagccaaatacttttttacccaaaataatttttagagaaaatgatgtaatgaaaaattgtaccatgaattaggagcatagttttttccatttaaacgtcaccattacttaaaagatgattgattattgctataccaaatcagatgaactctgttcatcacttttcttctctgtccccaaacaatttggttcattcagactgaaatgtttgtgtcttcaacttattagaatggaagataatgcagatatttctgtgggaaataaaataactaattttgaggtaccaaatagtgcaattgggtaaaacagggtttattcagttgcatctgtctccagtgttgtattgacagctctgggtctttttttgggccagcccttttttgacattgcttccagcagtggaaaatgggcatttgatggcaataggccaaaattattgtgtccagagagtacactttttcaaaatgctcacctactggaagtgtgaattacttgacaatgtatggcttagttgtgttcatgttttgtctacagtagaggtctaatccacaggttacacctatgtttgatatgatataagttctctttgcgtaggccactgggtttctcatgcagtaagctttataaaaactcatttgcactggactgtcatctcattcttgtacaacgtagaattacttgtttacatccaacaaatggttagctagggaaaacagtgcaaactgagtgttagtagtcattttggtccaactgcatgtcaacccttccatttcaatcccagttagaaatgaaaataattactttgaaacttggctttaagagcacatttatcgtacgtcacagtgtatggtgaatatattattaaataatgtggtacttcgctcatcaggcataatgtctaaaatctaatatacataattccattaagtggttgaaggaagcaaataatggaattgtcaattggtcatctggctgtaaggtttgcccttgaactaaaaatgttgtttggggcaagggccagaaatgtggagacatggtttttgttacgcattcttgtattatatgtgactaaatttacaaacaagatacatgtgtaattaaagacccttatggaactggaagacgtcttgtagtgctacattgggtgaaaccgttggtccatttttgtctgtttctatgaagataaaataattgggggccatctagaaatagaaaggcagtgggaagacagattctacggcactgctttcatttaattgggctttaggcactccattcgaatgcagaacctcacctctagttgagaccaagaattggcaaatttgcatgagctcctggaaagagttgctgactttgtatctaagacctgccagggaataccaagagttgtttctacagactttttttttttttttgtatgggagaagatactgtggcaaccaggaaggaatggaaaaaaaattcttttctctacagcaaattaatgtgaggaagctcctccaatcctctggctatttaaggttcaaaatcaagtgcctagggaaaattccaatggatgattttctgggagctatcttgtctaccttgaggttcctgaacaatgaattcccattaatgagcagtcttcagtattaaaaccactgtcttgtcacctcattttgcattactgtcttccgtggatgtttcagttacaactgtaatgttatttatagaacaacattaatccattaaagctaacctatttttcaatatttatgataatctatgtacatatattgtctgtccatatgtatttgtaaataggttgtatataatgtcaggtttgggtcttgggttcaagtgtatatattcctgtaagtttcttaactgcattttgatgaattcacattatgtaactataagaattgtcccaaaagtacctgtacagaaaattgaatattgaaaaattgacaaattgtgtacaaacactaaaaaaaacttgtttaaattgtatttgcaataaacaacatcaaattttttcatgaaatcttggtacaaattcagatctcttatttaaaatttaaataaggaatacattttcaaaatgcagtaatcaaaatgtgatctagtgtaatgaaataaaatgtgatctagtgtaatggaagacctttgagaacctgggtgtattaactttgtgtatatagtgtaaatatccccactgtactgttagaggccaacaattctagtatggcttgttggcaaagagtgctacaccgtttcaatgaaacaatgtatgtttgttttaactgaactaaaataaatacatgcttaatcctga

SEQ ID NO: 312376 - DNA, 4788 bp, Homo sapiens
actgacgcgtccccggggtgccgctataacccgccgctcgcagggctgctccacagccgcgcgacgccgccgccttagaacgcctttccagtactgctagcagcagcccgaccacgcgttaccgcacgctcgcgcctttcccttgacacggcggacgccggaggattggggcggcaatttgtcttttccttttttattaaaattatttttcctgcctgttgttggatttggggaaattttttgtttgttttttatgatttgtatttgactgagagaaacccactgaagacgtctgcgtgagaatagagaccaccgagctgcacccgattcctcccagtgcttagcatgaagaaggccgaaatgggacgattcagtatttccccggatgaagacagcagcagctacagttccaacagcgacttcaactactcctaccccaccaagcaagctgctctgaaaagccattatgcagatgtagatcctgaaaaccagaactttttacttgaatcgaatttggggaagaagaagtatgaaacagaatttcatccaggtactacttcctttggaatgtcagtatttaatctgagcaatgcgattgtgggcagtggaatccttgggctttcttatgccatggctaatactggaattgctctttttataattctcttgacatttgtgtcaatattttccctgtattctgttcatctccttttgaagactgccaatgaaggagggtctttattatatgaacaattgggatataaggcatttggattagttggaaagcttgcagcatctggatcaattacaatgcagaacattggagctatgtcaagctacctcttcatagtgaaatatgagttgcctttggtgatccaggcattaacgaacattgaagataaaactggattgtggtatctgaacgggaactatttggttctgttggtgtcattggtggtcattcttcctttgtcgctgtttagaaatttaggatatttgggatataccagtggcctttccttgttgtgtatggtgttctttctgattgtggtcatttgcaagaaatttcaggttccgtgtcctgtggaagctgctttgataattaacgaaacaataaacaccaccttaacacagccaacagctcttgtacctgctttgtcacataacgtgactgaaaatgactcttgcagacctcactattttattttcaactcacagactgtctatgctgtgccaattctgatcttttcatttgtctgtcatcctgctgttcttcccatctatgaagaactgaaagaccgcagccgtagaagaatgatgaatgtgtccaagatttcattttttgctatgtttctcatgtatctgcttgccgccctctttggatacctaacattttacgaacatgttgagtcagaattgcttcatacctactcttctatcttgggaactgatattcttcttctcattgtccgtctggctgtgttaatggctgtgaccctgacagtaccagtagttattttcccaatccggagttctgtaactcacttgttgtgtgcatcaaaagatttcagttggtggcgtcatagtctcattacagtgtctatcttggcatttaccaatttacttgtcatctttgtcccaactattagggatatctttggttttattggtgcatctgcagcttctatgttgatttttattcttccttctgccttctatatcaagttggtgaagaaagaacctatgaaatctgtacaaaagattggggctttgttcttcctgttaagtggtgtactggtgatgaccggaagcatggccttgattgttttggattgggtacacaatgcacctggaggtggccattaattggcaccactcaaactcaaactcagtccatctgatgccagtgttgagtaaactcaactactatgaaatttcacctaatgttttcagtttcacttccttttgaagtgcagattcctcgctggttcttctgagtgcagaataagtgaacttttttgttttgttttgtttttttaagaaacttatctgtatgttagaaatggatatgaacaacaaaaccacgagtctcgggttaagggaagtgacaattttattccattccagagaatggacaaactcttaacttttatcaagccacatgcttggctgtgtcattgtttaacttggatattttatgattttacttgaatgtgcctaatggaaccatttgatgtgagaaacaattctttttaatttacagcaaaatattgaataaccattgacaaaaacactattattttttgtaccaaaaatacttaaagacctcagaagcactcttttacttttaagaaattgcttttttgaactttattcagaagcagttatcaataaattccataaaataatgtcattggtatttaaaaatgaatattaatataatgaaatggtttgcctttttgtaggcataataagccaaatacttttttacccaaaataatttttagagaaaatgatgtaatgaaaaattgtaccatgaattaggagcatagttttttccatttaaacgtcaccattacttaaaagatgattgattattgctataccaaatcagatgaactctgttcatcacttttcttctctgtccccaaacaatttggttcattcagactgaaatgtttgtgtcttcaacttattagaatggaagataatgcagatatttctgtgggaaataaaataactaattttgaggtaccaaatagtgcaattgggtaaaacagggtttattcagttgcatctgtctccagtgttgtattgacagctctgggtctttttttgggccagcccttttttgacattgcttccagcagtggaaaatgggcatttgatggcaataggccaaaattattgtgtccagagagtacactttttcaaaatgctcacctactggaagtgtgaattacttgacaatgtatggcttagttgtgttcatgttttgtctacagtagaggtctaatccacaggttacacctatgtttgatatgatataagttctctttgcgtaggccactgggtttctcatgcagtaagctttataaaaactcatttgcactggactgtcatctcattcttgtacaacgtagaattacttgtttacatccaacaaatggttagctagggaaaacagtgcaaactgagtgttagtagtcattttggtccaactgcatgtcaacccttccatttcaatcccagttagaaatgaaaataattactttgaaacttggctttaagagcacatttatcgtacgtcacagtgtatggtgaatatattattaaataatgtggtacttcgctcatcaggcataatgtctaaaatctaatatacataattccattaagtggttgaaggaagcaaataatggaattgtcaattggtcatctggctgtaaggtttgcccttgaactaaaaatgttgtttggggcaagggccagaaatgtggagacatggtttttgttacgcattcttgtattatatgtgactaaatttacaaacaagatacatgtgtaattaaagacccttatggaactggaagacgtcttgtagtgctacattgggtgaaaccgttggtccatttttgtctgtttctatgaagataaaataattgggggccatctagaaatagaaaggcagtgggaagacagattctacggcactgctttcatttaattgggctttaggcactccattcgaatgcagaacctcacctctagttgagaccaagaattggcaaatttgcatgagctcctggaaagagttgctgactttgtatctaagacctgccagggaataccaagagttgtttctacagactttttttttttttttgtatgggagaagatactgtggcaaccaggaaggaatggaaaaaaaattcttttctctacagcaaattaatgtgaggaagctcctccaatcctctggctatttaaggttcaaaatcaagtgcctagggaaaattccaatggatgattttctgggagctatcttgtctaccttgaggttcctgaacaatgaattcccattaatgagcagtcttcagtattaaaaccactgtcttgtcacctcattttgcattactgtcttccgtggatgtttcagttacaactgtaatgttatttatagaacaacattaatccattaaagctaacctatttttcaatatttatgataatctatgtacatatattgtctgtccatatgtatttgtaaataggttgtatataatgtcaggtttgggtcttgggttcaagtgtatatattcctgtaagtttcttaactgcattttgatgaattcacattatgtaactataagaattgtcccaaaagtacctgtacagaaaattgaatattgaaaaattgacaaattgtgtacaaacactaaaaaaaacttgtttaaattgtatttgcaataaacaacatcaaattttttcatgaaatcttggtacaaattcagatctcttatttaaaatttaaataaggaatacattttcaaaatgcagtaatcaaaatgtgatctagtgtaatgaaataaaatgtgatctagtgtaatggaagacctttgagaacctgggtgtattaactttgtgtatatagtgtaaatatccccactgtactgttagaggccaacaattctagtatggcttgttggcaaagagtgctacaccgtttcaatgaaacaatgtatgtttgttttaactgaactaaaataaatacatgcttaatcctga

SEQ ID NO: 312377 - DNA, 4958 bp, Homo sapiens
actgacgcgtccccggggtgccgctataacccgccgctcgcagggctgctccacagccgcgcgacgccgccgccttagaacgcctttccagtactgctagcagcagcccgaccacgcgttaccgcacgctcgcgcctttcccttgacacggcggacgccggaggattggggcggcaatttgtcttttccttttttattaaaattatttttcctgcctgttgttggatttggggaaattttttgtttgttttttatgatttgtatttgactgagagaaacccactgaagacgtctgcgtgagaatagagaccaccgaggccgactcgcgggccgctgcacccaccgccaaggacaaaaggagcccagcgctactagctgcacccgattcctcccagtgcttagcatgaagaaggccgaaatgggacgattcagtatttccccggatgaagacagcagcagctacagttccaacagcgacttcaactactcctaccccaccaagcaagctgctctgaaaagccattatgcagatgtagatcctgaaaaccagaactttttacttgaatcgaatttggggaagaagaagtatgaaacagaatttcatccaggtactacttcctttggaatgtcagtatttaatctgagcaatgcgattgtgggcagtggaatccttgggctttcttatgccatggctaatactggaattgctctttttataattctcttgacatttgtgtcaatattttccctgtattctgttcatctccttttgaagactgccaatgaaggagggtctttattatatgaacaattgggatataaggcatttggattagttggaaagcttgcagcatctggatcaattacaatgcagaacattggagctatgtcaagctacctcttcatagtgaaatatgagttgcctttggtgatccaggcattaacgaacattgaagataaaactggattgtggtatctgaacgggaactatttggttctgttggtgtcattggtggtcattcttcctttgtcgctgtttagaaatttaggatatttgggatataccagtggcctttccttgttgtgtatggtgttctttctgattgtggtcatttgcaagaaatttcaggttccgtgtcctgtggaagctgctttgataattaacgaaacaataaacaccaccttaacacagccaacagctcttgtacctgctttgtcacataacgtgactgaaaatgactcttgcagacctcactattttattttcaactcacagactgtctatgctgtgccaattctgatcttttcatttgtctgtcatcctgctgttcttcccatctatgaagaactgaaagaccgcagccgtagaagaatgatgaatgtgtccaagatttcattttttgctatgtttctcatgtatctgcttgccgccctctttggatacctaacattttacgaacatgttgagtcagaattgcttcatacctactcttctatcttgggaactgatattcttcttctcattgtccgtctggctgtgttaatggctgtgaccctgacagtaccagtagttattttcccaatccggagttctgtaactcacttgttgtgtgcatcaaaagatttcagttggtggcgtcatagtctcattacagtgtctatcttggcatttaccaatttacttgtcatctttgtcccaactattagggatatctttggttttattggtaagttttagaaagtatccaagtggattcaaacatcagggattttaagatttaaagaatgaatgacgagtggttcattgaatcctcaagaaacataaatgttgttttacaggtgcatctgcagcttctatgttgatttttattcttccttctgccttctatatcaagttggtgaagaaagaacctatgaaatctgtacaaaagattggggctttgttcttcctgttaagtggtgtactggtgatgaccggaagcatggccttgattgttttggattgggtacacaatgcacctggaggtggccattaattggcaccactcaaactcaaactcagtccatctgatgccagtgttgagtaaactcaactactatgaaatttcacctaatgttttcagtttcacttccttttgaagtgcagattcctcgctggttcttctgagtgcagaataagtgaacttttttgttttgttttgtttttttaagaaacttatctgtatgttagaaatggatatgaacaacaaaaccacgagtctcgggttaagggaagtgacaattttattccattccagagaatggacaaactcttaacttttatcaagccacatgcttggctgtgtcattgtttaacttggatattttatgattttacttgaatgtgcctaatggaaccatttgatgtgagaaacaattctttttaatttacagcaaaatattgaataaccattgacaaaaacactattattttttgtaccaaaaatacttaaagacctcagaagcactcttttacttttaagaaattgcttttttgaactttattcagaagcagttatcaataaattccataaaataatgtcattggtatttaaaaatgaatattaatataatgaaatggtttgcctttttgtaggcataataagccaaatacttttttacccaaaataatttttagagaaaatgatgtaatgaaaaattgtaccatgaattaggagcatagttttttccatttaaacgtcaccattacttaaaagatgattgattattgctataccaaatcagatgaactctgttcatcacttttcttctctgtccccaaacaatttggttcattcagactgaaatgtttgtgtcttcaacttattagaatggaagataatgcagatatttctgtgggaaataaaataactaattttgaggtaccaaatagtgcaattgggtaaaacagggtttattcagttgcatctgtctccagtgttgtattgacagctctgggtctttttttgggccagcccttttttgacattgcttccagcagtggaaaatgggcatttgatggcaataggccaaaattattgtgtccagagagtacactttttcaaaatgctcacctactggaagtgtgaattacttgacaatgtatggcttagttgtgttcatgttttgtctacagtagaggtctaatccacaggttacacctatgtttgatatgatataagttctctttgcgtaggccactgggtttctcatgcagtaagctttataaaaactcatttgcactggactgtcatctcattcttgtacaacgtagaattacttgtttacatccaacaaatggttagctagggaaaacagtgcaaactgagtgttagtagtcattttggtccaactgcatgtcaacccttccatttcaatcccagttagaaatgaaaataattactttgaaacttggctttaagagcacatttatcgtacgtcacagtgtatggtgaatatattattaaataatgtggtacttcgctcatcaggcataatgtctaaaatctaatatacataattccattaagtggttgaaggaagcaaataatggaattgtcaattggtcatctggctgtaaggtttgcccttgaactaaaaatgttgtttggggcaagggccagaaatgtggagacatggtttttgttacgcattcttgtattatatgtgactaaatttacaaacaagatacatgtgtaattaaagacccttatggaactggaagacgtcttgtagtgctacattgggtgaaaccgttggtccatttttgtctgtttctatgaagataaaataattgggggccatctagaaatagaaaggcagtgggaagacagattctacggcactgctttcatttaattgggctttaggcactccattcgaatgcagaacctcacctctagttgagaccaagaattggcaaatttgcatgagctcctggaaagagttgctgactttgtatctaagacctgccagggaataccaagagttgtttctacagactttttttttttttttgtatgggagaagatactgtggcaaccaggaaggaatggaaaaaaaattcttttctctacagcaaattaatgtgaggaagctcctccaatcctctggctatttaaggttcaaaatcaagtgcctagggaaaattccaatggatgattttctgggagctatcttgtctaccttgaggttcctgaacaatgaattcccattaatgagcagtcttcagtattaaaaccactgtcttgtcacctcattttgcattactgtcttccgtggatgtttcagttacaactgtaatgttatttatagaacaacattaatccattaaagctaacctatttttcaatatttatgataatctatgtacatatattgtctgtccatatgtatttgtaaataggttgtatataatgtcaggtttgggtcttgggttcaagtgtatatattcctgtaagtttcttaactgcattttgatgaattcacattatgtaactataagaattgtcccaaaagtacctgtacagaaaattgaatattgaaaaattgacaaattgtgtacaaacactaaaaaaaacttgtttaaattgtatttgcaataaacaacatcaaattttttcatgaaatcttggtacaaattcagatctcttatttaaaatttaaataaggaatacattttcaaaatgcagtaatcaaaatgtgatctagtgtaatgaaataaaatgtgatctagtgtaatggaagacctttgagaacctgggtgtattaactttgtgtatatagtgtaaatatccccactgtactgttagaggccaacaattctagtatggcttgttggcaaagagtgctacaccgtttcaatgaaacaatgtatgtttgttttaactgaactaaaataaatacatgcttaatcctga

SEQ ID NO: 312378 - DNA, 4789 bp, Homo sapiens
actgacgcgtccccggggtgccgctataacccgccgctcgcagggctgctccacagccgcgcgacgccgccgccttagaacgcctttccagtactgctagcagcagcccgaccacgcgttaccgcacgctcgcgcctttcccttgacacggcggacgccggaggattggggcggcaatttgtcttttccttttttattaaaattatttttcctgcctgttgttggatttggggaaattttttgtttgttttttatgatttgtatttgactgagagaaacccactgaagacgtctgcgtgagaatagagaccaccgaggccgactcgcgggccgctgcacccaccgccaaggacaaaaggagcccagcgctactagctgcacccgattcctcccagtgcttagcatgaagaaggccgaaatgggacgattcagtatttccccggatgaagacagcagcagctacagttccaacagcgacttcaactactcctaccccaccaagcaagctgctctgaaaagccattatgcagatgtagatcctgaaaaccagaactttttacttgaatcgaatttggggaagaagaagtatgaaacagaatttcatccaggtactacttcctttggaatgtcagtatttaatctgagcaatgcgattgtgggcagtggaatccttgggctttcttatgccatggctaatactggaattgctctttttataattctcttgacatttgtgtcaatattttccctgtattctgttcatctccttttgaagactgccaatgaaggagggtctttattatatgaacaattgggatataaggcatttggattagttggaaagcttgcagcatctggatcaattacaatgcagaacattggagctatgtcaagctacctcttcatagtgaaatatgagttgcctttggtgatccaggcattaacgaacattgaagataaaactggattgtggtatctgaacgggaactatttggttctgttggtgtcattggtggtcattcttcctttgtcgctgtttagaaatttaggatatttgggatataccagtggcctttccttgttgtgtatggtgttctttctgattgtggtcatttgcaagaaatttcaggttccgtgtcctgtggaagctgctttgataattaacgaaacaataaacaccaccttaacacagccaacagctcttgtacctgctttgtcacataacgtgactgaaaatgactcttgcagacctcactattttattttcaactcacagactgtctatgctgtgccaattctgatcttttcatttgtctgtcatcctgctgttcttcccatctatgaagaactgaaagaccgcagccgtagaagaatgatgaatgtgtccaagatttcattttttgctatgtttctcatgtatctgcttgccgccctctttggatacctaacattttacgaacatgttgagtcagaattgcttcatacctactcttctatcttgggaactgatattcttcttctcattgtccgtctggctgtgttaatggctgtgaccctgacagtaccagtagttattttcccaatccggagttctgtaactcacttgttgtgtgcatcaaaagatttcagttggtggcgtcatagtctcattacagtgtctatcttggcatttaccaatttacttgtcatctttgtcccaactattagggatatctttggttttattggtgcatctgcagcttctatgttgatttttattcttccttctgccttctatatcaagttggtgaagaaagaacctatgaaatctgtacaaaagattggggctttgttcttcctgttaagtggtgtactggtgatgaccggaagcatggccttgattgttttggattgggtacacaatgcacctggaggtggccattaattggcaccactcaaactcaaactcagtccatctgatgccagtgttgagtaaactcaactactatgaaatttcacctaatgttttcagtttcacttccttttgaagtgcagattcctcgctggttcttctgagtgcagaataagtgaacttttttgttttgttttgtttttttaagaaacttatctgtatgttagaaatggatatgaacaacaaaacctcttaacttttatcaagccacatgcttggctgtgtcattgtttaacttggatattttatgattttacttgaatgtgcctaatggaaccatttgatgtgagaaacaattctttttaatttacagcaaaatattgaataaccattgacaaaaacactattattttttgtaccaaaaatacttaaagacctcagaagcactcttttacttttaagaaattgcttttttgaactttattcagaagcagttatcaataaattccataaaataatgtcattggtatttaaaaatgaatattaatataatgaaatggtttgcctttttgtaggcataataagccaaatacttttttacccaaaataatttttagagaaaatgatgtaatgaaaaattgtaccatgaattaggagcatagttttttccatttaaacgtcaccattacttaaaagatgattgattattgctataccaaatcagatgaactctgttcatcacttttcttctctgtccccaaacaatttggttcattcagactgaaatgtttgtgtcttcaacttattagaatggaagataatgcagatatttctgtgggaaataaaataactaattttgaggtaccaaatagtgcaattgggtaaaacagggtttattcagttgcatctgtctccagtgttgtattgacagctctgggtctttttttgggccagcccttttttgacattgcttccagcagtggaaaatgggcatttgatggcaataggccaaaattattgtgtccagagagtacactttttcaaaatgctcacctactggaagtgtgaattacttgacaatgtatggcttagttgtgttcatgttttgtctacagtagaggtctaatccacaggttacacctatgtttgatatgatataagttctctttgcgtaggccactgggtttctcatgcagtaagctttataaaaactcatttgcactggactgtcatctcattcttgtacaacgtagaattacttgtttacatccaacaaatggttagctagggaaaacagtgcaaactgagtgttagtagtcattttggtccaactgcatgtcaacccttccatttcaatcccagttagaaatgaaaataattactttgaaacttggctttaagagcacatttatcgtacgtcacagtgtatggtgaatatattattaaataatgtggtacttcgctcatcaggcataatgtctaaaatctaatatacataattccattaagtggttgaaggaagcaaataatggaattgtcaattggtcatctggctgtaaggtttgcccttgaactaaaaatgttgtttggggcaagggccagaaatgtggagacatggtttttgttacgcattcttgtattatatgtgactaaatttacaaacaagatacatgtgtaattaaagacccttatggaactggaagacgtcttgtagtgctacattgggtgaaaccgttggtccatttttgtctgtttctatgaagataaaataattgggggccatctagaaatagaaaggcagtgggaagacagattctacggcactgctttcatttaattgggctttaggcactccattcgaatgcagaacctcacctctagttgagaccaagaattggcaaatttgcatgagctcctggaaagagttgctgactttgtatctaagacctgccagggaataccaagagttgtttctacagactttttttttttttttgtatgggagaagatactgtggcaaccaggaaggaatggaaaaaaaattcttttctctacagcaaattaatgtgaggaagctcctccaatcctctggctatttaaggttcaaaatcaagtgcctagggaaaattccaatggatgattttctgggagctatcttgtctaccttgaggttcctgaacaatgaattcccattaatgagcagtcttcagtattaaaaccactgtcttgtcacctcattttgcattactgtcttccgtggatgtttcagttacaactgtaatgttatttatagaacaacattaatccattaaagctaacctatttttcaatatttatgataatctatgtacatatattgtctgtccatatgtatttgtaaataggttgtatataatgtcaggtttgggtcttgggttcaagtgtatatattcctgtaagtttcttaactgcattttgatgaattcacattatgtaactataagaattgtcccaaaagtacctgtacagaaaattgaatattgaaaaattgacaaattgtgtacaaacactaaaaaaaacttgtttaaattgtatttgcaataaacaacatcaaattttttcatgaaatcttggtacaaattcagatctcttatttaaaatttaaataaggaatacattttcaaaatgcagtaatcaaaatgtgatctagtgtaatgaaataaaatgtgatctagtgtaatggaagacctttgagaacctgggtgtattaactttgtgtatatagtgtaaatatccccactgtactgttagaggccaacaattctagtatggcttgttggcaaagagtgctacaccgtttcaatgaaacaatgtatgtttgttttaactgaactaaaataaatacatgcttaatcctga

SEQ ID NO: 312379 - DNA, 4553 bp, Homo sapiens
actgacgcgtccccggggtgccgctataacccgccgctcgcagggctgctccacagccgcgcgacgccgccgccttagaacgcctttccagtactgctagcagcagcccgaccacgcgttaccgcacgctcgcgcctttcccttgacacggcggacgccggaggattggggcggcaatttgtcttttccttttttattaaaattatttttcctgcctgttgttggatttggggaaattttttgtttgttttttatgatttgtatttgactgagagaaacccactgaagacgtctgcgtgagaatagagaccaccgaggccgactcgcgggccgctgcacccaccgccaaggacaaaaggagcccagcgctactagctgcacccgattcctcccagtgcttagcatgaagaaggccgaaatgggacgattcagtatttccccggatgaagacagcagcagctacagttccaacagcgacttcaactactcctaccccaccaagcaagctgctctgaaaagccattatgcagatgtagatcctgaaaaccagaactttttacttgaatcgaatttggggaagaagaagtatgaaacagaatttcatccaggtactacttcctttggaatgtcagtatttaatctgagcaatgcgattgtgggcagtggaatccttgggctttcttatgccatggctaatactggaattgctctttttataattctcttgacatttgtgtcaatattttccctgtattctgttcatctccttttgaagactgccaatgaaggagggtctttattatatgaacaattgggatataaggcatttggattagttggaaagcttgcagcatctggatcaattacaatgcagaacattggagctatgtcaagctacctcttcatagtgaaatatgagttgcctttggtgatccaggcattaacgaacattgaagataaaactggattgtggtatctgaacgggaactatttggttctgttggtgtcattggtggtcattcttcctttgtcgctgtttagaaatttaggatatttgggatataccagtggcctttccttgttgtgtatggtgttctttctgattgtggtcatttgcaagaaatttcaggttccgtgtcctgtggaagctgctttgataattaacgaaacaataaacaccaccttaacacagccaacagctcttgtacctgctttgtcacataacgtgactgaaaatgactcttgcagacctcactattttattttcaactcacagactgtctatgctgtgccaattctgatcttttcatttgtctgtcatcctgctgttcttcccatctatgaagaactgaaagaccgcagccgtagaagaatgatgaatgtgtccaagatttcattttttgctatgtttctcatgtatctgcttgccgccctctttggatacctaacattttacgaacatgttgagtcagaattgcttcatacctactcttctatcttgggaactgatattcttcttctcattgtccgtctggctgtgttaatggctgtgaccctgacagtaccagtagttattttcccaatccggagttctgtaactcacttgttgtgtgcatcaaaagatttcagttggtggcgtcatagtctcattacagtgtctatcttggcatttaccaatttacttgtcatctttgtcccaactattagggatatctttggttttattggtgcatctgcagcttctatgttgatttttattcttccttctgccttctatatcaagttggtgaagaaagaacctatgaaatctgtacaaaagattggggctttgttcttcctgttaagtggtgtactggtgatgaccggaagcatggccttgattgttttggattgggtacacaatgcacctggaggtggccattaattggcaccactcaaactcaaactcagtccatctgatgccagtgttgagtaaactcaactactatgaaatttcacctaatgttttcagtttcacttccttttgaagtgcagattcctcgctggttcttctgagtgcagaataagtgaacttttttgttttgttttgtttttttaagaaacttatctgtatgttagaaatggatatgaacaacaaaaccacgagtctcgggttaagggaagtgacaattttattccattccagagaatggacaaactcttaacttttatcaagccacatgcttggctgtgtcattgtttaacttggatattttatgattttacttgaatgtgcctaatggaaccatttgatgtgagaaacaattctttttaatttacagcaaaatattgaataaccattgacaaaaacactattattttttgtaccaaaaatacttaaagacctcagaagcactcttttacttttaagaaattgcttttttgaactttattcagaagcagttatcaataaattccataaaataatgtcattggtatttaaaaatgaatattaatataatgaaatggtttgcctttttgtaggcataataagccaaatacttttttacccaaaataatttttagagaaaatgatgtaatgaaaaattgtaccatgaattaggagcatagttttttccatttaaacgtcaccattacttaaaagatgattgattattgctataccaaatcagatgaactctgttcatcacttttcttctctgtccccaaacaatttggttcattcagactgaaatgtttgtgtcttcaacttattagaatggaagataatgcagatatttctgtgggaaataaaataactaattttgaggtaccaaatagtgcaattgggtaaaacagggtttattcagttgcatctgtctccagtgttgtattgacagctctgggtctttttttgggccagcccttttttgacattgcttccagcagtggaaaatgggcatttgatggcaataggccaaaattattgtgtccagagagtacactttttcaaaatgctcacctactggaagtgtgaattacttgacaatgtatggcttagttgtgttcatgttttgtctacagtagaggtctaatccacaggttacacctatgtttgatatgatataagttctctttgcgtaggccactgggtttctcatgcagtaagctttataaaaactcatttgcactggactgtcatctcattcttgtacaacgtagaattacttgtttacatccaacaaatggttagctagggaaaacagtgcaaactgagtgttagtagtcattttggtccaactgcatgtcaacccttccatttcaatcccagttagaaatgaaaataattactttgaaacttggctttaagagcacatttatcgtacgtcacagtgtatggtgaatatattattaaataatgtggtacttcgctcatcaggcataatgtctaaaatctaatatacataattccattaagtggttgaaggaagcaaataatggaattgtcaattggtcatctggctgtaaggtttgcccttgaactaaaaatgttgtttggggcaagggccagaaatgtggagacatggtttttgttacgcattcttgtattatatgtgactaaatttacaaacaagatacatgtgtaattaaagacccttatggaactggaagacgtcttgtagtgctacattgggtgaaaccgttggtccatttttgtctgtttctatgaagataaaataattgggggccatctagaaatagaaaggcagtgggaagacagattctacggcactgctttcatttaattgggctttaggcactccattcgaatgcagaacctcacctctagttgagaccaagaattggcaaatttgcatgagctcctggaaagagttgctgactttgtatctaagacctgccagggaataccaagagttgtttctacagactttttttttttttttgtatgggagaagatactgtggcaaccaggaaggaatggaaaaaaaattcttttctctacagcaaattaatgtgaggaagctcctccaatcctctggctatttaaggttcaaaatcaagtgcctagggaaaattccaatggatgattttctgggagctatcttgtctaccttgaggttcctgaacaatgaattcccattaatgagcagtcttcagtattaaaaccactgtcttgtcacctcattttgcattactgtcttccgtggatgtttcagttacaactgtaatgttatttatagaacaacattaatccattaaagctaacctatttttcaatatttatgataatctatgtacatatattgtctgtccatatgtatttgtaaataggttgtatataatgtcaggtttgggtcttgggttcaagtgtatatattcctgtaagtttcttaactgcattttgatgaattcacattatgtaactataagaattgtcccaaaagtacctgtacagaaaattgaatattgaaaaattgacaaattgtgtacaaacactaaaaaaaacttgtttaaattgtatttgcaataaacaacatcaaattttttcatga

SEQ ID NO: 312380 - DNA, 4267 bp, Homo sapiens
  misc_feature (4254)..(4255): n is a, c, g, or t
actgacgcgtccccggggtgccgctataacccgccgctcgcagggctgctccacagccgcgcgacgccgccgccttagaacgcctttccagtactgctagcagcagcccgaccacgcgttaccgcacgctcgcgcctttcccttgacacggcggacgccggaggattggggcggcaatttgtcttttccttttttattaaaattatttttcctgcctgttgttggatttggggaaattttttgtttgttttttatgatttgtatttgactgagagaaacccactgaagacgtctgcgtgagaatagagaccaccgaggccgactcgcgggccgctgcacccaccgccaaggacaaaaggagcccagcgctactagctgcacccgattcctcccagtgcttagcatgaagaaggccgaaatgggacgattcagtatttccccggatgaagacagcagcagctacagttccaacagcgacttcaactactcctaccccaccaagcaagctgctctgaaaagccattatgcagatgtagatcctgaaaaccagaactttttacttgaatcgaatttggggaagaagaagtatgaaacagaatttcatccaggtactacttcctttggaatgtcagtatttaatctgagcaatgcgattgtgggcagtggaatccttgggctttcttatgccatggctaatactggaattgctctttttataattctcttgacatttgtgtcaatattttccctgtattctgttcatctccttttgaagactgccaatgaaggagggtctttattatatgaacaattgggatataaggcatttggattagttggaaagcttgcagcatctggatcaattacaatgcagaacattggagctatgtcaagctacctcttcatagtgaaatatgagttgcctttggtgatccaggcattaacgaacattgaagataaaactggattgtggtatctgaacgggaactatttggttctgttggtgtcattggtggtcattcttcctttgtcgctgtttagaaatttaggatatttgggatataccagtggcctttccttgttgtgtatggtgttctttctgattgtggtcatttgcaagaaatttcaggttccgtgtcctgtggaagctgctttgataattaacgaaacaataaacaccaccttaacacagccaacagctcttgtacctgctttgtcacataacgtgactgaaaatgactcttgcagacctcactattttattttcaactcacagactgtctatgctgtgccaattctgatcttttcatttgtctgtcatcctgctgttcttcccatctatgaagaactgaaagaccgcagccgtagaagaatgatgaatgtgtccaagatttcattttttgctatgtttctcatgtatctgcttgccgccctctttggatacctaacattttacgaacatgttgagtcagaattgcttcatacctactcttctatcttgggaactgatattcttcttctcattgtccgtctggctgtgttaatggctgtgaccctgacagtaccagtagttattttcccaatccggagttctgtaactcacttgttgtgtgcatcaaaagatttcagttggtggcgtcatagtctcattacagtgtctatcttggcatttaccaatttacttgtcatctttgtcccaactattagggatatctttggttttattggtgcatctgcagcttctatgttgatttttattcttccttctgccttctatatcaagttggtgaagaaagaacctatgaaatctgtacaaaagattggggctttgttcttcctgttaagtggtgtactggtgatgaccggaagcatggccttgattgttttggattgggtacacaatgcacctggaggtggccattaattggcaccactcaaactcaaactcagtccatctgatgccagtgttgagtaaactcaactactatgaaatttcacctaatgttttcagtttcacttccttttgaagtgcagattcctcgctggttcttctgagtgcagaataagtgaacttttttgttttgttttgtttttttaagaaacttatctgtatgttagaaatggatatgaacaacaaaaccacgagtctcgggttaagggaagtgacaattttattccattccagagaatggacaaactcttaacttttatcaagccacatgcttggctgtgtcattgtttaacttggatattttatgattttacttgaatgtgcctaatggaaccatttgatgtgagaaacaattctttttaatttacagcaaaatattgaataaccattgacaaaaacactattattttttgtaccaaaaatacttaaagacctcagaagcactcttttacttttaagaaattgcttttttgaactttattcagaagcagttatcaataaattccataaaataatgtcattggtatttaaaaatgaatattaatataatgaaatggtttgcctttttgtaggcataataagccaaatacttttttacccaaaataatttttagagaaaatgatgtaatgaaaaattgtaccatgaattaggagcatagttttttccatttaaacgtcaccattacttaaaagatgattgattattgctataccaaatcagatgaactctgttcatcacttttcttctctgtccccaaacaatttggttcattcagactgaaatgtttgtgtcttcaacttattagaatggaagataatgcagatatttctgtgggaaataaaataactaattttgaggtaccaaatagtgcaattgggtaaaacagggtttattcagttgcatctgtctccagtgttgtattgacagctctgggtctttttttgggccagcccttttttgacattgcttccagcagtggaaaatgggcatttgatggcaataggccaaaattattgtgtccagagagtacactttttcaaaatgctcacctactggaagtgtgaattacttgacaatgtatggcttagttgtgttcatgttttgtctacagtagaggtctaatccacaggttacacctatgtttgatatgatataagttctctttgcgtaggccactgggtttctcatgcagtaagctttataaaaactcatttgcactggactgtcatctcattcttgtacaacgtagaattacttgtttacatccaacaaatggttagctagggaaaacagtgcaaactgagtgttagtagtcattttggtccaactgcatgtcaacccttccatttcaatcccagttagaaatgaaaataattactttgaaacttggctttaagagcacatttatcgtacgtcacagtgtatggtgaatatattattaaataatgtggtacttcgctcatcaggcataatgtctaaaatctaatatacataattccattaagtggttgaaggaagcaaataatggaattgtcaattggtcatctggctgtaaggtttgcccttgaactaaaaatgttgtttggggcaagggccagaaatgtggagacatggtttttgttacgcattcttgtattatatgtgactaaatttacaaacaagatacatgtgtaattaaagacccttatggaactggaagacgtcttgtagtgctacattgggtgaaaccgttggtccatttttgtctgtttctatgaagataaaataattgggggccatctagaaatagaaaggcagtgggaagacagattctacggcactgctttcatttaattgggctttaggcactccattcgaatgcagaacctcacctctagttgagaccaagaattggcaaatttgcatgagctcctggaaagagttgctgactttgtatctaagacctgccagggaataccaagagttgtttctacagactttttttttttttttgtatgggagaagatactgtggcaaccaggaaggaatggaaaaaaaattcttttctctacagcaaattaatgtgaggaagctcctccaatcctctggctatttaaggttcaaaatcaagtgcctagggaaaattccaatggatgattttctgggagctatcttgtctaccttgaggttcctgaacaatgaattcccattaatgagcagtcttcagtattaaaaccactgtcttgtcacctcattttgcattactgtcttccgtggatgtttcagttacagtcgacgcggccgcgaatttagtagtagtagnngtaggcggccgc

SEQ ID NO: 312381 - DNA, 4700 bp, Homo sapiens
  misc_feature (3949)..(3949): n is a, c, g, or t
  misc_feature (3951)..(3951): n is a, c, g, or t
  misc_feature (3966)..(3966): n is a, c, g, or t
  misc_feature (3975)..(3975): n is a, c, g, or t
  misc_feature (3977)..(3977): n is a, c, g, or t
  misc_feature (3985)..(3985): n is a, c, g, or t
  misc_feature (3988)..(3988): n is a, c, g, or t
  misc_feature (3996)..(3996): n is a, c, g, or t
actgacgcgtccccggggtgccgctataacccgccgctcgcagggctgctccacagccgcgcgacgccgccgccttagaacgcctttccagtactgctagcagcagcccgaccacgcgttaccgcacgctcgcgcctttcccttgacacggcggacgccggaggattggggcggcaatttgtcttttccttttttattaaaattatttttcctgcctgttgttggatttggggaaattttttgtttgttttttatgatttgtatttgactgagagaaacccactgaagacgtctgcgtgagaatagagaccaccgaggccgactcgcgggccgctgcacccaccgccaaggacaaaaggagcccagcgctactagctgcacccgattcctcccagtgcttagcatgaagaaggccgaaatgggacgattcagtatttccccggatgaagacagcagcagctacagttccaacagcgacttcaactactcctaccccaccaagcaagctgctctgaaaagccattatgcagatgtagatcctgaaaaccagaactttttacttgaatcgaatttggggaagaagaagtatgaaacagaatttcatccaggtactacttcctttggaatgtcagtatttaatctgagcaatgcgattgtgggcagtggaatccttgggctttcttatgccatggctaatactggaattgctctttttataattctcttgacatttgtgtcaatattttccctgtattctgttcatctccttttgaagactgccaatgaaggagggtctttattatatgaacaattgggatataaggcatttggattagttggaaagcttgcagcatctggatcaattacaatgcagaacattggagctatgtcaagctacctcttcatagtgaaatatgagttgcctttggtgatccaggcattaacgaacattgaagataaaactggattgtggtatctgaacgggaactatttggttctgttggtgtcattggtggtcattcttcctttgtcgctgtttagaaatttaggatatttgggatataccagtggcctttccttgttgtgtatggtgttctttctgattgtggtcatttgcaagaaatttcaggttccgtgtcctgtggaagctgctttgataattaacgaaacaataaacaccaccttaacacagccaacagctcttgtacctgctttgtcacataacgtgactgaaaatgactcttgcagacctcactattttattttcaactcacagactgtctatgctgtgccaattctgatcttttcatttgtctgtcatcctgctgttcttcccatctatgaagaactgaaagaccgcagccgtagaagaatgatgaatgtgtccaagatttcattttttgctatgtttctcatgtatctgcttgccgccctctttggatacctaacattttacgaacatgttgagtcagaattgcttcatacctactcttctatcttgggaactgatattcttcttctcattgtccgtctggctgtgttaatggctgtgaccctgacagtaccagtagttattttcccaatccggagttctgtaactcacttgttgtgtgcatcaaaagatttcagttggtggcgtcatagtctcattacagtgtctatcttggcatttaccaatttacttgtcatctttgtcccaactattagggatatctttggttttattggtgcatctgcagcttctatgttgatttttattcttccttctgccttctatatcaagttggtgaagaaagaacctatgaaatctgtacaaaagattggggctttgttcttcctgttaagtggtgtactggtgatgaccggaagcatggccttgattgttttggattgggtacacaatgcacctggaggtggccattaattggcaccactcaaactcaaactcagtccatctgatgccagtgttgagtaaactcaactactatgaaatttcacctaatgttttcagtttcacttccttttgaagtgcagattcctcgctggttcttctgagtgcagaataagtgaacttttttgttttgttttgtttttttaagaaacttatctgtatgttagaaatggatatgaacaacaaaaccacgagtctcgggttaagggaagtgacaattttattccattccagagaatggacaaactcttaacttttatcaagccacatgcttggctgtgtcattgtttaacttggatattttatgattttacttgaatgtgcctaatggaaccatttgatgtgagaaacaattctttttaatttacagcaaaatattgaataaccattgacaaaaacactattattttttgtaccaaaaatacttaaagacctcagaagcactcttttacttttaagaaattgcttttttgaactttattcagaagcagttatcaataaattccataaaataatgtcattggtatttaaaaatgaatattaatataatgaaatggtttgcctttttgtaggcataataagccaaatacttttttacccaaaataatttttagagaaaatgatgtaatgaaaaattgtaccatgaattaggagcatagttttttccatttaaacgtcaccattacttaaaagatgattgattattgctataccaaatcagatgaactctgttcatcacttttcttctctgtccccaaacaatttggttcattcagactgaaatgtttgtgtcttcaacttattagaatggaagataatgcagatatttctgtgggaaataaaataactaattttgaggtaccaaatagtgcaattgggtaaaacagggtttattcagttgcatctgtctccagtgttgtattgacagctctgggtctttttttgggccagcccttttttgacattgcttccagcagtggaaaatgggcatttgatggcaataggccaaaattattgtgtccagagagtacactttttcaaaatgctcacctactggaagtgtgaattacttgacaatgtatggcttagttgtgttcatgttttgtctacagtagaggtctaatccacaggttacacctatgtttgatatgatataagttctctttgcgtaggccactgggtttctcatgcagtaagctttataaaaactcatttgcactggactgtcatctcattcttgtacaacgtagaattacttgtttacatccaacaaatggttagctagggaaaacagtgcaaactgagtgttagtagtcattttggtccaactgcatgtcaacccttccatttcaatcccagttagaaatgaaaataattactttgaaacttggctttaagagcacatttatcgtacgtcacagtgtatggtgaatatattattaaataatgtggtacttcgctcatcaggcataatgtctaaaatctaatatacataattccattaagtggttgaaggaagcaaataatggaattgtcaattggtcatctggctgtaaggtttgcccttgaactaaaaatgttgtttggggcaagggccagaaatgtggagacatggtttttgttacgcattcttgtattatatgtgactaaatttacaaacaagatacatgtgtaattaaagacccttatggaactggaagacgtcttgtagtgctacattgggtgaaaccgttggtccatttttgtctgtttctatgaagataaaataattgggggccatctagaaatagaaaggcagtgggaagacagattctacggcactgctttcatttaattgggctttaggcactccattcgaatgcagaacctcacctctagttgagaccaagaattggcaaatttgcatgagctcctggaaagagttgctgactttgtatctaagacctgccagggaataccaagagttgtttctacagacttttttttttttttggggtngngggaaaaagaatcgngtgggggcnanccgggaanagngatgtggnaaaaaaatttctttttcttcttacgagaaaatttaatgtggtgaggaaagcttcctctcaaatttcccttcgggcttattaagggttttcaaacctcaggtgggccttaggggaaatttccagtgggggagtgattttgcggggagctatctggtctacctgggggtccctggaacaaggattcccctttatggagcagtctccagtattaaacaccagggttttggttctccctcatttgggccataactggtctcccgggggatgttccaggtcacaccgtggtactggtttttttttagaacaccttattcccattaaggctacccctattcttccattttttctatggatactcctatgtccttatttggccgggaccattggctgcggccccgggtcgctatacaggggccggggggcccggggtccgggtatatatccctggaggttctaccgggttgtgggtggattccctttttgtcctattagattggccaatgtcgtgtcgaattcgttttggccttggccttgtggcacctctccaactgttctttgtttcggtacccctcatttctgacgtggactccgccctctttatatggccttccacgggccaggcgctgggaaatgcctgtgggccacccgcgttggtggtgcccgtggcatggggcccgcttgttggtttcccaccctcgtggtgg

SEQ ID NO: 312382 - DNA, 3746 bp, Homo sapiens
  misc_feature (3729)..(3729): n is a, c, g, or t
actgacgcgtccccggggtgccgctataacccgccgctcgcagggctgctccacagccgcgcgacgccgccgccttagaacgcctttccagtactgctagcagcagcccgaccacgcgttaccgcacgctcgcgcctttcccttgacacggcggacgccggaggattggggcggcaatttgtcttttccttttttattaaaattatttttcctgcctgttgttggatttggggaaattttttgtttgttttttatgatttgtatttgactgagagaaacccactgaagacgtctgcgtgagaatagagaccaccgaggccgactcgcgggccgctgcacccaccgccaaggacaaaaggagcccagcgctactagctgcacccgattcctcccagtgcttagcatgaagaaggccgaaatgggacgattcagtatttccccggatgaagacagcagcagctacagttccaacagcgacttcaactactcctaccccaccaagcaagctgctctgaaaagccattatgcagatgtagatcctgaaaaccagaactttttacttgaatcgaatttggggaagaagaagtatgaaacagaatttcatccaggtactacttcctttggaatgtcagtatttaatctgagcaatgcgattgtgggcagtggaatccttgggctttcttatgccatggctaatactggaattgctctttttataattctcttgacatttgtgtcaatattttccctgtattctgttcatctccttttgaagactgccaatgaaggagggtctttattatatgaacaattgggatataaggcatttggattagttggaaagcttgcagcatctggatcaattacaatgcagaacattggagctatgtcaagctacctcttcatagtgaaatatgagttgcctttggtgatccaggcattaacgaacattgaagataaaactggattgtggtatctgaacgggaactatttggttctgttggtgtcattggtggtcattcttcctttgtcgctgtttagaaatttaggatatttgggatataccagtggcctttccttgttgtgtatggtgttctttctgattgtggtcatttgcaagaaatttcaggttccgtgtcctgtggaagctgctttgataattaacgaaacaataaacaccaccttaacacagccaacagctcttgtacctgctttgtcacataacgtgactgaaaatgactcttgcagacctcactattttattttcaactcacagactgtctatgctgtgccaattctgatcttttcatttgtctgtcatcctgctgttcttcccatctatgaagaactgaaagaccgcagccgtagaagaatgatgaatgtgtccaagatttcattttttgctatgtttctcatgtatctgcttgccgccctctttggatacctaacattttacgaacatgttgagtcagaattgcttcatacctactcttctatcttgggaactgatattcttcttctcattgtccgtctggctgtgttaatggctgtgaccctgacagtaccagtagttattttcccaatccggagttctgtaactcacttgttgtgtgcatcaaaagatttcagttggtggcgtcatagtctcattacagtgtctatcttggcatttaccaatttacttgtcatctttgtcccaactattagggatatctttggttttattggtgcatctgcagcttctatgttgatttttattcttccttctgccttctatatcaagttggtgaagaaagaacctatgaaatctgtacaaaagattggggctttgttcttcctgttaagtggtgtactggtgatgaccggaagcatggccttgattgttttggattgggtacacaatgcacctggaggtggccattaattggcaccactcaaactcaaactcagtccatctgatgccagtgttgagtaaactcaactactatgaaatttcacctaatgttttcagtttcacttccttttgaagtgcagattcctcgctggttcttctgagtgcagaataagtgaacttttttgttttgttttgtttttttaagaaacttatctgtatgttagaaatggatatgaacaacaaaaccacgagtctcgggttaagggaagtgacaattttattccattccagagaatggacaaactcttaacttttatcaagccacatgcttggctgtgtcattgtttaacttggatattttatgattttacttgaatgtgcctaatggaaccatttgatgtgagaaacaattctttttaatttacagcaaaatattgaataaccattgacaaaaacactattattttttgtaccaaaaatacttaaagacctcagaagcactcttttacttttaagaaattgcttttttgaactttattcagaagcagttatcaataaattccataaaataatgtcattggtatttaaaaatgaatattaatataatgaaatggtttgcctttttgtaggcataataagccaaatacttttttacccaaaataatttttagagaaaatgatgtaatgaaaaattgtaccatgaattaggagcatagttttttccatttaaacgtcaccattacttaaaagatgattgattattgctataccaaatcagatgaactctgttcatcacttttcttctctgtccccaaacaatttggttcattcagactgaaatgtttgtgtcttcaacttattagaatggaagataatgcagatatttctgtgggaaataaaataactaattttgaggtaccaaatagtgcaattgggtaaaacagggtttattcagttgcatctgtctccagtgttgtattgacagctctgggtctttttttgggccagcccttttttgacattgcttccagcagtggaaaatgggcatttgatggcaataggccaaaattattgtgtccagagagtacactttttcaaaatgctcacctactggaagtgtgaattacttgacaatgtatggcttagttgtgttcatgttttgtctacagtagaggtctaatccacaggttacacctatgtttgatatgatataagttctctttgcgtaggccactgggtttctcatgcagtaagctttataaaaactcatttgcactggactgtcatctcattcttgtacaacgtagaattacttgtttacatccaacaaatggttagctagggaaaacagtgcaaactgagtgttagtagtcattttggtccaactgcatgtcaacccttccatttcaatcccagttagaaatgaaaataattactttgaaacttggctttaagagcacatttatcgtacgtcacagtgtatggtgaatatattattaaataatgtggtacttcgctcatcaggcataatgtctaaaatctaatatacataattccattaagtggttgaaggaagcaaataatggaattgtcaattggtcatctggctgtaaggtttgcccttgaactaaaaatgttgtttggggcaagggccagaaatgtggagacatggtttttgttacgcattcttgtattatatgtgactaaatttacaaacaagatacatgtgtaattaaagacccttatggaactggaagacgtcttgtagtgctacattgggtgaaaccgttggtccatttttgtctgtttctatgaagataaaaaaggcgccgctnggatccgtatgatcgac

SEQ ID NO: 312383 - DNA, 3857 bp, Homo sapiens
  misc_feature (3106)..(3106): n is a, c, g, or t
  misc_feature (3108)..(3108): n is a, c, g, or t
  misc_feature (3123)..(3123): n is a, c, g, or t
  misc_feature (3132)..(3132): n is a, c, g, or t
  misc_feature (3134)..(3134): n is a, c, g, or t
  misc_feature (3142)..(3142): n is a, c, g, or t
  misc_feature (3145)..(3145): n is a, c, g, or t
  misc_feature (3153)..(3153): n is a, c, g, or t
actgacgcgtccccggggtgccgctataacccgccgctcgcagggctgctccacagccgcgcgacgccgccgccttagaacgcctttccagtactgctagcagcagcccgaccacgcgttaccgcacgctcgcgcctttcccttgacacggcggacgccggaggattggggcggcaatttgtcttttccttttttattaaaattatttttcctgcctgttgttggatttggggaaattttttgtttgttttttatgatttgtatttgactgagagaaacccactgaagacgtctgcgtgagaatagagaccaccgaggccgactcgcgggccgctgcacccaccgccaaggacaaaaggagcccagcgctactagctgcacccgattcctcccagtgcttagcatgaagaaggccgaaatgggacgattcagtatttccccggatgaagacagcagcagctacagttccaacagcgacttcaactactcctaccccaccaagcaagctgctctgaaaagccattatgcagatgtagatcctgaaaaccagaactttttacttgaatcgaatttggggaagaagaagtatgaaacagaatttcatccaggtactacttcctttggaatgtcagtatttaatctgagcaatgcgattgtgggcagtggaatccttgggctttcttatgccatggctaatactggaattgctctttttataattctcttgacatttgtgtcaatattttccctgtattctgttcatctccttttgaagactgccaatgaaggagggtctttattatatgaacaattgggatataaggcatttggattagttggaaagcttgcagcatctggatcaattacaatgcagaacattggagctatgtcaagctacctcttcatagtgaaatatgagttgcctttggtgatccaggcattaacgaacattgaagataaaactggattgtggtatctgaacgggaactatttggttctgttggtgtcattggtggtcattcttcctttgtcgctgtttagaaatttaggatatttgggatataccagtggcctttccttgttgtgtatggtgttctttctgattgtggtcatttgcaagaaatttcaggttccgtgtcctgtggaagctgctttgataattaacgaaacaataaacaccaccttaacacagccaacagctcttgtacctgctttgtcacataacgtgactgaaaatgactcttgcagacctcactattttattttcaactcacagactgtctatgctgtgccaattctgatcttttcatttgtctgtcatcctgctgttcttcccatctatgaagaactgaaagaccgcagccgtagaagaatgatgaatgtgtccaagatttcattttttgctatgtttctcatgtatctgcttgccgccctctttggatacctaacattttacgaacatgttgagtcagaattgcttcatacctactcttctatcttgggaactgatattcttcttctcattgtccgtctggctgtgttaatggctgtgaccctgacagtaccagtagttattttcccaatccggagttctgtaactcacttgttgtgtgcatcaaaagatttcagttggtggcgtcatagtctcattacagtgtctatcttggcatttaccaatttacttgtcatctttgtcccaactattagggatatctttggttttattggtgcatctgcagcttctatgttgatttttattcttccttctgccttctatatcaagttggtgaagaaagaacctatgaaatctgtacaaaagattggggctttgttcttcctgttaagtggtgtactggtgatgaccggaagcatggccttgattgttttggattgggtacacaatgcacctggaggtggccattaattggcaccactcaaactcaaactcagtccatctgatgccagtgttgagtaaactcaactactatgaaatttcacctaatgttttcagtttcacttccttttgaagtgcagattcctcgctggttcttctgagtgcagaataagtgaacttttttgttttgttttgtttttttaagaaacttatctgtatgttagaaatggatatgaacaacaaaaccacgagtctcgggttaagggaagtgacaattttattccattccagagaatggacaaactcttaacttttatcaagccacatgcttggctgtgtcattgtttaacttggatattttatgattttacttgaatgtgcctaatggaaccatttgatgtgagaaacaattctttttaatttacagcaaaatattgaataaccattgacaaaaacactattattttttgtaccaaaaatacttaaagacctcagaagcactcttttacttttaagaaattgcttttttgaactttattcagaagcagttatcaataaattccataaaataatgtcattggtatttaaaaatgaatattaatataatgaaatggtttgcctttttgtaggcataataagccaaatacttttttacccaaaataatttttagagaaaatgatgtaatgaaaaattgtaccatgaattaggagcatagttttttccatttaaacgtcaccattacttaaaagatgattgattattgctataccaaatcagatgaactctgttcatcacttttcttctctgtccccaaacaatttggttcattcagactgaaatgtttgtgtcttcaacttattagaatggaagataatgcagatatttctgtgggaaataaaataactaattttgaggtaccaaatatgctacattgggtgaaaccgttggtccatttttgtctgtttctatgaagataaaataattgggggccatctagaaatagaaaggcagtgggaagacagattctacggcactgctttcatttaattgggctttaggcactccattcgaatgcagaacctcacctctagttgagaccaagaattggcaaatttgcatgagctcctggaaagagttgctgactttgtatctaagacctgccagggaataccaagagttgtttctacagacttttttttttttttggggtngngggaaaaagaatcgngtgggggcnanccgggaanagngatgtggnaaaaaaatttctttttcttcttacgagaaaatttaatgtggtgaggaaagcttcctctcaaatttcccttcgggcttattaagggttttcaaacctcaggtgggccttaggggaaatttccagtgggggagtgattttgcggggagctatctggtctacctgggggtccctggaacaaggattcccctttatggagcagtctccagtattaaacaccagggttttggttctccctcatttgggccataactggtctcccgggggatgttccaggtcacaccgtggtactggtttttttttagaacaccttattcccattaaggctacccctattcttccattttttctatggatactcctatgtccttatttggccgggaccattggctgcggccccgggtcgctatacaggggccggggggcccggggtccgggtatatatccctggaggttctaccgggttgtgggtggattccctttttgtcctattagattggccaatgtcgtgtcgaattcgttttggccttggccttgtggcacctctccaactgttctttgtttcggtacccctcatttctgacgtggactccgccctctttatatggccttccacgggccaggcgctgggaaatgcctgtgggccacccgcgttggtggtgcccgtggcatggggcccgcttgttggtttcccaccctcgtggtgg

SEQ ID NO: 312384 - DNA, 2304 bp, Homo sapiens
actgacgcgtccccggggtgccgctataacccgccgctcgcagggctgctccacagccgcgcgacgccgccgccttagaacgcctttccagtactgctagcagcagcccgaccacgcgttaccgcacgctcgcgcctttcccttgacacggcggacgccggaggattggggcggcaatttgtcttttccttttttattaaaattatttttcctgcctgttgttggatttggggaaattttttgtttgttttttatgatttgtatttgactgagagaaacccactgaagacgtctgcgtgagaatagagaccaccgaggccgactcgcgggccgctgcacccaccgccaaggacaaaaggagcccagcgctactagctgcacccgattcctcccagtgcttagcatgaagaaggccgaaatgggacgattcagtatttccccggatgaagacagcagcagctacagttccaacagcgacttcaactactcctaccccaccaagcaagctgctctgaaaagccattatgcagatgtagatcctgaaaaccagaactttttacttgaatcgaatttggggaagaagaagtatgaaacagaatttcatccaggtactacttcctttggaatgtcagtatttaatctgagcaatgcgattgtgggcagtggaatccttgggctttcttatgccatggctaatactggaattgctctttttataattctcttgacatttgtgtcaatattttccctgtattctgttcatctccttttgaagactgccaatgaaggagggtctttattatatgaacaattgggatataaggcatttggattagttggaaagcttgcagcatctggatcaattacaatgcagaacattggagctatgtcaagctacctcttcatagtgaaatatgagttgcctttggtgatccaggcattaacgaacattgaagataaaactggattgtggtatctgaacgggaactatttggttctgttggtgtcattggtggtcattcttcctttgtcgctgtttagaaatttaggatatttgggatataccagtggcctttccttgttgtgtatggtgttctttctgattgtggtcatttgcaagaaatttcaggttccgtgtcctgtggaagctgctttgataattaacgaaacaataaacaccaccttaacacagccaacagctcttgtacctgctttgtcacataacgtgactgaaaatgactcttgcagacctcactattttattttcaactcacagactgtctatgctgtgccaattctgatcttttcatttgtctgtcatcctgctgttcttcccatctatgaagaactgaaagaccgcagccgtagaagaatgatgaatgtgtccaagatttcattttttgctatgtttctcatgtatctgcttgccgccctctttggatacctaacattttacgaacatgttgagtcagaattgcttcatacctactcttctatcttgggaactgatattcttcttctcattgtccgtctggctgtgttaatggctgtgaccctgacagtaccagtagttattttcccaatccggagttctgtaactcacttgttgtgtgcatcaaaagatttcagttggtggcgtcatagtctcattacagtgtctatcttggcatttaccaatttacttgtcatctttgtcccaactattagggatatctttggttttattggtaagttttagaaagtatccaagtggattcaaacatcagggattttaagatttaaagaatgaatgacgagtggttcattgaatcctcaagaaacataaatgttgttttacaggtgcatctgcagcttctatgttgatttttattcttccttctgccttctatatcaagttggtgaagaaagaacctatgaaatctgtacaaaagattggggctttgttcttcctgttaagtggtgtactggtgatgaccggaagcatggccttgattgttttggattgggtacacaatgcacctggaggtggccattaattggcaccactcaaactcaaactcagtccatctgatgccagtgttgagtaaactcaactactatgaaatttcacctaatgttttcagtttcacttccttttgaagtgcagattcctcgctggttcttctgagtgcagaataagtgaacttttttgttttgttttgttttttagagacagagtctggctttgtcacccaggctggagtgctgtggtgcgatcacgaatcactgcagcctcgacttcctgacctcaaacattccttccac

SEQ ID NO: 312385 - DNA, 423 bp, Homo sapiens
tctcagatatccggaatggcatcaagttcatccgagaagtaacaccatatatcaagaagccatcattagtatcagatctgccgtgggaaggtgcagccccccagtcaccaagctttagtggcagtgaggactctggttcgccaaaacaccagaacagcaccaaggacaggaagatcatccctctcaaaatgtgctttgctgctagaaacctaagcatgccggatctggaaaacaggcaaaactagatggtggaagacagcaatggagacctgtcctcatggctgtgactgagaaggatttgctgctctatgactgtatgccgtggacaagagatgcctgggcgtcaccatgccacagctacccacttgttgccaccaggtaagtaagactaaagataaggaagtaaaatatttatcctactct

SEQ ID NO: 312386 - DNA, 7576 bp, Homo sapiens
gccgaggctgcctgactggaatgagggtagctgcggcgactgcggcggctggagcggggccggccatggcggtgtggacgcgggccaccaaagcggggctggtggagctgctcctgagggagcgctgggtccgagtggtggccgagctgagcggggagagcctgagcctgacgggcgacgccgccgcggccgagctggagcccgctctgggacccgcggccgccgccttcaacggcctcccaaacggcggcggcgcgggcgactcgctgcccgggagcccaagccgcggcctggggcccccgagcccgccggcgccgcctcggggccccgcgggtgaggcgggcgcgtcgccgcccgtgcgccgggtgcgggtggtgaagcaagaggcgggcggcctgggcatcagcatcaagggcggccgcgagaaccggatgccgatcctcatctccaagatcttccccgggctggctgccgaccagagccgggcgctgcggctgggcgacgccatcctgtcggtgaacggcaccgacctgcgccaggccacccacgaccaggccgtgcaggcgctgaagcgcgcgggcaaggaggtgctgctggaggtcaagttcatccgagaagtaacaccatatatcaagaagccatcattagtatcagatctgccgtgggaaggtgcagccccccagtcaccaagctttagtggcagtgaggactctggttcgccaaaacaccagaacagcaccaaggacaggaagatcatccctctcaaaatgtgctttgctgctagaaacctaagcatgccggatctggaaaacagattgatagagctacattctcctgatagcaggaacacgttgatcctacgctgcaaagatacagccacagcacactcctggttcgtagctatccacaccaacataatggctctcctcccacaggtgttggctgaactcaacgccatgcttggggcaaccagtacagcaggaggcagtaaagaggtgaagcatattgcctggctggcagaacaggcaaaactagatggtggaagacagcaatggagacctgtcctcatggctgtgactgagaaggatttgctgctctatgactgtatgccgtggacaagagatgcctgggcgtcaccatgccacagctacccacttgttgccaccaggttggttcattctggctccggatgtcgatccccctcccttggatctgaccttacatttgctaccaggacaggctctcgacagggcattgagatgcatctcttcagggtggagacacatcgggatctgtcatcctggaccaggatacttgttcagggttgccatgctgctgctgagctgatcaaggaagtctctctaggctgcatgttaaatggccaagaggtgaggcttactattcactatgaaaatgggttcaccatctcaagggaaaatggaggctccagcagcatattgtaccgctacccctttgaaaggctgaagatgtctgctgatgatggcatccgaaatctatacttggattttggtggtcccgagggagaactgaccatggacctgcactcttgtccgaagccgattgtatttgtgttgcacacgtttttatcggccaaagtcactcgtatgggactgcttgtatgagcaacaaaaaatcagaaaagagccttgactgtcacaagaaatatttccacctcaaaaaaaaaagcacaaaaagaaactctttgctctccttcagcacagtgccttcccaaggacctgcaaataactgctgaaccataaccgtgtttaaagaagagcctacctttcacagtctaccttggccagatattctagcactctaaaaggctccaaaatgaagctgttgatttattctcatttcaaaatatggtttatgagtaattaggtttatttctactgctaaaaagaatggctcattgttttctttttttttcattgttttcatttttagacataatcaaatacccaagcattgttttctttttcttctccctgtaggatttgtgttgtgcttagccttgatctcttgttcagaacaattgtcccttcccaggtgctagcttgcagcagcctgttgcttcctgagcattccagataggtcgtatgtcttggaatttactgtcctcactagctccttccaccataggaagtccttgaattgtatcaccaaagggttgttccatttgccctggatctccctctatctcagcctggccatcacttcccaccttatcccaagctttgccactgtctctaggacttagaacttgtaaatttgatttgccttgccttctacttcctttctagtggtgactgagttgaaaagcaagttggaagccactgcttttaaagaaaagttttgcttggtttaggtttttccaattttatttttgttaggagccaggggataagatttattttaaatgaaaatcctcttcctaggttaagccattttttttatgcttaccaaatgtgccttggttagggttagtggagctttattagtcactatttgaataactggaaatcactgccatttccaggagatcacctatcctagttttgaggaatagtcattgaggtgggtttccttaatggcatctcttctagtaggcagatctgtttgaacaagataaatcctaaagagccagcctgcttgaggagtagacttggtgggtgaagccagcaattccgcacaaacgtcatgttgaattgttttgggctgcccaaaaacaacaggatgcagcatcctggctgtggcctggccctttgtggcagcagtggcatggacaagcaactgctaattcgagacttactattggcttcacagcacaccctacagtgagcagggtgatgagaccgtggaacagctacctgcttttggttaagattgccagatatcattaggacacagtagcagcaagaatgctgattttgtagtgttagaaaatgaactcagcttgtttttcctaattttgaaggtggtatatatctgcaaacatttaaaatggtataatatcatataaaatgtcaaaattagcacagtccctggatctcaaagaataggtaatattgacttggatgttctttatgctctctgaagaaaggtctagggaaagttcttgtttgcttgattgatcaagagtgccacggaagaatgtgagcgctgtggagggtggaggagggtgtcacttcagatggggcaggcacagggggagaaaagaagagaaaaacacacctgtgtgcaaaatgagctatttggtttcagtgcggcctgaccgatggggaggacccatgagcagagagagttctaggtcaacattgtaactccattgtcctccttcacccataagtcagtcctccttcctcattacagtgaaaccaacaatatgcagaggttggggagagatgcctgttcttcccccagcttcatataattgtcaaagttccaaaaatgaattatctgaactgcttaaaactggaaattaaaatctagacaagaatatgtctttcaagagctttttatgttttgaaagttcataaacctaagattggctccatctgagataaattttcttttctttttttttttgagacggagtctcgttctgtctcccaggctggagtgcagtggcatgatctcggctcactgcaacctccacctcctaggttcaagtgattctcctgagtagctggggttatagctacccaccaccacacccagctaatttttgtatttttagtagaggcaggttttcaccatgttggctaggctggtcttgaactcccgacctcaagtgatccacctgccttggcctcccaaagtgctgggattataggtgtgagcccccgtgcctggcccacaataaattttcatttcagagaaggaaaaaaatctcttgaacgtccagaaatgatttctggaatcagaatttcaatatgtaataccctcaggtaggcaatcttgaaccctctatgcagtgagagcattattaatatgagatgttgaatgatgcctttacagacttcagcagcaaagccatttggttgaggttttctgtgttaatgtgaaaagctaagccactgagatttgcaggggagcttctgagccaccctgcttgttggttatatgaggatgtaaaataggtggaattaaaatgtgagcaggaaaggcaaggcatgtgtgcattttcactcattttggtcaaggttaaactgacatgtatagcactgaggtctgtagggttcttaatatcttttgagtcttgctgtgaaatgaaagtgtgggaggtttcctttgtccattagcagccccaagaaccagaacccttttgctgcttttcttacatacctaacagctctccagtcatgatgaccaaggttgttcttcaatcaaatgtgtttgtgggattttcagtccgcaaatgaagtgctctctaatgaatgggacaccatgataaatatgtatttatatttagatgccaaagtatggcaaattatttccaaatgataactacaaatgggaattttcgatattctaccttttttatagaaccagctcacttttcatttctttttcattttgaattaagaaaattgttgaggatgtggtgggttccagtgtgtggaatggaaaggaaactgcagaatagtgtctgctccccattcagagggactgcttcctgtgccccccagacccggggcttcgacagcttctccacattccacacagatgcctaggagcagcgagttggtatatgaaaagtctcccaccttttctcctaaaacttctctcctttctctccataaaaagaaaaggaaaggaacaaaagaaaaacattcagtttttctttttctgaaaaaggtaagtcctttcctgaagtcatcaaatgaaacattatctggaaattagtttctaatgttgtatatgaagaaatacttaaatataagttcctgcagtatttattagatagttgtaactgtaaactcacctccctagtagataagagtttcaggttaaatactggaacatatataggcagtcaaaaatactactttaaatgtcattcacctattttaaagccatgttttagcactttttaggccaaagaaggtctgatagtgcctgtttttatgttctgtactctcacaaactttgttactcaaaattattgcatggcaggagagattggattatttatttcttatatttttataagtaaaaaaatctttctaaacaacaaatacctaacattattactgattgttttcctaatttatcctcctaagttgaatggtaacaaagcttttcccagctactcgggaggctgaggtgggagaatcccttgaacccaggaggcagaagttgcagtgagctgagatcatgccattgcactccagcctgggcaacagagcgagacttcatctccaaaaaaagaaaaagaagaaaaagatttataatttctgagtcccctaagtccctttctcagtttgcaataatcttacgtccatgctattgacactaattttgaaactggaaagctaattaatgacatattcatgtgttctttcatctaataaacatttattaatgtatagttctacaccaggcattctgaagggtccaaaagaaagttcctgccctctagtagcacataatccgttatttctcagcacaccatgccatctgtttatcattcagcagttaagtaattcatcacttcatatttttaccaaagtatatttacaagtctgtttatctggatctggcaaactggaaaatgtttgaagggatactcaggctttgatccatgccaacatgaaaggactccaagcacatttaagtaggctggtcttttcatcatgcatgattttttttttagtgcaaatttagactttagtttgggaaagagaacagtatacagtatcctttgtaagataaatcacaacaacaaaaattaagttttattgcacaaagtagataaatgagaaagtctttcttaaaaaatgcttctttaactgtaacagcaaaactaaatgcatattttatcaaccccttatttctaattgctgtattcatttccacccttaaactatttaagcatttcatctgctgaaagtccttatatacatggtagacggaatatttctccattaatgatagatcaaaatgaagatatttaaaaattaacaaaatcaggccaaggcaggaggatcactttagcccaggaggtccagaccagcctgggcaacacagcgggaccccgactccatttaaaaaattaaaaaaaaaaaaaaaacttttaacatttaaaaaataaaaattaacaaaatttcacttattccaggacacgctggcatttggactcaatgaaaagggcacctaaagaaaataaggctgactgaatgttttccataattttcacacaataacagtccctttctatccagcttgccttccatttatctctagggttagcttttcaggcaacatccttggtcattgcccagaaagtacctgagctatcagtgattggaatggcacaggaaaccgaatcacatgggtgccctccccttggttttcaagtatcttggagttgtgcacaaaaattaggtcatgccttcagtgtcttgttctttaaacctaccctttgacaatcaggtgctaatgattgtatactattaaaaccagcacataagtattgtaaatgtgtgttcctcctaggttggaagaaatgtctttccttctatctgggtcctgttaaagcgggtgtcagttgtgtcttttcacctcgatttgtgaattaatagaattggggggagaggaaatgatgatgtcaattaagtttcaggtttggcatgatcatcattctcgatgatattctcactttgtcgcaaatctgcccttatcgtaagaacaagtttcagaattttccctccactatacgactccagtattatgtttacaatccattggatgagtgcagcattataagaccttggtgcccagaaaaatctgtcctttttggtaccaaacctgaggtcttttggaagataatgtagaaaaccactacctattgaaggcctgttttggctaatctgtgcaaactctgatgatacctgcttatgtggattcttttccacactgctttcatttttaagtataaagacttagaaaactagaataatgcttttacaaataattaaaagtatgtgatgttctgggttttttccttctttttagaaccctgtatttaaacaagccttctttttaagtcttgtttgaaatttaagtctcagatcttctggataccaaatcaaaaacccaacgcgtaaaacagggcagtatttgtgttcctaattttaaaaagctttatgtatactctataaatatagatgcataaacaacacttccccttgagtagcacatcaacatacagcattgtacattacaatgaaaatgtgtaacttaagggtattatatatataaatacatatatacctttgtaacctttatactgtaaataaaaaagttgctttagtcacgtgggttgttt

SEQ ID NO: 312387 - DNA, 6760 bp, Homo sapiens
gccgaggctgcctgactggaatgagggtagctgcggcgactgcggcggctggagcggggccggccatggcggtgtggacgcgggccaccaaagcggggctggtggagctgctcctgagggagcgctgggtccgagtggtggccgagctgagcggggagagcctgagcctgacgggcgacgccgccgcggccgagctggagcccgctctgggacccgcggccgccgccttcaacggcctcccaaacggcggcggcgcgggcgactcgctgcccgggagcccaagccgcggcctggggcccccgagcccgccggcgccgcctcggggccccgcgggtgaggcgggcgcgtcgccgcccgtgcgccgggtgcgggtggtgaagcaagaggcgggcggcctgggcatcagcatcaagggcggccgcgagaaccggatgccgatcctcatctccaagatcttccccgggctggctgccgaccagagccgggcgctgcggctgggcgacgccatcctgtcggtgaacggcaccgacctgcgccaggccacccacgaccaggccgtgcaggcgctgaagcgcgcgggcaaggaggtgctgctggaggtcaagttcatccgagaagtaacaccatatatcaagaagccatcattagtatcagatctgccgtgggaaggtgcagccccccagtcaccaagctttagtggcagtgaggactctggttcgccaaaacaccagaacagcaccaaggacaggaagatcatccctctcaaaatgtgctttgctgctagaaacctaagcatgccggatctggaaaacagattgatagagctacattctcctgatagcaggaacacgttgatcctacgctgcaaagatacagccacagcacactcctggttcgtagctatccacaccaacataatggctctcctcccacaggtgttggctgaactcaacgccatgcttggggcaaccagtacagcaggaggcagtaaagaggtgaagcatattgcctggctggcagaacaggcaaaactagatggtggaagacagcaatggagacctgtcctcatggctgtgactgagaaggatttgctgctctatgactgtatgccgtggacaagagatgcctgggcgtcaccatgccacagctacccacttgttgccaccaggttggttcattctggctccggatgtcgatccccctcccttggatctgaccttacatttgctaccaggacaggctctcgacagggcattgagatgcatctcttcagggtggagacacatcgggatctgtcatcctggaccaggatacttgttcagggttgccatgctgctgctgagctgatcaaggaagtctctctaggctgcatgttaaatggccaagaggtgaggcttactattcactatgaaaatgggttcaccatctcaagggaaaatggaggctccagcagcatattgtaccgctacccctttgaaaggctgaagatgtctgctgatgatggcatccgaaatctatacttggattttggtggtcccgagggagaactgaccatggacctgcactcttgtccgaagccgattgtatttgtgttgcacacgtttttatcggccaaagtcactcgtatgggactgcttgtatgagcaacaaaaaatcagaaaagagccttgactgtcacaagaaatatttccacctcaaaaaaaaaagcacaaaaagaaactctttgctctccttcagcacagtgccttcccaaggacctgcaaataactgctgaaccataaccgtgtttaaagaagagcctacctttcacagtctaccttggccagatattctagcactctaaaaggctccaaaatgaagctgttgatttattctcatttcaaaatatggtttatgagtaattaggtttatttctactgctaaaaagaatggctcattgttttctttttttttcattgttttcatttttagacataatcaaatacccaagcattgttttctttttcttctccctgtaggatttgtgttgtgcttagccttgatctcttgttcagaacaattgtcccttcccaggtgctagcttgcagcagcctgttgcttcctgagcattccagataggtcgtatgtcttggaatttactgtcctcactagctccttccaccataggaagtccttgaattgtatcaccaaagggttgttccatttgccctggatctccctctatctcagcctggccatcacttcccaccttatcccaagctttgccactgtctctaggacttagaacttgtaaatttgatttgccttgccttctacttcctttctagtggtgactgagttgaaaagcaagttggaagccactgcttttaaagaaaagttttgcttggtttaggtttttccaattttatttttgttaggagccaggggataagatttattttaaatgaaaatcctcttcctaggttaagccattttttttatgcttaccaaatgtgccttggttagggttagtggagctttattagtcactatttgaataactggaaatcactgccatttccaggagatcacctatcctagttttgaggaatagtcattgaggtgggtttccttaatggcatctcttctagtaggcagatctgtttgaacaagataaatcctaaagagccagcctgcttgaggagtagacttggtgggtgaagccagcaattccgcacaaacgtcatgttgaattgttttgggctgcccaaaaacaacaggatgcagcatcctggctgtggcctggccctttgtggcagcagtggcatggacaagcaactgctaattcgagacttactattggcttcacagcacaccctacagtgagcagggtgatgagaccgtggaacagctacctgcttttggttaagattgccagatatcattaggacacagtagcagcaagaatgctgattttgtagtgttagaaaatgaactcagcttgtttttcctaattttgaaggtggtatatatctgcaaacatttaaaatggtataatatcatataaaatgtcaaaattagcacagtccctggatctcaaagaataggtaatattgacttggatgttctttatgctctctgaagaaaggtctagggaaagttcttgtttgcttgattgatcaagagtgccacggaagaatgtgagcgctgtggagggtggaggagggtgtcacttcagatggggcaggcacagggggagaaaagaagagaaaaacacacctgtgtgcaaaatgagctatttggtttcagtgcggcctgaccgatggggaggacccatgagcagagagagttctaggtcaacattgtaactccattgtcctccttcacccataagtcagtcctccttcctcattacagtgaaaccaacaatatgcagaggttggggagagatgcctgttcttcccccagcttcatataattgtcaaagttccaaaaatgaattatctgaactgcttaaaactggaaattaaaatctagacaagaatatgtctttcaagagctttttatgttttgaaagttcataaacctaagattggctccatctgagataaattttcttttctttttttttttgagacggagtctcgttctgtctcccaggctggagtgcagtggcatgatctcggctcactgcaacctccacctcctaggttcaagtgattctcctgagtagctggggttatagctacccaccaccacacccagctaatttttgtatttttagtagaggcaggttttcaccatgttggctaggctggtcttgaactcccgacctcaagtgatccacctgccttggcctcccaaagtgctgggattataggtgtgagcccccgtgcctggcccacaataaattttcatttcagagaaggaaaaaaatctcttgaacgtccagaaatgatttctggaatcagaatttcaatatgtaataccctcaggtaggcaatcttgaaccctctatgcagtgagagcattattaatatgagatgttgaatgatgcctttacagacttcagcagcaaagccatttggttgaggttttctgtgttaatgtgaaaagctaagccactgagatttgcaggggagcttctgagccaccctgcttgttggttatatgaggatgtaaaataggtggaattaaaatgtgagcaggaaaggcaaggcatgtgtgcattttcactcattttggtcaaggttaaactgacatgtatagcactgaggtctgtagggttcttaatatcttttgagtcttgctgtgaaatgaaagtgtgggaggtttcctttgtccattagcagccccaagaaccagaacccttttgctgcttttcttacatacctaacagctctccagtcatgatgaccaaggttgttcttcaatcaaatgtgtttgtgggattttcagtccgcaaatgaagtgctctctaatgaatgggacaccatgataaatatgtatttatatttagatgccaaagtatggcaaattatttccaaatgataactacaaatgggaattttcgatattctaccttttttatagaaccagctcacttttcatttctttttcattttgaattaagaaaattgttgaggatgtggtgggttccagtgtgtggaatggaaaggaaactgcagaatagtgtctgctccccattcagagggactgcttcctgtgccccccagacccggggcttcgacagcttctccacattccacacagatgcctaggagcagcgagttggtatatgaaaagtctcccaccttttctcctaaaacttctctcctttctctccataaaaagaaaaggaaaggaacaaaagaaaaacattcagtttttctttttctgaaaaaggtaagtcctttcctgaagtcatcaaatgaaacattatctggaaattagtttctaatgttgtatatgaagaaatacttaaatataagttcctgcagtatttattagatagttgtaactgtaaactcacctccctagtagataagagtttcaggttaaatactggaacatatataggcagtcaaaaatactactttaaatgtcattcacctattttaaagccatgttttagcactttttaggccaaagaaggtctgatagtgcctgtttttatgttctgtactctcacaaactttgttactcaaaattattgcatggcaggagagattggattatttatttcttatatttttataagtaaaaaaatctttctaaacaacaaatacctaacattattactgattgttttcctaatttatcctcctaagttgaatggtaacaaagcttttccagctgaatgaatgcacttagctgataaaccagaatttgttcttttttttccttctttttttttggagacaggttctcactctgtcaccgaggttggagtgcagtggtatgatcatagctgactgcagcctcaaccttctgggctcaaatgatcctttcacctcagcctcctgagtagctgggaccacaggtgtgtgccaccacacctggctaatttttatggatttttttttcttttttttttttcgccatgttgcccaggctggtcttgaactcttggcactcaagcagtccttctgcctcagcctcccaaagtgctgggattacagatgtgagccactgcacctggccccagaaattatgcttaaaaaaaaaattaagctgtgtggaatctggacaaggctatgtttctcctagaaacaggttttgctgtaaatggttttgatgggcgaaagtgtgagaaaaggttataatagattcttttttttaattttgtgagaaattccaggtcttcttgcttaacttatatgcatgtggatatatttgttttcaaagccatggaagaatctctgttcatatattttaatgcaaattaccttgtatgctgctatgcaaattctattaaaaggcctacctgcttaagaattaaacatttttgaaactttcagggaagacctgtagactcaagcactttctctgcttttttgtatcttatcttggacacttatgctgaattatgttcttattattttcactggttataagctattccttgtacataatatttaaactatccaaatatccagcatacatttccatgtggctgccatcggctgttgatgccatgaatgaaatggctggttagaaagccaaaggtcttcttttttcaattcctaatgaataagtaaaatgccagatctctttggtctcaaagcaaattgctctgatcagatcaaatatctatgtaatgaaaagagacttacttaaatttgggattctgcttaaactttaagttgaatttgactgtagtcattcattctttttatatatctctgtcaggtatgacattaattaccaggtggtattatactctactttgagtttggacatcactttcagttaaatttctgttgttattgtggcttttttttttttttaaccccactgaagatggaagtagagcagtctgccatctcctgctgttctttctctgtgccccctaattgcttggtaatctaaaattattctgactttccacatactgtctttaaaaaccaattgtagcaatctgcccgcctccaccctttaagctaaatctttcactgtgctggtcttgaactcttggcactcaagcagtccttctgcctcagcctcccaaagtgctgggattacagatgtgagccactgcacctggccccagaaattatgc

SEQ ID NO: 312388 - DNA, 3421 bp, Homo sapiens
gccgaggctgcctgactggaatgagggtagctgcggcgactgcggcggctggagcggggccggccatggcggtgtggacgcgggccaccaaagcggggctggtggagctgctcctgagggagcgctgggtccgagtggtggccgagctgagcggggagagcctgagcctgacgggcgacgccgccgcggccgagctggagcccgctctgggacccgcggccgccgccttcaacggcctcccaaacggcggcggcgcgggcgactcgctgcccgggagcccaagccgcggcctggggcccccgagcccgccggcgccgcctcggggccccgcgggtgaggcgggcgcgtcgccgcccgtgcgccgggtgcgggtggtgaagcaagaggcgggcggcctgggcatcagcatcaagggcggccgcgagaaccggatgccgatcctcatctccaagatcttccccgggctggctgccgaccagagccgggcgctgcggctgggcgacgccatcctgtcggtgaacggcaccgacctgcgccaggccacccacgaccaggccgtgcaggcgctgaagcgcgcgggcaaggaggtgctgctggaggtcaagttcatccgagaagtaacaccatatatcaagaagccatcattagtatcagatctgccgtgggaaggtgcagccccccagtcaccaagctttagtggcagtgaggactctggttcgccaaaacaccagaacagcaccaaggacaggaagatcatccctctcaaaatgtgctttgctgctagaaacctaagcatgccggatctggaaaacagattgatagagctacattctcctgatagcaggaacacgttgatcctacgctgcaaagatacagccacagcacactcctggttcgtagctatccacaccaacataatggctctcctcccacaggtgttggctgaactcaacgccatgcttggggcaaccagtacagcaggaggcagtaaagaggtgaagcatattgcctggctggcagaacaggcaaaactagatggtggaagacagcaatggagacctgtcctcatggctgtgactgagaaggatttgctgctctatgactgtatgccgtggacaagagatgcctgggcgtcaccatgccacagctacccacttgttgccaccaggttggttcattctggctccggatgtcgatccccctcccttggatctgaccttacatttgctaccaggacaggctctcgacagggcattgagatgcatctcttcagggtggagacacatcgggatctgtcatcctggaccaggatacttgttcagggttgccatgctgctgctgagctgatcaaggaagtctctctaggctgcatgttaaatggccaagaggtgaggcttactattcactatgaaaatgggttcaccatctcaagggaaaatggaggctccagcagcatattgtaccgctacccctttgaaaggctgaagatgtctgctgatgatggcatccgaaatctatacttggattttggtggtcccgagggagaactgaccatggacctgcactcttgtccgaagccgattgtatttgtgttgcacacgtttttatcggccaaagtcactcgtatgggactgcttgtatgagcaacaaaaaatcagaaaagagccttgactgtcacaagaaatatttccacctcaaaaaaaaaagcacaaaaagaaactctttgctctccttcagcacagtgccttcccaaggacctgcaaataactgctgaaccataaccgtgtttaaagaagagcctacctttcacagtctaccttggccagatattctagcactctaaaaggctccaaaatgaagctgttgatttattctcatttcaaaatatggtttatgagtaattaggtttatttctactgctaaaaagaatggctcattgttttctttttttttcattgttttcatttttagacataatcaaatacccaagcattgttttctttttcttctccctgtaggatttgtgttgtgcttagccttgatctcttgttcagaacaattgtcccttcccaggtgctagcttgcagcagcctgttgcttcctgagcattccagataggtcgtatgtcttggaatttactgtcctcactagctccttccaccataggaagtccttgaattgtatcaccaaagggttgttccatttgccctggatctccctctatctcagcctggccatcacttcccaccttatcccaagctttgccactgtctctaggacttagaacttgtaaatttgatttgccttgccttctacttcctttctagtggtgactgagttgaaaagcaagttggaagccactgcttttaaagaaaagttttgcttggtttaggtttttccaattttatttttgttaggagccaggggataagatttattttaaatgaaaatcctcttcctaggttaagccattttttttatgcttaccaaatgtgccttggttagggttagtggagctttattagtcactatttgaataactggaaatcactgccatttccaggagatcacctatcctagttttgaggaatagtcattgaggtgggtttccttaatggcatctcttctagtaggcagatctgtttgaacaagataaatcctaaagagccagcctgcttgaggagtagacttggtgggtgaagccagcaattccgcacaaacgtcatgttgaattgttttgggctgcccaaaaacaacaggatgcagcatcctggctgtggcctggccctttgtggcagcagtggcatggacaagcaactgctaattcgagacttactattggcttcacagcacaccctacagtgagcagggtgatgagaccgtggaacagctacctgcttttggttaagattgccagatatcattaggacacagtagcagcaagaatgctgattttgtagtgttagaaaatgaactcagcttgtttttcctaattttgaaggtggtatatatctgcaaacatttaaaatggtataatatcatataaaatgtcaaaattagcacagtccctggatctcaaagaataggtaatattgacttggatgttctttatgctctctgaagaaaggtctagggaaagttcttgtttgcttgattgatcaagagtgccacggaagaatgtgagcgctgtggagggtggaggagggtgtcacttcagatggggcaggcacagggggagaaaagaagagaaaaacacacctgtgtgcaaaatgagctatttggtttcagtgcggcctgaccgatggggaggacccatgagcagagagagttctaggtcaacattgtaactccattgtcctccttcacccataagtcagtcctccttctgcatattgttggtttcactgtaatgagggtcgac

SEQ ID NO: 312389 - DNA, 9659 bp, Homo sapiens
gccgaggctgcctgactggaatgagggtagctgcggcgactgcggcggctggagcggggccggccatggcggtgtggacgcgggccaccaaagcggggctggtggagctgctcctgagggagcgctgggtccgagtggtggccgagctgagcggggagagcctgagcctgacgggcgacgccgccgcggccgagctggagcccgctctgggacccgcggccgccgccttcaacggcctcccaaacggcggcggcgcgggcgactcgctgcccgggagcccaagccgcggcctggggcccccgagcccgccggcgccgcctcggggccccgcgggtgaggcgggcgcgtcgccgcccgtgcgccgggtgcgggtggtgaagcaagaggcgggcggcctgggcatcagcatcaagggcggccgcgagaaccggatgccgatcctcatctccaagatcttccccgggctggctgccgaccagagccgggcgctgcggctgggcgacgccatcctgtcggtgaacggcaccgacctgcgccaggccacccacgaccaggccgtgcaggcgctgaagcgcgcgggcaaggaggtgctgctggaggtcaagttcatccgagaagtaacaccatatatcaagaagccatcattagtatcagatctgccgtgggaaggtgcagccccccagtcaccaagctttagtggcagtgaggactctggttcgccaaaacaccagaacagcaccaaggacaggaagatcatccctctcaaaatgtgctttgctgctagaaacctaagcatgccggatctggaaaacaggtgttggctgaactcaacgccatgcttggggcaaccagtacagcaggaggcagtaaagaggtgaagcatattgcctggctggcagaacaggcaaaactagatggtggaagacagcaatggagacctgtcctcatggctgtgactgagaaggatttgctgctctatgactgtatgccgtggacaagagatgcctgggcgtcaccatgccacagctacccacttgttgccaccaggttggttcattctggctccggatgtcgatccccctcccttggatctgaccttacatttgctaccaggacaggctctcgacagggcattgagatgcatctcttcagggtggagacacatcgggatctgtcatcctggaccaggatacttgttcagggttgccatgctgctgctgagctgatcaaggaagtctctctaggctgcatgttaaatggccaagaggtgaggcttactattcactatgaaaatgggttcaccatctcaagggaaaatggaggctccagcagcatattgtaccgctacccctttgaaaggctgaagatgtctgctgatgatggcatccgaaatctatacttggattttggtggtcccgagggagaactgaccatggacctgcactcttgtccgaagccgattgtatttgtgttgcacacgtttttatcggccaaagtcactcgtatgggactgcttgtatgagcaacaaaaaatcagaaaagagccttgactgtcacaagaaatatttccacctcaaaaaaaaaagcacaaaaagaaactctttgctctccttcagcacagtgccttcccaaggacctgcaaataactgctgaaccataaccgtgtttaaagaagagcctacctttcacagtctaccttggccagatattctagcactctaaaaggctccaaaatgaagctgttgatttattctcatttcaaaatatggtttatgagtaattaggtttatttctactgctaaaaagaatggctcattgttttctttttttttcattgttttcatttttagacataatcaaatacccaagcattgttttctttttcttctccctgtaggatttgtgttgtgcttagccttgatctcttgttcagaacaattgtcccttcccaggtgctagcttgcagcagcctgttgcttcctgagcattccagataggtcgtatgtcttggaatttactgtcctcactagctccttccaccataggaagtccttgaattgtatcaccaaagggttgttccatttgccctggatctccctctatctcagcctggccatcacttcccaccttatcccaagctttgccactgtctctaggacttagaacttgtaaatttgatttgccttgccttctacttcctttctagtggtgactgagttgaaaagcaagttggaagccactgcttttaaagaaaagttttgcttggtttaggtttttccaattttatttttgttaggagccaggggataagatttattttaaatgaaaatcctcttcctaggttaagccattttttttatgcttaccaaatgtgccttggttagggttagtggagctttattagtcactatttgaataactggaaatcactgccatttccaggagatcacctatcctagttttgaggaatagtcattgaggtgggtttccttaatggcatctcttctagtaggcagatctgtttgaacaagataaatcctaaagagccagcctgcttgaggagtagacttggtgggtgaagccagcaattccgcacaaacgtcatgttgaattgttttgggctgcccaaaaacaacaggatgcagcatcctggctgtggcctggccctttgtggcagcagtggcatggacaagcaactgctaattcgagacttactattggcttcacagcacaccctacagtgagcagggtgatgagaccgtggaacagctacctgcttttggttaagattgccagatatcattaggacacagtagcagcaagaatgctgattttgtagtgttagaaaatgaactcagcttgtttttcctaattttgaaggtggtatatatctgcaaacatttaaaatggtataatatcatataaaatgtcaaaattagcacagtccctggatctcaaagaataggtaatattgacttggatgttctttatgctctctgaagaaaggtctagggaaagttcttgtttgcttgattgatcaagagtgccacggaagaatgtgagcgctgtggagggtggaggagggtgtcacttcagatggggcaggcacagggggagaaaagaagagaaaaacacacctgtgtgcaaaatgagctatttggtttcagtgcggcctgaccgatggggaggacccatgagcagagagagttctaggtcaacattgtaactccattgtcctccttcacccataagtcagtcctccttcctcattacagtgaaaccaacaatatgcagaggttggggagagatgcctgttcttcccccagcttcatataattgtcaaagttccaaaaatgaattatctgaactgcttaaaactggaaattaaaatctagacaagaatatgtctttcaagagctttttatgttttgaaagttcataaacctaagattggctccatctgagataaattttcttttctttttttttttgagacggagtctcgttctgtctcccaggctggagtgcagtggcatgatctcggctcactgcaacctccacctcctaggttcaagtgattctcctgagtagctggggttatagctacccaccaccacacccagctaatttttgtatttttagtagaggcaggttttcaccatgttggctaggctggtcttgaactcccgacctcaagtgatccacctgccttggcctcccaaagtgctgggattataggtgtgagcccccgtgcctggcccacaataaattttcatttcagagaaggaaaaaaatctcttgaacgtccagaaatgatttctggaatcagaatttcaatatgtaataccctcaggtaggcaatcttgaaccctctatgcagtgagagcattattaatatgagatgttgaatgatgcctttacagacttcagcagcaaagccatttggttgaggttttctgtgttaatgtgaaaagctaagccactgagatttgcaggggagcttctgagccaccctgcttgttggttatatgaggatgtaaaataggtggaattaaaatgtgagcaggaaaggcaaggcatgtgtgcattttcactcattttggtcaaggttaaactgacatgtatagcactgaggtctgtagggttcttaatatcttttgagtcttgctgtgaaatgaaagtgtgggaggtttcctttgtccattagcagccccaagaaccagaacccttttgctgcttttcttacatacctaacagctctccagtcatgatgaccaaggttgttcttcaatcaaatgtgtttgtgggattttcagtccgcaaatgaagtgctctctaatgaatgggacaccatgataaatatgtatttatatttagatgccaaagtatggcaaattatttccaaatgataactacaaatgggaattttcgatattctaccttttttatagaaccagctcacttttcatttctttttcattttgaattaagaaaattgttgaggatgtggtgggttccagtgtgtggaatggaaaggaaactgcagaatagtgtctgctccccattcagagggactgcttcctgtgccccccagacccggggcttcgacagcttctccacattccacacagatgcctaggagcagcgagttggtatatgaaaagtctcccaccttttctcctaaaacttctctcctttctctccataaaaagaaaaggaaaggaacaaaagaaaaacattcagtttttctttttctgaaaaaggtaagtcctttcctgaagtcatcaaatgaaacattatctggaaattagtttctaatgttgtatatgaagaaatacttaaatataagttcctgcagtatttattagatagttgtaactgtaaactcacctccctagtagataagagtttcaggttaaatactggaacatatataggcagtcaaaaatactactttaaatgtcattcacctattttaaagccatgttttagcactttttaggccaaagaaggtctgatagtgcctgtttttatgttctgtactctcacaaactttgttactcaaaattattgcatggcaggagagattggattatttatttcttatatttttataagtaaaaaaatctttctaaacaacaaatacctaacattattactgattgttttcctaatttatcctcctaagttgaatggtaacaaagcttttccagctgaatgaatgcacttagctgataaaccagaatttgttcttttttttccttctttttttttggagacaggttctcactctgtcaccgaggttggagtgcagtggtatgatcatagctgactgcagcctcaaccttctgggctcaaatgatcctttcacctcagcctcctgagtagctgggaccacaggtgtgtgccaccacacctggctaatttttatggatttttttttcttttttttttttcgccatgttgcccaggctggtcttgaactcttggcactcaagcagtccttctgcctcagcctcccaaagtgctgggattacagatgtgagccactgcacctggccccagaaattatgcttaaaaaaaaaattaagctgtgtggaatctggacaaggctatgtttctcctagaaacaggttttgctgtaaatggttttgatgggcgaaagtgtgagaaaaggttataatagattcttttttttaattttgtgagaaattccaggtcttcttgcttaacttatatgcatgtggatatatttgttttcaaagccatggaagaatctctgttcatatattttaatgcaaattaccttgtatgctgctatgcaaattctattaaaaggcctacctgcttaagaattaaacatttttgaaactttcagggaagacctgtagactcaagcactttctctgcttttttgtatcttatcttggacacttatgctgaattatgttcttattattttcactggttataagctattccttgtacataatatttaaactatccaaatatccagcatacatttccatgtggctgccatcggctgttgatgccatgaatgaaatggctggttagaaagccaaaggtcttcttttttcaattcctaatgaataagtaaaatgccagatctctttggtctcaaagcaaattgctctgatcagatcaaatatctatgtaatgaaaagagacttacttaaatttgggattctgcttaaactttaagttgaatttgactgtagtcattcattctttttatatatctctgtcaggtatgacattaattaccaggtggtattatactctactttgagtttggacatcactttcagttaaatttctgttgttattgtggcttttttttttttttaaccccactgaagatggaagtagagcagtctgccatctcctgctgttctttctctgtgccccctaattgcttggtaatctaaaattattctgactttccacatactgtctttaaaaaccaattgtagcaatctgcccgcctccaccctttaagctaaatctttcactgtgctggatacatagacactcgataaatgtgtgatgatagttctaaaataattatgctatatatcagggttctgtatttttgagcaatatcattattcctatgctgtgatgttaaatggaatttattttacactagtaatagactgcttaagtggctgatttgaaacctttctctaaaaaaacaaaaacatctggcagatgagtgacacaaattcattctcttaaaggatagaatttcaagttaaggataaggcacaataaataggcacatagaggacatctgtttttgtttttggtttgggttttgtttttttttggtctctctgactagctaaactgccaactagaagaatggttgttatgtagtaactcagaagaatcttttaataagtttcttctttggtttcaaaacaaacttgagcttcatttcttgccacctctattctttcttcccacgttgggtgactgaactgatgcttattctagttttagaagaggatccacatttaatgtaaggcataaatatgccttttgcaaattattgcttgttctccagtgaacatttgatcatattcaacagaaatccaccatataaaccataatccttgaattgccccttttaaaatagattggttaaaaccaaaaacctataagagagaaatgatatttcattgtattgtaggtttgggaatcctggttagatttataatttctggccgggtgcggtggctcatgcctgtattcccagtactttgggagcccaaggtgggtggatcacctgaggtaaggagtttgagaccagcctggccaacatggtgaaaccccatctctactaaaaatacaaaaagttagctgggcatggtggtgcgcgcctgtggtcccagctactcgggaggctgaggtgggagaatcccttgaacccaggaggcagaagttgcagtgagctgagatcatgccattgcactccagcctgggcaacagagcgagacttcatctccaaaaaaagaaaaagaagaaaaagatttataatttctgagtcccctaagtccctttctcagtttgcaataatcttacgtccatgctattgacactaattttgaaactggaaagctaattaatgacatattcatgtgttctttcatctaataaacatttattaatgtatagttctacaccaggcattctgaagggtccaaaagaaagttcctgccctctagtagcacataatccgttatttctcagcacaccatgccatctgtttatcattcagcagttaagtaattcatcacttcatatttttaccaaagtatatttacaagtctgtttatctggatctggcaaactggaaaatgtttgaagggatactcaggctttgatccatgccaacatgaaaggactccaagcacatttaagtaggctggtcttttcatcatgcatgattttttttttagtgcaaatttagactttagtttgggaaagagaacagtatacagtatcctttgtaagataaatcacaacaacaaaaattaagttttattgcacaaagtagataaatgagaaagtctttcttaaaaaatgcttctttaactgtaacagcaaaactaaatgcatattttatcaaccccttatttctaattgctgtattcatttccacccttaaactatttaagcatttcatctgctgaaagtccttatatacatggtagacggaatatttctccattaatgatagatcaaaatgaagatatttaaaaattaacaaaatcaggccaaggcaggaggatcactttagcccaggaggtccagaccagcctgggcaacacagcgggaccccgactccatttaaaaaattaaaaaaaaaaaaaaaacttttaacatttaaaaaataaaaattaacaaaatttcacttattccaggacacgctggcatttggactcaatgaaaagggcacctaaagaaaataaggctgactgaatgttttccataattttcacacaataacagtccctttctatccagcttgccttccatttatctctagggttagcttttcaggcaacatccttggtcattgcccagaaagtacctgagctatcagtgattggaatggcacaggaaaccgaatcacatgggtgccctccccttggttttcaagtatcttggagttgtgcacaaaaattaggtcatgccttcagtgtcttgttctttaaacctaccctttgacaatcaggtgctaatgattgtatactattaaaaccagcacataagtattgtaaatgtgtgttcctcctaggttggaagaaatgtctttccttctatctgggtcctgttaaagcgggtgtcagttgtgtcttttcacctcgatttgtgaattaatagaattggggggagaggaaatgatgatgtcaattaagtttcaggtttggcatgatcatcattctcgatgatattctcactttgtcgcaaatctgcccttatcgtaagaacaagtttcagaattttccctccactatacgactccagtattatgtttacaatccattggatgagtgcagcattataagaccttggtgcccagaaaaatctgtcctttttggtaccaaacctgaggtcttttggaagataatgtagaaaaccactacctattgaaggcctgttttggctaatctgtgcaaactctgatgatacctgcttatgtggattcttttccacactgctttcatttttaagtataaagacttagaaaactagaataatgcttttacaaataattaaaagtatgtgatgttctgggttttttccttctttttagaaccctgtatttaaacaagccttctttttaagtcttgtttgaaatttaagtctcagatcttctggataccaaatcaaaaacccaacgcgtaaaacagggcagtatttgtgttcctaattttaaaaagctttatgtatactctataaatatagatgcataaacaacacttccccttgagtagcacatcaacatacagcattgtacattacaatgaaaatgtgtaacttaagggtattatatatataaatacatatatacctttgtaacctttatactgtaaataaaaaagttgctttagtcacgtgggttgttt

SEQ ID NO: 312390 - DNA, 9946 bp, Homo sapiens
gccgaggctgcctgactggaatgagggtagctgcggcgactgcggcggctggagcggggccggccatggcggtgtggacgcgggccaccaaagcggggctggtggagctgctcctgagggagcgctgggtccgagtggtggccgagctgagcggggagagcctgagcctgacgggcgacgccgccgcggccgagctggagcccgctctgggacccgcggccgccgccttcaacggcctcccaaacggcggcggcgcgggcgactcgctgcccgggagcccaagccgcggcctggggcccccgagcccgccggcgccgcctcggggccccgcgggtgaggcgggcgcgtcgccgcccgtgcgccgggtgcgggtggtgaagcaagaggcgggcggcctgggcatcagcatcaagggcggccgcgagaaccggatgccgatcctcatctccaagatcttccccgggctggctgccgaccagagccgggcgctgcggctgggcgacgccatcctgtcggtgaacggcaccgacctgcgccaggccacccacgaccaggccgtgcaggcgctgaagcgcgcgggcaaggaggtgctgctggaggacggagtttcgctgtgtctcccaggctggagtgcaacggcgcaatctcggctgacgataacctctgcctcccaggttcaagcctataatgaggaaatttctgtctgaccaatatcaggggcacatcagctgctgtactaagtttcttcaaatatcctggaattgtgtcaagttcatccgagaagtaacaccatatatcaagaagccatcattagtatcagatctgccgtgggaaggtgcagccccccagtcaccaagctttagtggcagtgaggactctggttcgccaaaacaccagaacagcaccaaggacaggaagatcatccctctcaaaatgtgctttgctgctagaaacctaagcatgccggatctggaaaacagattgatagagctacattctcctgatagcaggaacacgttgatcctacgctgcaaagatacagccacagcacactcctggttcgtagctatccacaccaacataatggctctcctcccacaggtgttggctgaactcaacgccatgcttggggcaaccagtacagcaggaggcagtaaagaggtgaagcatattgcctggctggcagaacaggcaaaactagatggtggaagacagcaatggagacctgtcctcatggctgtgactgagaaggatttgctgctctatgactgtatgccgtggacaagagatgcctgggcgtcaccatgccacagctacccacttgttgccaccaggttggttcattctggctccggatgtcgatccccctcccttggatctgaccttacatttgctaccaggacaggctctcgacagggcattgagatgcatctcttcagggtggagacacatcgggatctgtcatcctggaccaggatacttgttcagggttgccatgctgctgctgagctgatcaaggaagtctctctaggctgcatgttaaatggccaagaggtgaggcttactattcactatgaaaatgggttcaccatctcaagggaaaatggaggctccagcagcatattgtaccgctacccctttgaaaggctgaagatgtctgctgatgatggcatccgaaatctatacttggattttggtggtcccgagggagaactgaccatggacctgcactcttgtccgaagccgattgtatttgtgttgcacacgtttttatcggccaaagtcactcgtatgggactgcttgtatgagcaacaaaaaatcagaaaagagccttgactgtcacaagaaatatttccacctcaaaaaaaaaagcacaaaaagaaactctttgctctccttcagcacagtgccttcccaaggacctgcaaataactgctgaaccataaccgtgtttaaagaagagcctacctttcacagtctaccttggccagatattctagcactctaaaaggctccaaaatgaagctgttgatttattctcatttcaaaatatggtttatgagtaattaggtttatttctactgctaaaaagaatggctcattgttttctttttttttcattgttttcatttttagacataatcaaatacccaagcattgttttctttttcttctccctgtaggatttgtgttgtgcttagccttgatctcttgttcagaacaattgtcccttcccaggtgctagcttgcagcagcctgttgcttcctgagcattccagataggtcgtatgtcttggaatttactgtcctcactagctccttccaccataggaagtccttgaattgtatcaccaaagggttgttccatttgccctggatctccctctatctcagcctggccatcacttcccaccttatcccaagctttgccactgtctctaggacttagaacttgtaaatttgatttgccttgccttctacttcctttctagtggtgactgagttgaaaagcaagttggaagccactgcttttaaagaaaagttttgcttggtttaggtttttccaattttatttttgttaggagccaggggataagatttattttaaatgaaaatcctcttcctaggttaagccattttttttatgcttaccaaatgtgccttggttagggttagtggagctttattagtcactatttgaataactggaaatcactgccatttccaggagatcacctatcctagttttgaggaatagtcattgaggtgggtttccttaatggcatctcttctagtaggcagatctgtttgaacaagataaatcctaaagagccagcctgcttgaggagtagacttggtgggtgaagccagcaattccgcacaaacgtcatgttgaattgttttgggctgcccaaaaacaacaggatgcagcatcctggctgtggcctggccctttgtggcagcagtggcatggacaagcaactgctaattcgagacttactattggcttcacagcacaccctacagtgagcagggtgatgagaccgtggaacagctacctgcttttggttaagattgccagatatcattaggacacagtagcagcaagaatgctgattttgtagtgttagaaaatgaactcagcttgtttttcctaattttgaaggtggtatatatctgcaaacatttaaaatggtataatatcatataaaatgtcaaaattagcacagtccctggatctcaaagaataggtaatattgacttggatgttctttatgctctctgaagaaaggtctagggaaagttcttgtttgcttgattgatcaagagtgccacggaagaatgtgagcgctgtggagggtggaggagggtgtcacttcagatggggcaggcacagggggagaaaagaagagaaaaacacacctgtgtgcaaaatgagctatttggtttcagtgcggcctgaccgatggggaggacccatgagcagagagagttctaggtcaacattgtaactccattgtcctccttcacccataagtcagtcctccttcctcattacagtgaaaccaacaatatgcagaggttggggagagatgcctgttcttcccccagcttcatataattgtcaaagttccaaaaatgaattatctgaactgcttaaaactggaaattaaaatctagacaagaatatgtctttcaagagctttttatgttttgaaagttcataaacctaagattggctccatctgagataaattttcttttctttttttttttgagacggagtctcgttctgtctcccaggctggagtgcagtggcatgatctcggctcactgcaacctccacctcctaggttcaagtgattctcctgagtagctggggttatagctacccaccaccacacccagctaatttttgtatttttagtagaggcaggttttcaccatgttggctaggctggtcttgaactcccgacctcaagtgatccacctgccttggcctcccaaagtgctgggattataggtgtgagcccccgtgcctggcccacaataaattttcatttcagagaaggaaaaaaatctcttgaacgtccagaaatgatttctggaatcagaatttcaatatgtaataccctcaggtaggcaatcttgaaccctctatgcagtgagagcattattaatatgagatgttgaatgatgcctttacagacttcagcagcaaagccatttggttgaggttttctgtgttaatgtgaaaagctaagccactgagatttgcaggggagcttctgagccaccctgcttgttggttatatgaggatgtaaaataggtggaattaaaatgtgagcaggaaaggcaaggcatgtgtgcattttcactcattttggtcaaggttaaactgacatgtatagcactgaggtctgtagggttcttaatatcttttgagtcttgctgtgaaatgaaagtgtgggaggtttcctttgtccattagcagccccaagaaccagaacccttttgctgcttttcttacatacctaacagctctccagtcatgatgaccaaggttgttcttcaatcaaatgtgtttgtgggattttcagtccgcaaatgaagtgctctctaatgaatgggacaccatgataaatatgtatttatatttagatgccaaagtatggcaaattatttccaaatgataactacaaatgggaattttcgatattctaccttttttatagaaccagctcacttttcatttctttttcattttgaattaagaaaattgttgaggatgtggtgggttccagtgtgtggaatggaaaggaaactgcagaatagtgtctgctccccattcagagggactgcttcctgtgccccccagacccggggcttcgacagcttctccacattccacacagatgcctaggagcagcgagttggtatatgaaaagtctcccaccttttctcctaaaacttctctcctttctctccataaaaagaaaaggaaaggaacaaaagaaaaacattcagtttttctttttctgaaaaaggtaagtcctttcctgaagtcatcaaatgaaacattatctggaaattagtttctaatgttgtatatgaagaaatacttaaatataagttcctgcagtatttattagatagttgtaactgtaaactcacctccctagtagataagagtttcaggttaaatactggaacatatataggcagtcaaaaatactactttaaatgtcattcacctattttaaagccatgttttagcactttttaggccaaagaaggtctgatagtgcctgtttttatgttctgtactctcacaaactttgttactcaaaattattgcatggcaggagagattggattatttatttcttatatttttataagtaaaaaaatctttctaaacaacaaatacctaacattattactgattgttttcctaatttatcctcctaagttgaatggtaacaaagcttttccagctgaatgaatgcacttagctgataaaccagaatttgttcttttttttccttctttttttttggagacaggttctcactctgtcaccgaggttggagtgcagtggtatgatcatagctgactgcagcctcaaccttctgggctcaaatgatcctttcacctcagcctcctgagtagctgggaccacaggtgtgtgccaccacacctggctaatttttatggatttttttttcttttttttttttcgccatgttgcccaggctggtcttgaactcttggcactcaagcagtccttctgcctcagcctcccaaagtgctgggattacagatgtgagccactgcacctggccccagaaattatgcttaaaaaaaaaattaagctgtgtggaatctggacaaggctatgtttctcctagaaacaggttttgctgtaaatggttttgatgggcgaaagtgtgagaaaaggttataatagattcttttttttaattttgtgagaaattccaggtcttcttgcttaacttatatgcatgtggatatatttgttttcaaagccatggaagaatctctgttcatatattttaatgcaaattaccttgtatgctgctatgcaaattctattaaaaggcctacctgcttaagaattaaacatttttgaaactttcagggaagacctgtagactcaagcactttctctgcttttttgtatcttatcttggacacttatgctgaattatgttcttattattttcactggttataagctattccttgtacataatatttaaactatccaaatatccagcatacatttccatgtggctgccatcggctgttgatgccatgaatgaaatggctggttagaaagccaaaggtcttcttttttcaattcctaatgaataagtaaaatgccagatctctttggtctcaaagcaaattgctctgatcagatcaaatatctatgtaatgaaaagagacttacttaaatttgggattctgcttaaactttaagttgaatttgactgtagtcattcattctttttatatatctctgtcaggtatgacattaattaccaggtggtattatactctactttgagtttggacatcactttcagttaaatttctgttgttattgtggcttttttttttttttaaccccactgaagatggaagtagagcagtctgccatctcctgctgttctttctctgtgccccctaattgcttggtaatctaaaattattctgactttccacatactgtctttaaaaaccaattgtagcaatctgcccgcctccaccctttaagctaaatctttcactgtgctggatacatagacactcgataaatgtgtgatgatagttctaaaataattatgctatatatcagggttctgtatttttgagcaatatcattattcctatgctgtgatgttaaatggaatttattttacactagtaatagactgcttaagtggctgatttgaaacctttctctaaaaaaacaaaaacatctggcagatgagtgacacaaattcattctcttaaaggatagaatttcaagttaaggataaggcacaataaataggcacatagaggacatctgtttttgtttttggtttgggttttgtttttttttggtctctctgactagctaaactgccaactagaagaatggttgttatgtagtaactcagaagaatcttttaataagtttcttctttggtttcaaaacaaacttgagcttcatttcttgccacctctattctttcttcccacgttgggtgactgaactgatgcttattctagttttagaagaggatccacatttaatgtaaggcataaatatgccttttgcaaattattgcttgttctccagtgaacatttgatcatattcaacagaaatccaccatataaaccataatccttgaattgccccttttaaaatagattggttaaaaccaaaaacctataagagagaaatgatatttcattgtattgtaggtttgggaatcctggttagatttataatttctggccgggtgcggtggctcatgcctgtattcccagtactttgggagcccaaggtgggtggatcacctgaggtaaggagtttgagaccagcctggccaacatggtgaaaccccatctctactaaaaatacaaaaagttagctgggcatggtggtgcgcgcctgtggtcccagctactcgggaggctgaggtgggagaatcccttgaacccaggaggcagaagttgcagtgagctgagatcatgccattgcactccagcctgggcaacagagcgagacttcatctccaaaaaaagaaaaagaagaaaaagatttataatttctgagtcccctaagtccctttctcagtttgcaataatcttacgtccatgctattgacactaattttgaaactggaaagctaattaatgacatattcatgtgttctttcatctaataaacatttattaatgtatagttctacaccaggcattctgaagggtccaaaagaaagttcctgccctctagtagcacataatccgttatttctcagcacaccatgccatctgtttatcattcagcagttaagtaattcatcacttcatatttttaccaaagtatatttacaagtctgtttatctggatctggcaaactggaaaatgtttgaagggatactcaggctttgatccatgccaacatgaaaggactccaagcacatttaagtaggctggtcttttcatcatgcatgattttttttttagtgcaaatttagactttagtttgggaaagagaacagtatacagtatcctttgtaagataaatcacaacaacaaaaattaagttttattgcacaaagtagataaatgagaaagtctttcttaaaaaatgcttctttaactgtaacagcaaaactaaatgcatattttatcaaccccttatttctaattgctgtattcatttccacccttaaactatttaagcatttcatctgctgaaagtccttatatacatggtagacggaatatttctccattaatgatagatcaaaatgaagatatttaaaaattaacaaaatcaggccaaggcaggaggatcactttagcccaggaggtccagaccagcctgggcaacacagcgggaccccgactccatttaaaaaattaaaaaaaaaaaaaaaacttttaacatttaaaaaataaaaattaacaaaatttcacttattccaggacacgctggcatttggactcaatgaaaagggcacctaaagaaaataaggctgactgaatgttttccataattttcacacaataacagtccctttctatccagcttgccttccatttatctctagggttagcttttcaggcaacatccttggtcattgcccagaaagtacctgagctatcagtgattggaatggcacaggaaaccgaatcacatgggtgccctccccttggttttcaagtatcttggagttgtgcacaaaaattaggtcatgccttcagtgtcttgttctttaaacctaccctttgacaatcaggtgctaatgattgtatactattaaaaccagcacataagtattgtaaatgtgtgttcctcctaggttggaagaaatgtctttccttctatctgggtcctgttaaagcgggtgtcagttgtgtcttttcacctcgatttgtgaattaatagaattggggggagaggaaatgatgatgtcaattaagtttcaggtttggcatgatcatcattctcgatgatattctcactttgtcgcaaatctgcccttatcgtaagaacaagtttcagaattttccctccactatacgactccagtattatgtttacaatccattggatgagtgcagcattataagaccttggtgcccagaaaaatctgtcctttttggtaccaaacctgaggtcttttggaagataatgtagaaaaccactacctattgaaggcctgttttggctaatctgtgcaaactctgatgatacctgcttatgtggattcttttccacactgctttcatttttaagtataaagacttagaaaactagaataatgcttttacaaataattaaaagtatgtgatgttctgggttttttccttctttttagaaccctgtatttaaacaagccttctttttaagtcttgtttgaaatttaagtctcagatcttctggataccaaatcaaaaacccaacgcgtaaaacagggcagtatttgtgttcctaattttaaaaagctttatgtatactctataaatatagatgcataaacaacacttccccttgagtagcacatcaacatacagcattgtacattacaatgaaaatgtgtaacttaagggtattatatatataaatacatatatacctttgtaacctttatactgtaaataaaaaagttgctttagtcacgtgggttgttt

SEQ ID NO: 312391 - DNA, 3323 bp, Homo sapiens
gccgaggctgcctgactggaatgagggtagctgcggcgactgcggcggctggagcggggccggccatggcggtgtggacgcgggccaccaaagcggggctggtggagctgctcctgagggagcgctgggtccgagtggtggccgagctgagcggggagagcctgagcctgacgggcgacgccgccgcggccgagctggagcccgctctgggacccgcggccgccgccttcaacggcctcccaaacggcggcggcgcgggcgactcgctgcccgggagcccaagccgcggcctggggcccccgagcccgccggcgccgcctcggggccccgcgggtgaggcgggcgcgtcgccgcccgtgcgccgggtgcgggtggtgaagcaagaggcgggcggcctgggcatcagcatcaagggcggccgcgagaaccggatgccgatcctcatctccaagatcttccccgggctggctgccgaccagagccgggcgctgcggctgggcgacgccatcctgtcggtgaacggcaccgacctgcgccaggccacccacgaccaggccgtgcaggcgctgaagcgcgcgggcaaggaggtgctgctggaggtcaagttcatccgagaagtaacaccatatatcaagaagccatcattagtatcagatctgccgtgggaaggtgcagccccccagtcaccaagctttagtggcagtgaggactctggttcgccaaaacaccagaacagcaccaaggacaggaagatcatccctctcaaaatgtgctttgctgctagaaacctaagcatgccggatctggaaaacagattgatagagctacattctcctgatagcaggaacacgttgatcctacgctgcaaagatacagccacagcacactcctggttcgtagctatccacaccaacataatggctctcctcccacaggtgttggctgaactcaacgccatgcttggggcaaccagtacagcaggaggcagtaaagaggtgaagcatattgcctggctggcagaacaggcaaaactagatggtggaagacagcaatggagacctgtcctcatggctgtgactgagaaggatttgctgctctatgactgtatgccgtggacaagagatgcctgggcgtcaccatgccacagctacccacttgttgccaccaggttggttcattctggctccggatgtcgatccccctcccttggatctgaccttacatttgctaccaggacaggctctcgacagggcattgagatgcatctcttcagggtggagacacatcgggatctgtcatcctggaccaggatacttgttcagggttgccatgctgctgctgagctgatcaaggaagtctctctaggctgcatgttaaatggccaagaggtgaggcttactattcactatgaaaatgggttcaccatctcaagggaaaatggaggctccagcagcatattgtaccgctacccctttgaaaggctgaagatgtctgctgatgatggcatccgaaatctatacttggattttggtggtcccgagggagaactgaccatggacctgcactcttgtccgaagccgattgtatttgtgttgcacacgtttttatcggccaaagtcactcgtatgggactgcttgtatgagcaacaaaaaatcagaaaagagccttgactgtcacaagaaatatttccacctcaaaaaaaaaagcacaaaaagaaactctttgctctccttcagcacagtgccttcccaaggacctgcaaataactgctgaaccataaccgtgtttaaagaagagcctacctttcacagtctaccttggccagatattctagcactctaaaaggctccaaaatgaagctgttgatttattctcatttcaaaatatggtttatgagtaattaggtttatttctactgctaaaaagaatggctcattgttttctttttttttcattgttttcatttttagacataatcaaatacccaagcattgttttctttttcttctccctgtaggatttgtgttgtgcttagccttgatctcttgttcagaacaattgtcccttcccaggtgctagcttgcagcagcctgttgcttcctgagcattccagataggtcgtatgtcttggaatttactgtcctcactagctccttccaccataggaagtccttgaattgtatcaccaaagggttgttccatttgccctggatctccctctatctcagcctggccatcacttcccaccttatcccaagctttgccactgtctctaggacttagaacttgtaaatttgatttgccttgccttctacttcctttctagtggtgactgagttgaaaagcaagttggaagccactgcttttaaagaaaagttttgcttggtttaggtttttccaattttatttttgttaggagccaggggataagatttattttaaatgaaaatcctcttcctaggttaagccattttttttatgcttaccaaatgtgccttggttagggttagtggagctttattagtcactatttgaataactggaaatcactgccatttccaggagatcacctatcctagttttgaggaatagtcattgaggtgggtttccttaatggcatctcttctagtaggcagatctgtttgaacaagataaatcctaaagagccagcctgcttgaggagtagacttggtgggtgaagccagcaattccgcacaaacgtcatgttgaattgttttgggctgcccaaaaacaacaggatgcagcatcctggctgtggcctggccctttgtggcagcagtggcatggacaagcaactgctaattcgagacttactattggcttcacagcacaccctacagtgagcagggtgatgagaccgtggaacagctacctgcttttggttaagattgccagatatcattaggacacagtagcagcaagaatgctgattttgtagtgttagaaaatgaactcagcttgtttttcctaattttgaaggtggtatatatctgcaaacatttaaaatggtataatatcatataaaatgtcaaaattagcacagtccctggatctcaaagaataggtaatattgacttggatgttctttatgctctctgaagaaaggtctagggaaagttcttgtttgcttgattgatcaagagtgccacggaagaatgtgagcgctgtggagggttgtggactatgtttactttcccaagttggggttttcttaaagattcccggaaggtattgtgactcccttttgtcccagggggaatttttggtttctggactttccggaattggggtaaaacatcgg

SEQ ID NO: 312392 - DNA, 4301 bp, Homo sapiens
accccactgaagatggaagtagagcagtctgccatctcctgctgttctttctctgtgccccctaattgcttggtaatctaaaattattctgactttccacatactgtctttaaaaaccaattgtagcaatctgcccgcctccaccctttaagctaaatctttcactgtgctgggattacagatgtgagccactgcacctggccccagaaattatgcttaaaaaaaaaattaagctgtgtggaatctggacaaggctatgtttctcctagaaacaggttttgctgtaaatggttttgatgggcgaaagtgtgagaaaaggttataatagattcttttttttaattttgtgagaaattccaggtcttcttgcttaacttatatgcatgtggatatatttgttttcaaagccatggaagaatctctgttcatatattttaatgcaaattaccttgtatgctgctatgcaaattctattaaaaggcctacctgcttaagaattaaacatttttgaaactttcagggaagacctgtagactcaagcactttctctgcttttttgtatcttatcttggacacttatgctgaattatgttcttattattttcactggttataagctattccttgtacataatatttaaactatccaaatatccagcatacatttccatgtggctgccatcggctgttgatgccatgaatgaaatggctggttagaaagccaaaggtcttcttttttcaattcctaatgaataagtaaaatgccagatctctttggtctcaaagcaaattgctctgatcagatcaaatatctatgtaatgaaaagagacttacttaaatttgggattctgcttaaactttaagttgaatttgactgtagtcattcattctttttatatatctctgtcaggtatgacattaattaccaggtggtattatactctactttgagtttggacatcactttcagttaaatttctgttgttattgtggcttttttttttttttaaccccactgaagatggaagtagagcagtctgccatctcctgctgttctttctctgtgccccctaattgcttggtaatctaaaattattctgactttccacatactgtctttaaaaaccaattgtagcaatctgcccgcctccaccctttaagctaaatctttcactgtgctggatacatagacactcgataaatgtgtgatgatagttctaaaataattatgctatatatcagggttctgtatttttgagcaatatcattattcctatgctgtgatgttaaatggaatttattttacactagtaatagactgcttaagtggctgatttgaaacctttctctaaaaaaacaaaaacatctggcagatgagtgacacaaattcattctcttaaaggatagaatttcaagttaaggataaggcacaataaataggcacatagaggacatctgtttttgtttttggtttgggttttgtttttttttggtctctctgactagctaaactgccaactagaagaatggttgttatgtagtaactcagaagaatcttttaataagtttcttctttggtttcaaaacaaacttgagcttcatttcttgccacctctattctttcttcccacgttgggtgactgaactgatgcttattctagttttagaagaggatccacatttaatgtaaggcataaatatgccttttgcaaattattgcttgttctccagtgaacatttgatcatattcaacagaaatccaccatataaaccataatccttgaattgccccttttaaaatagattggttaaaaccaaaaacctataagagagaaatgatatttcattgtattgtaggtttgggaatcctggttagatttataatttctggccgggtgcggtggctcatgcctgtattcccagtactttgggagcccaaggtgggtggatcacctgaggtaaggagtttgagaccagcctggccaacatggtgaaaccccatctctactaaaaatacaaaaagttagctgggcatggtggtgcgcgcctgtggtcccagctactcgggaggctgaggtgggagaatcccttgaacccaggaggcagaagttgcagtgagctgagatcatgccattgcactccagcctgggcaacagagcgagacttcatctccaaaaaaagaaaaagaagaaaaagatttataatttctgagtcccctaagtccctttctcagtttgcaataatcttacgtccatgctattgacactaattttgaaactggaaagctaattaatgacatattcatgtgttctttcatctaataaacatttattaatgtatagttctacaccaggcattctgaagggtccaaaagaaagttcctgccctctagtagcacataatccgttatttctcagcacaccatgccatctgtttatcattcagcagttaagtaattcatcacttcatatttttaccaaagtatatttacaagtctgtttatctggatctggcaaactggaaaatgtttgaagggatactcaggctttgatccatgccaacatgaaaggactccaagcacatttaagtaggctggtcttttcatcatgcatgattttttttttagtgcaaatttagactttagtttgggaaagagaacagtatacagtatcctttgtaagataaatcacaacaacaaaaattaagttttattgcacaaagtagataaatgagaaagtctttcttaaaaaatgcttctttaactgtaacagcaaaactaaatgcatattttatcaaccccttatttctaattgctgtattcatttccacccttaaactatttaagcatttcatctgctgaaagtccttatatacatggtagacggaatatttctccattaatgatagatcaaaatgaagatatttaaaaattaacaaaatcaggccaaggcaggaggatcactttagcccaggaggtccagaccagcctgggcaacacagcgggaccccgactccatttaaaaaattaaaaaaaaaaaaaaaacttttaacatttaaaaaataaaaattaacaaaatttcacttattccaggacacgctggcatttggactcaatgaaaagggcacctaaagaaaataaggctgactgaatgttttccataattttcacacaataacagtccctttctatccagcttgccttccatttatctctagggttagcttttcaggcaacatccttggtcattgcccagaaagtacctgagctatcagtgattggaatggcacaggaaaccgaatcacatgggtgccctccccttggttttcaagtatcttggagttgtgcacaaaaattaggtcatgccttcagtgtcttgttctttaaacctaccctttgacaatcaggtgctaatgattgtatactattaaaaccagcacataagtattgtaaatgtgtgttcctcctaggttggaagaaatgtctttccttctatctgggtcctgttaaagcgggtgtcagttgtgtcttttcacctcgatttgtgaattaatagaattggggggagaggaaatgatgatgtcaattaagtttcaggtttggcatgatcatcattctcgatgatattctcactttgtcgcaaatctgcccttatcgtaagaacaagtttcagaattttccctccactatacgactccagtattatgtttacaatccattggatgagtgcagcattataagaccttggtgcccagaaaaatctgtcctttttggtaccaaacctgaggtcttttggaagataatgtagaaaaccactacctattgaaggcctgttttggctaatctgtgcaaactctgatgatacctgcttatgtggattcttttccacactgctttcatttttaagtataaagacttagaaaactagaataatgcttttacaaataattaaaagtatgtgatgttctgggttttttccttctttttagaaccctgtatttaaacaagccttctttttaagtcttgtttgaaatttaagtctcagatcttctggataccaaatcaaaaacccaacgcgtaaaacagggcagtatttgtgttcctaattttaaaaagctttatgtatactctataaatatagatgcataaacaacacttccccttgagtagcacatcaacatacagcattgtacattacaatgaaaatgtgtaacttaagggtattatatatataaatacatatatacctttgtaacctttatactgtaaataaaaaagttgctttagtcacgtgggttgttt

SEQ ID NO: 312393 - DNA, 1002 bp, Homo sapiens
gccgaggctgcctgactggaatgagggtagctgcggcgactgcggcggctggagcggggccggccatggcggtgtggacgcgggccaccaaagcggggctggtggagctgctcctgagggagcgctgggtccgagtggtggccgagctgagcggggagagcctgagcctgacgggcgacgccgccgcggccgagctggagcccgctctgggacccgcggccgccgccttcaacggcctcccaaacggcggcggcgcgggcgactcgctgcccgggagcccaagccgcggcctggggcccccgagcccgccggcgccgcctcggggccccgcgggtgaggcgggcgcgtcgccgcccgtgcgccgggtgcgggtggtgaagcaagaggcgggcggcctgggcatcagcatcaagggcggccgcgagaaccggatgccgatcctcatctccaagatcttccccgggctggctgccgaccagagccgggcgctgcggctgggcgacgccatcctgtcggtgaacggcaccgacctgcgccaggccacccacgaccaggccgtgcaggcgctgaagcgcgcgggcaaggaggtgctgctggaggtcaagttcatccgagaagtaacaccatatatcaagaagccatcattagtatcagatctgccgtgggaaggtgcagccccccagtcaccaagctttagtggcagtgaggactctggttcgccaaaacaccagaacagcaccaaggacaggaagatcatccctctcaaaatgtgctttgctgctagaaacctaagcatgccggatctggaaaacaggcaaaactagatggtggaagacagcaatggagacctgtcctcatggctgtgactgagaaggatttgctgctctatgactgtatgccgtggacaagagatgcctgggcgtcaccatgccacagctacccacttgttgccaccaggtaagtaagactaaagataaggaagtaaaatatttatcctactct

SEQ ID NO: 312394 - DNA, 1003 bp, Homo sapiens
gccgaggctgcctgactggaatgagggtagctgcggcgactgcggcggctggagcggggccggccatggcggtgtggacgcgggccaccaaagcggggctggtggagctgctcctgagggagcgctgggtccgagtggtggccgagctgagcggggagagcctgagcctgacgggcgacgccgccgcggccgagctggagcccgctctgggacccgcggccgccgccttcaacggcctcccaaacggcggcggcgcgggcgactcgctgcccgggagcccaagccgcggcctggggcccccgagcccgccggcgccgcctcggggccccgcgggtgaggcgggcgcgtcgccgcccgtgcgccgggtgcgggtggtgaagcaagaggcgggcggcctgggcatcagcatcaagggcggccgcgagaaccggatgccgatcctcatctccaagatcttccccgggctggctgccgaccagagccgggcgctgcggctgggcgacgccatcctgtcggtgaacggcaccgacctgcgccaggccacccacgaccaggccgtgcaggcgctgaagcgcgcgggcaaggaggtgctgctggagggtgagcggggccgggcgggagggtgggcaggccgcggcggcctgggctcgcgggagctcactttgttcctgccccgccggcggggcgagccggttctctccccgtctctctccaaacccgggtttctggagctttcagtgtggaaaaacggatgcttcttgcaggaaaagttgggcagccgccgaagtgtggcttgcagcccctagggaagactcggctgagattgagtaaaaagcagctgcctatgaagccccacctcggcccgataagctgacactaagaacttgagggagagcgaacggctcgagtgggtctgtctccgtttgcccgctgagaagtgccgggttggcgcttaactcactcacctctggctcctcggggcgggcgggtctattaaaaaaaa

SEQ ID NO: 312395 - DNA, 9780 bp, Homo sapiens
gccgaggctgcctgactggaatgagggtagctgcggcgactgcggcggctggagcggggccggccatggcggtgtggacgcgggccaccaaagcggggctggtggagctgctcctgagggagcgctgggtccgagtggtggccgagctgagcggggagagcctgagcctgacgggcgacgccgccgcggccgagctggagcccgctctgggacccgcggccgccgccttcaacggcctcccaaacggcggcggcgcgggcgactcgctgcccgggagcccaagccgcggcctggggcccccgagcccgccggcgccgcctcggggccccgcgggtgaggcgggcgcgtcgccgcccgtgcgccgggtgcgggtggtgaagcaagaggcgggcggcctgggcatcagcatcaagggcggccgcgagaaccggatgccgatcctcatctccaagatcttccccgggctggctgccgaccagagccgggcgctgcggctgggcgacgccatcctgtcggtgaacggcaccgacctgcgccaggccacccacgaccaggccgtgcaggcgctgaagcgcgcgggcaaggaggtgctgctggaggtcaagttcatccgagaagtaacaccatatatcaagaagccatcattagtatcagatctgccgtgggaaggtgcagccccccagtcaccaagctttagtggcagtgaggactctggttcgccaaaacaccagaacagcaccaaggacaggaagatcatccctctcaaaatgtgctttgctgctagaaacctaagcatgccggatctggaaaacagattgatagagctacattctcctgatagcaggaacacgttgatcctacgctgcaaagatacagccacagcacactcctggttcgtagctatccacaccaacataatggctctcctcccacaggtgttggctgaactcaacgccatgcttggggcaaccagtacagcaggaggcagtaaagaggtgaagcatattgcctggctggcagaacaggcaaaactagatggtggaagacagcaatggagacctgtcctcatggctgtgactgagaaggatttgctgctctatgactgtatgccgtggacaagagatgcctgggcgtcaccatgccacagctacccacttgttgccaccaggttggttcattctggctccggatgtcgatccccctcccttggatctgaccttacatttgctaccaggacaggctctcgacagggcattgagatgcatctcttcagggtggagacacatcgggatctgtcatcctggaccaggatacttgttcagggttgccatgctgctgctgagctgatcaaggaagtctctctaggctgcatgttaaatggccaagaggtgaggcttactattcactatgaaaatgggttcaccatctcaagggaaaatggaggctccagcagcatattgtaccgctacccctttgaaaggctgaagatgtctgctgatgatggcatccgaaatctatacttggattttggtggtcccgagggagaactgaccatggacctgcactcttgtccgaagccgattgtatttgtgttgcacacgtttttatcggccaaagtcactcgtatgggactgcttgtatgagcaacaaaaaatcagaaaagagccttgactgtcacaagaaatatttccacctcaaaaaaaaaagcacaaaaagaaactctttgctctccttcagcacagtgccttcccaaggacctgcaaataactgctgaaccataaccgtgtttaaagaagagcctacctttcacagtctaccttggccagatattctagcactctaaaaggctccaaaatgaagctgttgatttattctcatttcaaaatatggtttatgagtaattaggtttatttctactgctaaaaagaatggctcattgttttctttttttttcattgttttcatttttagacataatcaaatacccaagcattgttttctttttcttctccctgtaggatttgtgttgtgcttagccttgatctcttgttcagaacaattgtcccttcccaggtgctagcttgcagcagcctgttgcttcctgagcattccagataggtcgtatgtcttggaatttactgtcctcactagctccttccaccataggaagtccttgaattgtatcaccaaagggttgttccatttgccctggatctccctctatctcagcctggccatcacttcccaccttatcccaagctttgccactgtctctaggacttagaacttgtaaatttgatttgccttgccttctacttcctttctagtggtgactgagttgaaaagcaagttggaagccactgcttttaaagaaaagttttgcttggtttaggtttttccaattttatttttgttaggagccaggggataagatttattttaaatgaaaatcctcttcctaggttaagccattttttttatgcttaccaaatgtgccttggttagggttagtggagctttattagtcactatttgaataactggaaatcactgccatttccaggagatcacctatcctagttttgaggaatagtcattgaggtgggtttccttaatggcatctcttctagtaggcagatctgtttgaacaagataaatcctaaagagccagcctgcttgaggagtagacttggtgggtgaagccagcaattccgcacaaacgtcatgttgaattgttttgggctgcccaaaaacaacaggatgcagcatcctggctgtggcctggccctttgtggcagcagtggcatggacaagcaactgctaattcgagacttactattggcttcacagcacaccctacagtgagcagggtgatgagaccgtggaacagctacctgcttttggttaagattgccagatatcattaggacacagtagcagcaagaatgctgattttgtagtgttagaaaatgaactcagcttgtttttcctaattttgaaggtggtatatatctgcaaacatttaaaatggtataatatcatataaaatgtcaaaattagcacagtccctggatctcaaagaataggtaatattgacttggatgttctttatgctctctgaagaaaggtctagggaaagttcttgtttgcttgattgatcaagagtgccacggaagaatgtgagcgctgtggagggtggaggagggtgtcacttcagatggggcaggcacagggggagaaaagaagagaaaaacacacctgtgtgcaaaatgagctatttggtttcagtgcggcctgaccgatggggaggacccatgagcagagagagttctaggtcaacattgtaactccattgtcctccttcacccataagtcagtcctccttcctcattacagtgaaaccaacaatatgcagaggttggggagagatgcctgttcttcccccagcttcatataattgtcaaagttccaaaaatgaattatctgaactgcttaaaactggaaattaaaatctagacaagaatatgtctttcaagagctttttatgttttgaaagttcataaacctaagattggctccatctgagataaattttcttttctttttttttttgagacggagtctcgttctgtctcccaggctggagtgcagtggcatgatctcggctcactgcaacctccacctcctaggttcaagtgattctcctgagtagctggggttatagctacccaccaccacacccagctaatttttgtatttttagtagaggcaggttttcaccatgttggctaggctggtcttgaactcccgacctcaagtgatccacctgccttggcctcccaaagtgctgggattataggtgtgagcccccgtgcctggcccacaataaattttcatttcagagaaggaaaaaaatctcttgaacgtccagaaatgatttctggaatcagaatttcaatatgtaataccctcaggtaggcaatcttgaaccctctatgcagtgagagcattattaatatgagatgttgaatgatgcctttacagacttcagcagcaaagccatttggttgaggttttctgtgttaatgtgaaaagctaagccactgagatttgcaggggagcttctgagccaccctgcttgttggttatatgaggatgtaaaataggtggaattaaaatgtgagcaggaaaggcaaggcatgtgtgcattttcactcattttggtcaaggttaaactgacatgtatagcactgaggtctgtagggttcttaatatcttttgagtcttgctgtgaaatgaaagtgtgggaggtttcctttgtccattagcagccccaagaaccagaacccttttgctgcttttcttacatacctaacagctctccagtcatgatgaccaaggttgttcttcaatcaaatgtgtttgtgggattttcagtccgcaaatgaagtgctctctaatgaatgggacaccatgataaatatgtatttatatttagatgccaaagtatggcaaattatttccaaatgataactacaaatgggaattttcgatattctaccttttttatagaaccagctcacttttcatttctttttcattttgaattaagaaaattgttgaggatgtggtgggttccagtgtgtggaatggaaaggaaactgcagaatagtgtctgctccccattcagagggactgcttcctgtgccccccagacccggggcttcgacagcttctccacattccacacagatgcctaggagcagcgagttggtatatgaaaagtctcccaccttttctcctaaaacttctctcctttctctccataaaaagaaaaggaaaggaacaaaagaaaaacattcagtttttctttttctgaaaaaggtaagtcctttcctgaagtcatcaaatgaaacattatctggaaattagtttctaatgttgtatatgaagaaatacttaaatataagttcctgcagtatttattagatagttgtaactgtaaactcacctccctagtagataagagtttcaggttaaatactggaacatatataggcagtcaaaaatactactttaaatgtcattcacctattttaaagccatgttttagcactttttaggccaaagaaggtctgatagtgcctgtttttatgttctgtactctcacaaactttgttactcaaaattattgcatggcaggagagattggattatttatttcttatatttttataagtaaaaaaatctttctaaacaacaaatacctaacattattactgattgttttcctaatttatcctcctaagttgaatggtaacaaagcttttccagctgaatgaatgcacttagctgataaaccagaatttgttcttttttttccttctttttttttggagacaggttctcactctgtcaccgaggttggagtgcagtggtatgatcatagctgactgcagcctcaaccttctgggctcaaatgatcctttcacctcagcctcctgagtagctgggaccacaggtgtgtgccaccacacctggctaatttttatggatttttttttcttttttttttttcgccatgttgcccaggctggtcttgaactcttggcactcaagcagtccttctgcctcagcctcccaaagtgctgggattacagatgtgagccactgcacctggccccagaaattatgcttaaaaaaaaaattaagctgtgtggaatctggacaaggctatgtttctcctagaaacaggttttgctgtaaatggttttgatgggcgaaagtgtgagaaaaggttataatagattcttttttttaattttgtgagaaattccaggtcttcttgcttaacttatatgcatgtggatatatttgttttcaaagccatggaagaatctctgttcatatattttaatgcaaattaccttgtatgctgctatgcaaattctattaaaaggcctacctgcttaagaattaaacatttttgaaactttcagggaagacctgtagactcaagcactttctctgcttttttgtatcttatcttggacacttatgctgaattatgttcttattattttcactggttataagctattccttgtacataatatttaaactatccaaatatccagcatacatttccatgtggctgccatcggctgttgatgccatgaatgaaatggctggttagaaagccaaaggtcttcttttttcaattcctaatgaataagtaaaatgccagatctctttggtctcaaagcaaattgctctgatcagatcaaatatctatgtaatgaaaagagacttacttaaatttgggattctgcttaaactttaagttgaatttgactgtagtcattcattctttttatatatctctgtcaggtatgacattaattaccaggtggtattatactctactttgagtttggacatcactttcagttaaatttctgttgttattgtggcttttttttttttttaaccccactgaagatggaagtagagcagtctgccatctcctgctgttctttctctgtgccccctaattgcttggtaatctaaaattattctgactttccacatactgtctttaaaaaccaattgtagcaatctgcccgcctccaccctttaagctaaatctttcactgtgctggatacatagacactcgataaatgtgtgatgatagttctaaaataattatgctatatatcagggttctgtatttttgagcaatatcattattcctatgctgtgatgttaaatggaatttattttacactagtaatagactgcttaagtggctgatttgaaacctttctctaaaaaaacaaaaacatctggcagatgagtgacacaaattcattctcttaaaggatagaatttcaagttaaggataaggcacaataaataggcacatagaggacatctgtttttgtttttggtttgggttttgtttttttttggtctctctgactagctaaactgccaactagaagaatggttgttatgtagtaactcagaagaatcttttaataagtttcttctttggtttcaaaacaaacttgagcttcatttcttgccacctctattctttcttcccacgttgggtgactgaactgatgcttattctagttttagaagaggatccacatttaatgtaaggcataaatatgccttttgcaaattattgcttgttctccagtgaacatttgatcatattcaacagaaatccaccatataaaccataatccttgaattgccccttttaaaatagattggttaaaaccaaaaacctataagagagaaatgatatttcattgtattgtaggtttgggaatcctggttagatttataatttctggccgggtgcggtggctcatgcctgtattcccagtactttgggagcccaaggtgggtggatcacctgaggtaaggagtttgagaccagcctggccaacatggtgaaaccccatctctactaaaaatacaaaaagttagctgggcatggtggtgcgcgcctgtggtcccagctactcgggaggctgaggtgggagaatcccttgaacccaggaggcagaagttgcagtgagctgagatcatgccattgcactccagcctgggcaacagagcgagacttcatctccaaaaaaagaaaaagaagaaaaagatttataatttctgagtcccctaagtccctttctcagtttgcaataatcttacgtccatgctattgacactaattttgaaactggaaagctaattaatgacatattcatgtgttctttcatctaataaacatttattaatgtatagttctacaccaggcattctgaagggtccaaaagaaagttcctgccctctagtagcacataatccgttatttctcagcacaccatgccatctgtttatcattcagcagttaagtaattcatcacttcatatttttaccaaagtatatttacaagtctgtttatctggatctggcaaactggaaaatgtttgaagggatactcaggctttgatccatgccaacatgaaaggactccaagcacatttaagtaggctggtcttttcatcatgcatgattttttttttagtgcaaatttagactttagtttgggaaagagaacagtatacagtatcctttgtaagataaatcacaacaacaaaaattaagttttattgcacaaagtagataaatgagaaagtctttcttaaaaaatgcttctttaactgtaacagcaaaactaaatgcatattttatcaaccccttatttctaattgctgtattcatttccacccttaaactatttaagcatttcatctgctgaaagtccttatatacatggtagacggaatatttctccattaatgatagatcaaaatgaagatatttaaaaattaacaaaatcaggccaaggcaggaggatcactttagcccaggaggtccagaccagcctgggcaacacagcgggaccccgactccatttaaaaaattaaaaaaaaaaaaaaaacttttaacatttaaaaaataaaaattaacaaaatttcacttattccaggacacgctggcatttggactcaatgaaaagggcacctaaagaaaataaggctgactgaatgttttccataattttcacacaataacagtccctttctatccagcttgccttccatttatctctagggttagcttttcaggcaacatccttggtcattgcccagaaagtacctgagctatcagtgattggaatggcacaggaaaccgaatcacatgggtgccctccccttggttttcaagtatcttggagttgtgcacaaaaattaggtcatgccttcagtgtcttgttctttaaacctaccctttgacaatcaggtgctaatgattgtatactattaaaaccagcacataagtattgtaaatgtgtgttcctcctaggttggaagaaatgtctttccttctatctgggtcctgttaaagcgggtgtcagttgtgtcttttcacctcgatttgtgaattaatagaattggggggagaggaaatgatgatgtcaattaagtttcaggtttggcatgatcatcattctcgatgatattctcactttgtcgcaaatctgcccttatcgtaagaacaagtttcagaattttccctccactatacgactccagtattatgtttacaatccattggatgagtgcagcattataagaccttggtgcccagaaaaatctgtcctttttggtaccaaacctgaggtcttttggaagataatgtagaaaaccactacctattgaaggcctgttttggctaatctgtgcaaactctgatgatacctgcttatgtggattcttttccacactgctttcatttttaagtataaagacttagaaaactagaataatgcttttacaaataattaaaagtatgtgatgttctgggttttttccttctttttagaaccctgtatttaaacaagccttctttttaagtcttgtttgaaatttaagtctcagatcttctggataccaaatcaaaaacccaacgcgtaaaacagggcagtatttgtgttcctaattttaaaaagctttatgtatactctataaatatagatgcataaacaacacttccccttgagtagcacatcaacatacagcattgtacattacaatgaaaatgtgtaacttaagggtattatatatataaatacatatatacctttgtaacctttatactgtaaataaaaaagttgctttagtcacgtgggttgttt

SEQ ID NO: 312396 - DNA, 9569 bp, Homo sapiens
gccgaggctgcctgactggaatgagggtagctgcggcgactgcggcggctggagcggggccggccatggcggtgtggacgcgggccaccaaagcggggctggtggagctgctcctgagggagcgctgggtccgagtggtggccgagctgagcggggagagcctgagcctgacgggcgacgccgccgcggccgagctggagcccgctctgggacccgcggccgccgccttcaacggcctcccaaacggcggcggcgcgggcgactcgctgcccgggagcccaagccgcggcctggggcccccgagcccgccggcgccgcctcggggccccgcgggtgaggcgggcgcgtcgccgcccgtgcgccgggtgcgggtggtgaagcaagaggcgggcggcctgggcatcagcatcaagggcggccgcgagaaccggatgccgatcctcatctccaagatcttccccgggctggctgccgaccagagccgggcgctgcggctgggcgacgccatcctgtcggtgaacggcaccgacctgcgccaggccacccacgaccaggccgtgcaggcgctgaagcgcgcgggcaaggaggtgctgctggaggtcaagttcatccgagaagtaacaccatatatcaagaagccatcattagtatcagatctgccgtgggaaggtgcagccccccagtcaccaagctttagtggcagtgaggactctggttcgccaaaacaccagaacagcaccaaggacaggaagatcatccctctcaaaatgtgctttgctgctagaaacctaagcatgccggatctggaaaacaggcaaaactagatggtggaagacagcaatggagacctgtcctcatggctgtgactgagaaggatttgctgctctatgactgtatgccgtggacaagagatgcctgggcgtcaccatgccacagctacccacttgttgccaccaggttggttcattctggctccggatgtcgatccccctcccttggatctgaccttacatttgctaccaggacaggctctcgacagggcattgagatgcatctcttcagggtggagacacatcgggatctgtcatcctggaccaggatacttgttcagggttgccatgctgctgctgagctgatcaaggaagtctctctaggctgcatgttaaatggccaagaggtgaggcttactattcactatgaaaatgggttcaccatctcaagggaaaatggaggctccagcagcatattgtaccgctacccctttgaaaggctgaagatgtctgctgatgatggcatccgaaatctatacttggattttggtggtcccgagggagaactgaccatggacctgcactcttgtccgaagccgattgtatttgtgttgcacacgtttttatcggccaaagtcactcgtatgggactgcttgtatgagcaacaaaaaatcagaaaagagccttgactgtcacaagaaatatttccacctcaaaaaaaaaagcacaaaaagaaactctttgctctccttcagcacagtgccttcccaaggacctgcaaataactgctgaaccataaccgtgtttaaagaagagcctacctttcacagtctaccttggccagatattctagcactctaaaaggctccaaaatgaagctgttgatttattctcatttcaaaatatggtttatgagtaattaggtttatttctactgctaaaaagaatggctcattgttttctttttttttcattgttttcatttttagacataatcaaatacccaagcattgttttctttttcttctccctgtaggatttgtgttgtgcttagccttgatctcttgttcagaacaattgtcccttcccaggtgctagcttgcagcagcctgttgcttcctgagcattccagataggtcgtatgtcttggaatttactgtcctcactagctccttccaccataggaagtccttgaattgtatcaccaaagggttgttccatttgccctggatctccctctatctcagcctggccatcacttcccaccttatcccaagctttgccactgtctctaggacttagaacttgtaaatttgatttgccttgccttctacttcctttctagtggtgactgagttgaaaagcaagttggaagccactgcttttaaagaaaagttttgcttggtttaggtttttccaattttatttttgttaggagccaggggataagatttattttaaatgaaaatcctcttcctaggttaagccattttttttatgcttaccaaatgtgccttggttagggttagtggagctttattagtcactatttgaataactggaaatcactgccatttccaggagatcacctatcctagttttgaggaatagtcattgaggtgggtttccttaatggcatctcttctagtaggcagatctgtttgaacaagataaatcctaaagagccagcctgcttgaggagtagacttggtgggtgaagccagcaattccgcacaaacgtcatgttgaattgttttgggctgcccaaaaacaacaggatgcagcatcctggctgtggcctggccctttgtggcagcagtggcatggacaagcaactgctaattcgagacttactattggcttcacagcacaccctacagtgagcagggtgatgagaccgtggaacagctacctgcttttggttaagattgccagatatcattaggacacagtagcagcaagaatgctgattttgtagtgttagaaaatgaactcagcttgtttttcctaattttgaaggtggtatatatctgcaaacatttaaaatggtataatatcatataaaatgtcaaaattagcacagtccctggatctcaaagaataggtaatattgacttggatgttctttatgctctctgaagaaaggtctagggaaagttcttgtttgcttgattgatcaagagtgccacggaagaatgtgagcgctgtggagggtggaggagggtgtcacttcagatggggcaggcacagggggagaaaagaagagaaaaacacacctgtgtgcaaaatgagctatttggtttcagtgcggcctgaccgatggggaggacccatgagcagagagagttctaggtcaacattgtaactccattgtcctccttcacccataagtcagtcctccttcctcattacagtgaaaccaacaatatgcagaggttggggagagatgcctgttcttcccccagcttcatataattgtcaaagttccaaaaatgaattatctgaactgcttaaaactggaaattaaaatctagacaagaatatgtctttcaagagctttttatgttttgaaagttcataaacctaagattggctccatctgagataaattttcttttctttttttttttgagacggagtctcgttctgtctcccaggctggagtgcagtggcatgatctcggctcactgcaacctccacctcctaggttcaagtgattctcctgagtagctggggttatagctacccaccaccacacccagctaatttttgtatttttagtagaggcaggttttcaccatgttggctaggctggtcttgaactcccgacctcaagtgatccacctgccttggcctcccaaagtgctgggattataggtgtgagcccccgtgcctggcccacaataaattttcatttcagagaaggaaaaaaatctcttgaacgtccagaaatgatttctggaatcagaatttcaatatgtaataccctcaggtaggcaatcttgaaccctctatgcagtgagagcattattaatatgagatgttgaatgatgcctttacagacttcagcagcaaagccatttggttgaggttttctgtgttaatgtgaaaagctaagccactgagatttgcaggggagcttctgagccaccctgcttgttggttatatgaggatgtaaaataggtggaattaaaatgtgagcaggaaaggcaaggcatgtgtgcattttcactcattttggtcaaggttaaactgacatgtatagcactgaggtctgtagggttcttaatatcttttgagtcttgctgtgaaatgaaagtgtgggaggtttcctttgtccattagcagccccaagaaccagaacccttttgctgcttttcttacatacctaacagctctccagtcatgatgaccaaggttgttcttcaatcaaatgtgtttgtgggattttcagtccgcaaatgaagtgctctctaatgaatgggacaccatgataaatatgtatttatatttagatgccaaagtatggcaaattatttccaaatgataactacaaatgggaattttcgatattctaccttttttatagaaccagctcacttttcatttctttttcattttgaattaagaaaattgttgaggatgtggtgggttccagtgtgtggaatggaaaggaaactgcagaatagtgtctgctccccattcagagggactgcttcctgtgccccccagacccggggcttcgacagcttctccacattccacacagatgcctaggagcagcgagttggtatatgaaaagtctcccaccttttctcctaaaacttctctcctttctctccataaaaagaaaaggaaaggaacaaaagaaaaacattcagtttttctttttctgaaaaaggtaagtcctttcctgaagtcatcaaatgaaacattatctggaaattagtttctaatgttgtatatgaagaaatacttaaatataagttcctgcagtatttattagatagttgtaactgtaaactcacctccctagtagataagagtttcaggttaaatactggaacatatataggcagtcaaaaatactactttaaatgtcattcacctattttaaagccatgttttagcactttttaggccaaagaaggtctgatagtgcctgtttttatgttctgtactctcacaaactttgttactcaaaattattgcatggcaggagagattggattatttatttcttatatttttataagtaaaaaaatctttctaaacaacaaatacctaacattattactgattgttttcctaatttatcctcctaagttgaatggtaacaaagcttttccagctgaatgaatgcacttagctgataaaccagaatttgttcttttttttccttctttttttttggagacaggttctcactctgtcaccgaggttggagtgcagtggtatgatcatagctgactgcagcctcaaccttctgggctcaaatgatcctttcacctcagcctcctgagtagctgggaccacaggtgtgtgccaccacacctggctaatttttatggatttttttttcttttttttttttcgccatgttgcccaggctggtcttgaactcttggcactcaagcagtccttctgcctcagcctcccaaagtgctgggattacagatgtgagccactgcacctggccccagaaattatgcttaaaaaaaaaattaagctgtgtggaatctggacaaggctatgtttctcctagaaacaggttttgctgtaaatggttttgatgggcgaaagtgtgagaaaaggttataatagattcttttttttaattttgtgagaaattccaggtcttcttgcttaacttatatgcatgtggatatatttgttttcaaagccatggaagaatctctgttcatatattttaatgcaaattaccttgtatgctgctatgcaaattctattaaaaggcctacctgcttaagaattaaacatttttgaaactttcagggaagacctgtagactcaagcactttctctgcttttttgtatcttatcttggacacttatgctgaattatgttcttattattttcactggttataagctattccttgtacataatatttaaactatccaaatatccagcatacatttccatgtggctgccatcggctgttgatgccatgaatgaaatggctggttagaaagccaaaggtcttcttttttcaattcctaatgaataagtaaaatgccagatctctttggtctcaaagcaaattgctctgatcagatcaaatatctatgtaatgaaaagagacttacttaaatttgggattctgcttaaactttaagttgaatttgactgtagtcattcattctttttatatatctctgtcaggtatgacattaattaccaggtggtattatactctactttgagtttggacatcactttcagttaaatttctgttgttattgtggcttttttttttttttaaccccactgaagatggaagtagagcagtctgccatctcctgctgttctttctctgtgccccctaattgcttggtaatctaaaattattctgactttccacatactgtctttaaaaaccaattgtagcaatctgcccgcctccaccctttaagctaaatctttcactgtgctggatacatagacactcgataaatgtgtgatgatagttctaaaataattatgctatatatcagggttctgtatttttgagcaatatcattattcctatgctgtgatgttaaatggaatttattttacactagtaatagactgcttaagtggctgatttgaaacctttctctaaaaaaacaaaaacatctggcagatgagtgacacaaattcattctcttaaaggatagaatttcaagttaaggataaggcacaataaataggcacatagaggacatctgtttttgtttttggtttgggttttgtttttttttggtctctctgactagctaaactgccaactagaagaatggttgttatgtagtaactcagaagaatcttttaataagtttcttctttggtttcaaaacaaacttgagcttcatttcttgccacctctattctttcttcccacgttgggtgactgaactgatgcttattctagttttagaagaggatccacatttaatgtaaggcataaatatgccttttgcaaattattgcttgttctccagtgaacatttgatcatattcaacagaaatccaccatataaaccataatccttgaattgccccttttaaaatagattggttaaaaccaaaaacctataagagagaaatgatatttcattgtattgtaggtttgggaatcctggttagatttataatttctggccgggtgcggtggctcatgcctgtattcccagtactttgggagcccaaggtgggtggatcacctgaggtaaggagtttgagaccagcctggccaacatggtgaaaccccatctctactaaaaatacaaaaagttagctgggcatggtggtgcgcgcctgtggtcccagctactcgggaggctgaggtgggagaatcccttgaacccaggaggcagaagttgcagtgagctgagatcatgccattgcactccagcctgggcaacagagcgagacttcatctccaaaaaaagaaaaagaagaaaaagatttataatttctgagtcccctaagtccctttctcagtttgcaataatcttacgtccatgctattgacactaattttgaaactggaaagctaattaatgacatattcatgtgttctttcatctaataaacatttattaatgtatagttctacaccaggcattctgaagggtccaaaagaaagttcctgccctctagtagcacataatccgttatttctcagcacaccatgccatctgtttatcattcagcagttaagtaattcatcacttcatatttttaccaaagtatatttacaagtctgtttatctggatctggcaaactggaaaatgtttgaagggatactcaggctttgatccatgccaacatgaaaggactccaagcacatttaagtaggctggtcttttcatcatgcatgattttttttttagtgcaaatttagactttagtttgggaaagagaacagtatacagtatcctttgtaagataaatcacaacaacaaaaattaagttttattgcacaaagtagataaatgagaaagtctttcttaaaaaatgcttctttaactgtaacagcaaaactaaatgcatattttatcaaccccttatttctaattgctgtattcatttccacccttaaactatttaagcatttcatctgctgaaagtccttatatacatggtagacggaatatttctccattaatgatagatcaaaatgaagatatttaaaaattaacaaaatcaggccaaggcaggaggatcactttagcccaggaggtccagaccagcctgggcaacacagcgggaccccgactccatttaaaaaattaaaaaaaaaaaaaaaacttttaacatttaaaaaataaaaattaacaaaatttcacttattccaggacacgctggcatttggactcaatgaaaagggcacctaaagaaaataaggctgactgaatgttttccataattttcacacaataacagtccctttctatccagcttgccttccatttatctctagggttagcttttcaggcaacatccttggtcattgcccagaaagtacctgagctatcagtgattggaatggcacaggaaaccgaatcacatgggtgccctccccttggttttcaagtatcttggagttgtgcacaaaaattaggtcatgccttcagtgtcttgttctttaaacctaccctttgacaatcaggtgctaatgattgtatactattaaaaccagcacataagtattgtaaatgtgtgttcctcctaggttggaagaaatgtctttccttctatctgggtcctgttaaagcgggtgtcagttgtgtcttttcacctcgatttgtgaattaatagaattggggggagaggaaatgatgatgtcaattaagtttcaggtttggcatgatcatcattctcgatgatattctcactttgtcgcaaatctgcccttatcgtaagaacaagtttcagaattttccctccactatacgactccagtattatgtttacaatccattggatgagtgcagcattataagaccttggtgcccagaaaaatctgtcctttttggtaccaaacctgaggtcttttggaagataatgtagaaaaccactacctattgaaggcctgttttggctaatctgtgcaaactctgatgatacctgcttatgtggattcttttccacactgctttcatttttaagtataaagacttagaaaactagaataatgcttttacaaataattaaaagtatgtgatgttctgggttttttccttctttttagaaccctgtatttaaacaagccttctttttaagtcttgtttgaaatttaagtctcagatcttctggataccaaatcaaaaacccaacgcgtaaaacagggcagtatttgtgttcctaattttaaaaagctttatgtatactctataaatatagatgcataaacaacacttccccttgagtagcacatcaacatacagcattgtacattacaatgaaaatgtgtaacttaagggtattatatatataaatacatatatacctttgtaacctttatactgtaaataaaaaagttgctttagtcacgtgggttgttt

SEQ ID NO: 312397 - DNA, 9866 bp, Homo sapiens
gccgaggctgcctgactggaatgagggtagctgcggcgactgcggcggctggagcggggccggccatggcggtgtggacgcgggccaccaaagcggggctggtggagctgctcctgagggagcgctgggtccgagtggtggccgagctgagcggggagagcctgagcctgacgggcgacgccgccgcggccgagctggagcccgctctgggacccgcggccgccgccttcaacggcctcccaaacggcggcggcgcgggcgactcgctgcccgggagcccaagccgcggcctggggcccccgagcccgccggcgccgcctcggggccccgcgggtgaggcgggcgcgtcgccgcccgtgcgccgggtgcgggtggtgaagcaagaggcgggcggcctgggcatcagcatcaagggcggccgcgagaaccggatgccgatcctcatctccaagatcttccccgggctggctgccgaccagagccgggcgctgcggctgggcgacgccatcctgtcggtgaacggcaccgacctgcgccaggccacccacgaccaggccgtgcaggcgctgaagcgcgcgggcaaggaggtgctgctggagggcctataatgaggaaatttctgtctgaccaatatcaggggcacatcagctgctgtactaagtttcttcaaatatcctggaattgtgtcaagttcatccgagaagtaacaccatatatcaagaagccatcattagtatcagatctgccgtgggaaggtgcagccccccagtcaccaagctttagtggcagtgaggactctggttcgccaaaacaccagaacagcaccaaggacaggaagatcatccctctcaaaatgtgctttgctgctagaaacctaagcatgccggatctggaaaacagattgatagagctacattctcctgatagcaggaacacgttgatcctacgctgcaaagatacagccacagcacactcctggttcgtagctatccacaccaacataatggctctcctcccacaggtgttggctgaactcaacgccatgcttggggcaaccagtacagcaggaggcagtaaagaggtgaagcatattgcctggctggcagaacaggcaaaactagatggtggaagacagcaatggagacctgtcctcatggctgtgactgagaaggatttgctgctctatgactgtatgccgtggacaagagatgcctgggcgtcaccatgccacagctacccacttgttgccaccaggttggttcattctggctccggatgtcgatccccctcccttggatctgaccttacatttgctaccaggacaggctctcgacagggcattgagatgcatctcttcagggtggagacacatcgggatctgtcatcctggaccaggatacttgttcagggttgccatgctgctgctgagctgatcaaggaagtctctctaggctgcatgttaaatggccaagaggtgaggcttactattcactatgaaaatgggttcaccatctcaagggaaaatggaggctccagcagcatattgtaccgctacccctttgaaaggctgaagatgtctgctgatgatggcatccgaaatctatacttggattttggtggtcccgagggagaactgaccatggacctgcactcttgtccgaagccgattgtatttgtgttgcacacgtttttatcggccaaagtcactcgtatgggactgcttgtatgagcaacaaaaaatcagaaaagagccttgactgtcacaagaaatatttccacctcaaaaaaaaaagcacaaaaagaaactctttgctctccttcagcacagtgccttcccaaggacctgcaaataactgctgaaccataaccgtgtttaaagaagagcctacctttcacagtctaccttggccagatattctagcactctaaaaggctccaaaatgaagctgttgatttattctcatttcaaaatatggtttatgagtaattaggtttatttctactgctaaaaagaatggctcattgttttctttttttttcattgttttcatttttagacataatcaaatacccaagcattgttttctttttcttctccctgtaggatttgtgttgtgcttagccttgatctcttgttcagaacaattgtcccttcccaggtgctagcttgcagcagcctgttgcttcctgagcattccagataggtcgtatgtcttggaatttactgtcctcactagctccttccaccataggaagtccttgaattgtatcaccaaagggttgttccatttgccctggatctccctctatctcagcctggccatcacttcccaccttatcccaagctttgccactgtctctaggacttagaacttgtaaatttgatttgccttgccttctacttcctttctagtggtgactgagttgaaaagcaagttggaagccactgcttttaaagaaaagttttgcttggtttaggtttttccaattttatttttgttaggagccaggggataagatttattttaaatgaaaatcctcttcctaggttaagccattttttttatgcttaccaaatgtgccttggttagggttagtggagctttattagtcactatttgaataactggaaatcactgccatttccaggagatcacctatcctagttttgaggaatagtcattgaggtgggtttccttaatggcatctcttctagtaggcagatctgtttgaacaagataaatcctaaagagccagcctgcttgaggagtagacttggtgggtgaagccagcaattccgcacaaacgtcatgttgaattgttttgggctgcccaaaaacaacaggatgcagcatcctggctgtggcctggccctttgtggcagcagtggcatggacaagcaactgctaattcgagacttactattggcttcacagcacaccctacagtgagcagggtgatgagaccgtggaacagctacctgcttttggttaagattgccagatatcattaggacacagtagcagcaagaatgctgattttgtagtgttagaaaatgaactcagcttgtttttcctaattttgaaggtggtatatatctgcaaacatttaaaatggtataatatcatataaaatgtcaaaattagcacagtccctggatctcaaagaataggtaatattgacttggatgttctttatgctctctgaagaaaggtctagggaaagttcttgtttgcttgattgatcaagagtgccacggaagaatgtgagcgctgtggagggtggaggagggtgtcacttcagatggggcaggcacagggggagaaaagaagagaaaaacacacctgtgtgcaaaatgagctatttggtttcagtgcggcctgaccgatggggaggacccatgagcagagagagttctaggtcaacattgtaactccattgtcctccttcacccataagtcagtcctccttcctcattacagtgaaaccaacaatatgcagaggttggggagagatgcctgttcttcccccagcttcatataattgtcaaagttccaaaaatgaattatctgaactgcttaaaactggaaattaaaatctagacaagaatatgtctttcaagagctttttatgttttgaaagttcataaacctaagattggctccatctgagataaattttcttttctttttttttttgagacggagtctcgttctgtctcccaggctggagtgcagtggcatgatctcggctcactgcaacctccacctcctaggttcaagtgattctcctgagtagctggggttatagctacccaccaccacacccagctaatttttgtatttttagtagaggcaggttttcaccatgttggctaggctggtcttgaactcccgacctcaagtgatccacctgccttggcctcccaaagtgctgggattataggtgtgagcccccgtgcctggcccacaataaattttcatttcagagaaggaaaaaaatctcttgaacgtccagaaatgatttctggaatcagaatttcaatatgtaataccctcaggtaggcaatcttgaaccctctatgcagtgagagcattattaatatgagatgttgaatgatgcctttacagacttcagcagcaaagccatttggttgaggttttctgtgttaatgtgaaaagctaagccactgagatttgcaggggagcttctgagccaccctgcttgttggttatatgaggatgtaaaataggtggaattaaaatgtgagcaggaaaggcaaggcatgtgtgcattttcactcattttggtcaaggttaaactgacatgtatagcactgaggtctgtagggttcttaatatcttttgagtcttgctgtgaaatgaaagtgtgggaggtttcctttgtccattagcagccccaagaaccagaacccttttgctgcttttcttacatacctaacagctctccagtcatgatgaccaaggttgttcttcaatcaaatgtgtttgtgggattttcagtccgcaaatgaagtgctctctaatgaatgggacaccatgataaatatgtatttatatttagatgccaaagtatggcaaattatttccaaatgataactacaaatgggaattttcgatattctaccttttttatagaaccagctcacttttcatttctttttcattttgaattaagaaaattgttgaggatgtggtgggttccagtgtgtggaatggaaaggaaactgcagaatagtgtctgctccccattcagagggactgcttcctgtgccccccagacccggggcttcgacagcttctccacattccacacagatgcctaggagcagcgagttggtatatgaaaagtctcccaccttttctcctaaaacttctctcctttctctccataaaaagaaaaggaaaggaacaaaagaaaaacattcagtttttctttttctgaaaaaggtaagtcctttcctgaagtcatcaaatgaaacattatctggaaattagtttctaatgttgtatatgaagaaatacttaaatataagttcctgcagtatttattagatagttgtaactgtaaactcacctccctagtagataagagtttcaggttaaatactggaacatatataggcagtcaaaaatactactttaaatgtcattcacctattttaaagccatgttttagcactttttaggccaaagaaggtctgatagtgcctgtttttatgttctgtactctcacaaactttgttactcaaaattattgcatggcaggagagattggattatttatttcttatatttttataagtaaaaaaatctttctaaacaacaaatacctaacattattactgattgttttcctaatttatcctcctaagttgaatggtaacaaagcttttccagctgaatgaatgcacttagctgataaaccagaatttgttcttttttttccttctttttttttggagacaggttctcactctgtcaccgaggttggagtgcagtggtatgatcatagctgactgcagcctcaaccttctgggctcaaatgatcctttcacctcagcctcctgagtagctgggaccacaggtgtgtgccaccacacctggctaatttttatggatttttttttcttttttttttttcgccatgttgcccaggctggtcttgaactcttggcactcaagcagtccttctgcctcagcctcccaaagtgctgggattacagatgtgagccactgcacctggccccagaaattatgcttaaaaaaaaaattaagctgtgtggaatctggacaaggctatgtttctcctagaaacaggttttgctgtaaatggttttgatgggcgaaagtgtgagaaaaggttataatagattcttttttttaattttgtgagaaattccaggtcttcttgcttaacttatatgcatgtggatatatttgttttcaaagccatggaagaatctctgttcatatattttaatgcaaattaccttgtatgctgctatgcaaattctattaaaaggcctacctgcttaagaattaaacatttttgaaactttcagggaagacctgtagactcaagcactttctctgcttttttgtatcttatcttggacacttatgctgaattatgttcttattattttcactggttataagctattccttgtacataatatttaaactatccaaatatccagcatacatttccatgtggctgccatcggctgttgatgccatgaatgaaatggctggttagaaagccaaaggtcttcttttttcaattcctaatgaataagtaaaatgccagatctctttggtctcaaagcaaattgctctgatcagatcaaatatctatgtaatgaaaagagacttacttaaatttgggattctgcttaaactttaagttgaatttgactgtagtcattcattctttttatatatctctgtcaggtatgacattaattaccaggtggtattatactctactttgagtttggacatcactttcagttaaatttctgttgttattgtggcttttttttttttttaaccccactgaagatggaagtagagcagtctgccatctcctgctgttctttctctgtgccccctaattgcttggtaatctaaaattattctgactttccacatactgtctttaaaaaccaattgtagcaatctgcccgcctccaccctttaagctaaatctttcactgtgctggatacatagacactcgataaatgtgtgatgatagttctaaaataattatgctatatatcagggttctgtatttttgagcaatatcattattcctatgctgtgatgttaaatggaatttattttacactagtaatagactgcttaagtggctgatttgaaacctttctctaaaaaaacaaaaacatctggcagatgagtgacacaaattcattctcttaaaggatagaatttcaagttaaggataaggcacaataaataggcacatagaggacatctgtttttgtttttggtttgggttttgtttttttttggtctctctgactagctaaactgccaactagaagaatggttgttatgtagtaactcagaagaatcttttaataagtttcttctttggtttcaaaacaaacttgagcttcatttcttgccacctctattctttcttcccacgttgggtgactgaactgatgcttattctagttttagaagaggatccacatttaatgtaaggcataaatatgccttttgcaaattattgcttgttctccagtgaacatttgatcatattcaacagaaatccaccatataaaccataatccttgaattgccccttttaaaatagattggttaaaaccaaaaacctataagagagaaatgatatttcattgtattgtaggtttgggaatcctggttagatttataatttctggccgggtgcggtggctcatgcctgtattcccagtactttgggagcccaaggtgggtggatcacctgaggtaaggagtttgagaccagcctggccaacatggtgaaaccccatctctactaaaaatacaaaaagttagctgggcatggtggtgcgcgcctgtggtcccagctactcgggaggctgaggtgggagaatcccttgaacccaggaggcagaagttgcagtgagctgagatcatgccattgcactccagcctgggcaacagagcgagacttcatctccaaaaaaagaaaaagaagaaaaagatttataatttctgagtcccctaagtccctttctcagtttgcaataatcttacgtccatgctattgacactaattttgaaactggaaagctaattaatgacatattcatgtgttctttcatctaataaacatttattaatgtatagttctacaccaggcattctgaagggtccaaaagaaagttcctgccctctagtagcacataatccgttatttctcagcacaccatgccatctgtttatcattcagcagttaagtaattcatcacttcatatttttaccaaagtatatttacaagtctgtttatctggatctggcaaactggaaaatgtttgaagggatactcaggctttgatccatgccaacatgaaaggactccaagcacatttaagtaggctggtcttttcatcatgcatgattttttttttagtgcaaatttagactttagtttgggaaagagaacagtatacagtatcctttgtaagataaatcacaacaacaaaaattaagttttattgcacaaagtagataaatgagaaagtctttcttaaaaaatgcttctttaactgtaacagcaaaactaaatgcatattttatcaaccccttatttctaattgctgtattcatttccacccttaaactatttaagcatttcatctgctgaaagtccttatatacatggtagacggaatatttctccattaatgatagatcaaaatgaagatatttaaaaattaacaaaatcaggccaaggcaggaggatcactttagcccaggaggtccagaccagcctgggcaacacagcgggaccccgactccatttaaaaaattaaaaaaaaaaaaaaaacttttaacatttaaaaaataaaaattaacaaaatttcacttattccaggacacgctggcatttggactcaatgaaaagggcacctaaagaaaataaggctgactgaatgttttccataattttcacacaataacagtccctttctatccagcttgccttccatttatctctagggttagcttttcaggcaacatccttggtcattgcccagaaagtacctgagctatcagtgattggaatggcacaggaaaccgaatcacatgggtgccctccccttggttttcaagtatcttggagttgtgcacaaaaattaggtcatgccttcagtgtcttgttctttaaacctaccctttgacaatcaggtgctaatgattgtatactattaaaaccagcacataagtattgtaaatgtgtgttcctcctaggttggaagaaatgtctttccttctatctgggtcctgttaaagcgggtgtcagttgtgtcttttcacctcgatttgtgaattaatagaattggggggagaggaaatgatgatgtcaattaagtttcaggtttggcatgatcatcattctcgatgatattctcactttgtcgcaaatctgcccttatcgtaagaacaagtttcagaattttccctccactatacgactccagtattatgtttacaatccattggatgagtgcagcattataagaccttggtgcccagaaaaatctgtcctttttggtaccaaacctgaggtcttttggaagataatgtagaaaaccactacctattgaaggcctgttttggctaatctgtgcaaactctgatgatacctgcttatgtggattcttttccacactgctttcatttttaagtataaagacttagaaaactagaataatgcttttacaaataattaaaagtatgtgatgttctgggttttttccttctttttagaaccctgtatttaaacaagccttctttttaagtcttgtttgaaatttaagtctcagatcttctggataccaaatcaaaaacccaacgcgtaaaacagggcagtatttgtgttcctaattttaaaaagctttatgtatactctataaatatagatgcataaacaacacttccccttgagtagcacatcaacatacagcattgtacattacaatgaaaatgtgtaacttaagggtattatatatataaatacatatatacctttgtaacctttatactgtaaataaaaaagttgctttagtcacgtgggttgttt

SEQ ID NO: 312398 - DNA, 9348 bp, Homo sapiens
cgaatgctgctctatgatgtatgccgtggacaagagatgcctgggcgtcaccatgccacagctacccacttgtagccaccaggcctataatgaggaaatttctgtctgaccaatatcaggggcacatcagctgctgtactaagtttcttcaaatatcctggaattgtgtcaagttcatccgagaagtaacaccatatatcaagaagccatcattagtatcagatctgccgtgggaaggtgcagccccccagtcaccaagctttagtggcagtgaggactctggttcgccaaaacaccagaacagcaccaaggacaggaagatcatccctctcaaaatgtgctttgctgctagaaacctaagcatgccggatctggaaaacagattgatagagctacattctcctgatagcaggaacacgttgatcctacgctgcaaagatacagccacagcacactcctggttcgtagctatccacaccaacataatggctctcctcccacaggtgttggctgaactcaacgccatgcttggggcaaccagtacagcaggaggcagtaaagaggtgaagcatattgcctggctggcagaacaggcaaaactagatggtggaagacagcaatggagacctgtcctcatggctgtgactgagaaggatttgctgctctatgactgtatgccgtggacaagagatgcctgggcgtcaccatgccacagctacccacttgttgccaccaggttggttcattctggctccggatgtcgatccccctcccttggatctgaccttacatttgctaccaggacaggctctcgacagggcattgagatgcatctcttcagggtggagacacatcgggatctgtcatcctggaccaggatacttgttcagggttgccatgctgctgctgagctgatcaaggaagtctctctaggctgcatgttaaatggccaagaggtgaggcttactattcactatgaaaatgggttcaccatctcaagggaaaatggaggctccagcagcatattgtaccgctacccctttgaaaggctgaagatgtctgctgatgatggcatccgaaatctatacttggattttggtggtcccgagggagaactgaccatggacctgcactcttgtccgaagccgattgtatttgtgttgcacacgtttttatcggccaaagtcactcgtatgggactgcttgtatgagcaacaaaaaatcagaaaagagccttgactgtcacaagaaatatttccacctcaaaaaaaaaagcacaaaaagaaactctttgctctccttcagcacagtgccttcccaaggacctgcaaataactgctgaaccataaccgtgtttaaagaagagcctacctttcacagtctaccttggccagatattctagcactctaaaaggctccaaaatgaagctgttgatttattctcatttcaaaatatggtttatgagtaattaggtttatttctactgctaaaaagaatggctcattgttttctttttttttcattgttttcatttttagacataatcaaatacccaagcattgttttctttttcttctccctgtaggatttgtgttgtgcttagccttgatctcttgttcagaacaattgtcccttcccaggtgctagcttgcagcagcctgttgcttcctgagcattccagataggtcgtatgtcttggaatttactgtcctcactagctccttccaccataggaagtccttgaattgtatcaccaaagggttgttccatttgccctggatctccctctatctcagcctggccatcacttcccaccttatcccaagctttgccactgtctctaggacttagaacttgtaaatttgatttgccttgccttctacttcctttctagtggtgactgagttgaaaagcaagttggaagccactgcttttaaagaaaagttttgcttggtttaggtttttccaattttatttttgttaggagccaggggataagatttattttaaatgaaaatcctcttcctaggttaagccattttttttatgcttaccaaatgtgccttggttagggttagtggagctttattagtcactatttgaataactggaaatcactgccatttccaggagatcacctatcctagttttgaggaatagtcattgaggtgggtttccttaatggcatctcttctagtaggcagatctgtttgaacaagataaatcctaaagagccagcctgcttgaggagtagacttggtgggtgaagccagcaattccgcacaaacgtcatgttgaattgttttgggctgcccaaaaacaacaggatgcagcatcctggctgtggcctggccctttgtggcagcagtggcatggacaagcaactgctaattcgagacttactattggcttcacagcacaccctacagtgagcagggtgatgagaccgtggaacagctacctgcttttggttaagattgccagatatcattaggacacagtagcagcaagaatgctgattttgtagtgttagaaaatgaactcagcttgtttttcctaattttgaaggtggtatatatctgcaaacatttaaaatggtataatatcatataaaatgtcaaaattagcacagtccctggatctcaaagaataggtaatattgacttggatgttctttatgctctctgaagaaaggtctagggaaagttcttgtttgcttgattgatcaagagtgccacggaagaatgtgagcgctgtggagggtggaggagggtgtcacttcagatggggcaggcacagggggagaaaagaagagaaaaacacacctgtgtgcaaaatgagctatttggtttcagtgcggcctgaccgatggggaggacccatgagcagagagagttctaggtcaacattgtaactccattgtcctccttcacccataagtcagtcctccttcctcattacagtgaaaccaacaatatgcagaggttggggagagatgcctgttcttcccccagcttcatataattgtcaaagttccaaaaatgaattatctgaactgcttaaaactggaaattaaaatctagacaagaatatgtctttcaagagctttttatgttttgaaagttcataaacctaagattggctccatctgagataaattttcttttctttttttttttgagacggagtctcgttctgtctcccaggctggagtgcagtggcatgatctcggctcactgcaacctccacctcctaggttcaagtgattctcctgagtagctggggttatagctacccaccaccacacccagctaatttttgtatttttagtagaggcaggttttcaccatgttggctaggctggtcttgaactcccgacctcaagtgatccacctgccttggcctcccaaagtgctgggattataggtgtgagcccccgtgcctggcccacaataaattttcatttcagagaaggaaaaaaatctcttgaacgtccagaaatgatttctggaatcagaatttcaatatgtaataccctcaggtaggcaatcttgaaccctctatgcagtgagagcattattaatatgagatgttgaatgatgcctttacagacttcagcagcaaagccatttggttgaggttttctgtgttaatgtgaaaagctaagccactgagatttgcaggggagcttctgagccaccctgcttgttggttatatgaggatgtaaaataggtggaattaaaatgtgagcaggaaaggcaaggcatgtgtgcattttcactcattttggtcaaggttaaactgacatgtatagcactgaggtctgtagggttcttaatatcttttgagtcttgctgtgaaatgaaagtgtgggaggtttcctttgtccattagcagccccaagaaccagaacccttttgctgcttttcttacatacctaacagctctccagtcatgatgaccaaggttgttcttcaatcaaatgtgtttgtgggattttcagtccgcaaatgaagtgctctctaatgaatgggacaccatgataaatatgtatttatatttagatgccaaagtatggcaaattatttccaaatgataactacaaatgggaattttcgatattctaccttttttatagaaccagctcacttttcatttctttttcattttgaattaagaaaattgttgaggatgtggtgggttccagtgtgtggaatggaaaggaaactgcagaatagtgtctgctccccattcagagggactgcttcctgtgccccccagacccggggcttcgacagcttctccacattccacacagatgcctaggagcagcgagttggtatatgaaaagtctcccaccttttctcctaaaacttctctcctttctctccataaaaagaaaaggaaaggaacaaaagaaaaacattcagtttttctttttctgaaaaaggtaagtcctttcctgaagtcatcaaatgaaacattatctggaaattagtttctaatgttgtatatgaagaaatacttaaatataagttcctgcagtatttattagatagttgtaactgtaaactcacctccctagtagataagagtttcaggttaaatactggaacatatataggcagtcaaaaatactactttaaatgtcattcacctattttaaagccatgttttagcactttttaggccaaagaaggtctgatagtgcctgtttttatgttctgtactctcacaaactttgttactcaaaattattgcatggcaggagagattggattatttatttcttatatttttataagtaaaaaaatctttctaaacaacaaatacctaacattattactgattgttttcctaatttatcctcctaagttgaatggtaacaaagcttttccagctgaatgaatgcacttagctgataaaccagaatttgttcttttttttccttctttttttttggagacaggttctcactctgtcaccgaggttggagtgcagtggtatgatcatagctgactgcagcctcaaccttctgggctcaaatgatcctttcacctcagcctcctgagtagctgggaccacaggtgtgtgccaccacacctggctaatttttatggatttttttttcttttttttttttcgccatgttgcccaggctggtcttgaactcttggcactcaagcagtccttctgcctcagcctcccaaagtgctgggattacagatgtgagccactgcacctggccccagaaattatgcttaaaaaaaaaattaagctgtgtggaatctggacaaggctatgtttctcctagaaacaggttttgctgtaaatggttttgatgggcgaaagtgtgagaaaaggttataatagattcttttttttaattttgtgagaaattccaggtcttcttgcttaacttatatgcatgtggatatatttgttttcaaagccatggaagaatctctgttcatatattttaatgcaaattaccttgtatgctgctatgcaaattctattaaaaggcctacctgcttaagaattaaacatttttgaaactttcagggaagacctgtagactcaagcactttctctgcttttttgtatcttatcttggacacttatgctgaattatgttcttattattttcactggttataagctattccttgtacataatatttaaactatccaaatatccagcatacatttccatgtggctgccatcggctgttgatgccatgaatgaaatggctggttagaaagccaaaggtcttcttttttcaattcctaatgaataagtaaaatgccagatctctttggtctcaaagcaaattgctctgatcagatcaaatatctatgtaatgaaaagagacttacttaaatttgggattctgcttaaactttaagttgaatttgactgtagtcattcattctttttatatatctctgtcaggtatgacattaattaccaggtggtattatactctactttgagtttggacatcactttcagttaaatttctgttgttattgtggcttttttttttttttaaccccactgaagatggaagtagagcagtctgccatctcctgctgttctttctctgtgccccctaattgcttggtaatctaaaattattctgactttccacatactgtctttaaaaaccaattgtagcaatctgcccgcctccaccctttaagctaaatctttcactgtgctggatacatagacactcgataaatgtgtgatgatagttctaaaataattatgctatatatcagggttctgtatttttgagcaatatcattattcctatgctgtgatgttaaatggaatttattttacactagtaatagactgcttaagtggctgatttgaaacctttctctaaaaaaacaaaaacatctggcagatgagtgacacaaattcattctcttaaaggatagaatttcaagttaaggataaggcacaataaataggcacatagaggacatctgtttttgtttttggtttgggttttgtttttttttggtctctctgactagctaaactgccaactagaagaatggttgttatgtagtaactcagaagaatcttttaataagtttcttctttggtttcaaaacaaacttgagcttcatttcttgccacctctattctttcttcccacgttgggtgactgaactgatgcttattctagttttagaagaggatccacatttaatgtaaggcataaatatgccttttgcaaattattgcttgttctccagtgaacatttgatcatattcaacagaaatccaccatataaaccataatccttgaattgccccttttaaaatagattggttaaaaccaaaaacctataagagagaaatgatatttcattgtattgtaggtttgggaatcctggttagatttataatttctggccgggtgcggtggctcatgcctgtattcccagtactttgggagcccaaggtgggtggatcacctgaggtaaggagtttgagaccagcctggccaacatggtgaaaccccatctctactaaaaatacaaaaagttagctgggcatggtggtgcgcgcctgtggtcccagctactcgggaggctgaggtgggagaatcccttgaacccaggaggcagaagttgcagtgagctgagatcatgccattgcactccagcctgggcaacagagcgagacttcatctccaaaaaaagaaaaagaagaaaaagatttataatttctgagtcccctaagtccctttctcagtttgcaataatcttacgtccatgctattgacactaattttgaaactggaaagctaattaatgacatattcatgtgttctttcatctaataaacatttattaatgtatagttctacaccaggcattctgaagggtccaaaagaaagttcctgccctctagtagcacataatccgttatttctcagcacaccatgccatctgtttatcattcagcagttaagtaattcatcacttcatatttttaccaaagtatatttacaagtctgtttatctggatctggcaaactggaaaatgtttgaagggatactcaggctttgatccatgccaacatgaaaggactccaagcacatttaagtaggctggtcttttcatcatgcatgattttttttttagtgcaaatttagactttagtttgggaaagagaacagtatacagtatcctttgtaagataaatcacaacaacaaaaattaagttttattgcacaaagtagataaatgagaaagtctttcttaaaaaatgcttctttaactgtaacagcaaaactaaatgcatattttatcaaccccttatttctaattgctgtattcatttccacccttaaactatttaagcatttcatctgctgaaagtccttatatacatggtagacggaatatttctccattaatgatagatcaaaatgaagatatttaaaaattaacaaaatcaggccaaggcaggaggatcactttagcccaggaggtccagaccagcctgggcaacacagcgggaccccgactccatttaaaaaattaaaaaaaaaaaaaaaacttttaacatttaaaaaataaaaattaacaaaatttcacttattccaggacacgctggcatttggactcaatgaaaagggcacctaaagaaaataaggctgactgaatgttttccataattttcacacaataacagtccctttctatccagcttgccttccatttatctctagggttagcttttcaggcaacatccttggtcattgcccagaaagtacctgagctatcagtgattggaatggcacaggaaaccgaatcacatgggtgccctccccttggttttcaagtatcttggagttgtgcacaaaaattaggtcatgccttcagtgtcttgttctttaaacctaccctttgacaatcaggtgctaatgattgtatactattaaaaccagcacataagtattgtaaatgtgtgttcctcctaggttggaagaaatgtctttccttctatctgggtcctgttaaagcgggtgtcagttgtgtcttttcacctcgatttgtgaattaatagaattggggggagaggaaatgatgatgtcaattaagtttcaggtttggcatgatcatcattctcgatgatattctcactttgtcgcaaatctgcccttatcgtaagaacaagtttcagaattttccctccactatacgactccagtattatgtttacaatccattggatgagtgcagcattataagaccttggtgcccagaaaaatctgtcctttttggtaccaaacctgaggtcttttggaagataatgtagaaaaccactacctattgaaggcctgttttggctaatctgtgcaaactctgatgatacctgcttatgtggattcttttccacactgctttcatttttaagtataaagacttagaaaactagaataatgcttttacaaataattaaaagtatgtgatgttctgggttttttccttctttttagaaccctgtatttaaacaagccttctttttaagtcttgtttgaaatttaagtctcagatcttctggataccaaatcaaaaacccaacgcgtaaaacagggcagtatttgtgttcctaattttaaaaagctttatgtatactctataaatatagatgcataaacaacacttccccttgagtagcacatcaacatacagcattgtacattacaatgaaaatgtgtaacttaagggtattatatatataaatacatatatacctttgtaacctttatactgtaaataaaaaagttgctttagtcacgtgggttgttt

SEQ ID NO: 312399 - DNA, 8885 bp, Homo sapiens
gccgaggctgcctgactggaatgagggtagctgcggcgactgcggcggctggagcggggccggccatggcggtgtggacgcgggccaccaaagcggggctggtggagctgctcctgagggagcgctgggtccgagtggtggccgagctgagcggggagagcctgagcctgacgggcgacgccgccgcggccgagctggagcccgctctgggacccgcggccgccgccttcaacggcctcccaaacggcggcggcgcgggcgactcgctgcccgggagcccaagccgcggcctggggcccccgagcccgccggcgccgcctcggggccccgcgggtgaggcgggcgcgtcgccgcccgtgcgccgggtgcgggtggtgaagcaagaggcgggcggcctgggcatcagcatcaagggcggccgcgagaaccggatgccgatcctcatctccaagatcttccccgggctggctgccgaccagagccgggcgctgcggctgggcgacgccatcctgtcggtgaacggcaccgacctgcgccaggccacccacgaccaggccgtgcaggcgctgaagcgcgcgggcaaggaggtgctgctggaggtgatgatggcatccgaaatctatacttggattttggtggtcccgagggagaactgaccatggacctgcactcttgtccgaagccgattgtatttgtgttgcacacgtttttatcggccaaagtcactcgtatgggactgcttgtatgagcaacaaaaaatcagaaaagagccttgactgtcacaagaaatatttccacctcaaaaaaaaaagcacaaaaagaaactctttgctctccttcagcacagtgccttcccaaggacctgcaaataactgctgaaccataaccgtgtttaaagaagagcctacctttcacagtctaccttggccagatattctagcactctaaaaggctccaaaatgaagctgttgatttattctcatttcaaaatatggtttatgagtaattaggtttatttctactgctaaaaagaatggctcattgttttctttttttttcattgttttcatttttagacataatcaaatacccaagcattgttttctttttcttctccctgtaggatttgtgttgtgcttagccttgatctcttgttcagaacaattgtcccttcccaggtgctagcttgcagcagcctgttgcttcctgagcattccagataggtcgtatgtcttggaatttactgtcctcactagctccttccaccataggaagtccttgaattgtatcaccaaagggttgttccatttgccctggatctccctctatctcagcctggccatcacttcccaccttatcccaagctttgccactgtctctaggacttagaacttgtaaatttgatttgccttgccttctacttcctttctagtggtgactgagttgaaaagcaagttggaagccactgcttttaaagaaaagttttgcttggtttaggtttttccaattttatttttgttaggagccaggggataagatttattttaaatgaaaatcctcttcctaggttaagccattttttttatgcttaccaaatgtgccttggttagggttagtggagctttattagtcactatttgaataactggaaatcactgccatttccaggagatcacctatcctagttttgaggaatagtcattgaggtgggtttccttaatggcatctcttctagtaggcagatctgtttgaacaagataaatcctaaagagccagcctgcttgaggagtagacttggtgggtgaagccagcaattccgcacaaacgtcatgttgaattgttttgggctgcccaaaaacaacaggatgcagcatcctggctgtggcctggccctttgtggcagcagtggcatggacaagcaactgctaattcgagacttactattggcttcacagcacaccctacagtgagcagggtgatgagaccgtggaacagctacctgcttttggttaagattgccagatatcattaggacacagtagcagcaagaatgctgattttgtagtgttagaaaatgaactcagcttgtttttcctaattttgaaggtggtatatatctgcaaacatttaaaatggtataatatcatataaaatgtcaaaattagcacagtccctggatctcaaagaataggtaatattgacttggatgttctttatgctctctgaagaaaggtctagggaaagttcttgtttgcttgattgatcaagagtgccacggaagaatgtgagcgctgtggagggtggaggagggtgtcacttcagatggggcaggcacagggggagaaaagaagagaaaaacacacctgtgtgcaaaatgagctatttggtttcagtgcggcctgaccgatggggaggacccatgagcagagagagttctaggtcaacattgtaactccattgtcctccttcacccataagtcagtcctccttcctcattacagtgaaaccaacaatatgcagaggttggggagagatgcctgttcttcccccagcttcatataattgtcaaagttccaaaaatgaattatctgaactgcttaaaactggaaattaaaatctagacaagaatatgtctttcaagagctttttatgttttgaaagttcataaacctaagattggctccatctgagataaattttcttttctttttttttttgagacggagtctcgttctgtctcccaggctggagtgcagtggcatgatctcggctcactgcaacctccacctcctaggttcaagtgattctcctgagtagctggggttatagctacccaccaccacacccagctaatttttgtatttttagtagaggcaggttttcaccatgttggctaggctggtcttgaactcccgacctcaagtgatccacctgccttggcctcccaaagtgctgggattataggtgtgagcccccgtgcctggcccacaataaattttcatttcagagaaggaaaaaaatctcttgaacgtccagaaatgatttctggaatcagaatttcaatatgtaataccctcaggtaggcaatcttgaaccctctatgcagtgagagcattattaatatgagatgttgaatgatgcctttacagacttcagcagcaaagccatttggttgaggttttctgtgttaatgtgaaaagctaagccactgagatttgcaggggagcttctgagccaccctgcttgttggttatatgaggatgtaaaataggtggaattaaaatgtgagcaggaaaggcaaggcatgtgtgcattttcactcattttggtcaaggttaaactgacatgtatagcactgaggtctgtagggttcttaatatcttttgagtcttgctgtgaaatgaaagtgtgggaggtttcctttgtccattagcagccccaagaaccagaacccttttgctgcttttcttacatacctaacagctctccagtcatgatgaccaaggttgttcttcaatcaaatgtgtttgtgggattttcagtccgcaaatgaagtgctctctaatgaatgggacaccatgataaatatgtatttatatttagatgccaaagtatggcaaattatttccaaatgataactacaaatgggaattttcgatattctaccttttttatagaaccagctcacttttcatttctttttcattttgaattaagaaaattgttgaggatgtggtgggttccagtgtgtggaatggaaaggaaactgcagaatagtgtctgctccccattcagagggactgcttcctgtgccccccagacccggggcttcgacagcttctccacattccacacagatgcctaggagcagcgagttggtatatgaaaagtctcccaccttttctcctaaaacttctctcctttctctccataaaaagaaaaggaaaggaacaaaagaaaaacattcagtttttctttttctgaaaaaggtaagtcctttcctgaagtcatcaaatgaaacattatctggaaattagtttctaatgttgtatatgaagaaatacttaaatataagttcctgcagtatttattagatagttgtaactgtaaactcacctccctagtagataagagtttcaggttaaatactggaacatatataggcagtcaaaaatactactttaaatgtcattcacctattttaaagccatgttttagcactttttaggccaaagaaggtctgatagtgcctgtttttatgttctgtactctcacaaactttgttactcaaaattattgcatggcaggagagattggattatttatttcttatatttttataagtaaaaaaatctttctaaacaacaaatacctaacattattactgattgttttcctaatttatcctcctaagttgaatggtaacaaagcttttccagctgaatgaatgcacttagctgataaaccagaatttgttcttttttttccttctttttttttggagacaggttctcactctgtcaccgaggttggagtgcagtggtatgatcatagctgactgcagcctcaaccttctgggctcaaatgatcctttcacctcagcctcctgagtagctgggaccacaggtgtgtgccaccacacctggctaatttttatggatttttttttcttttttttttttcgccatgttgcccaggctggtcttgaactcttggcactcaagcagtccttctgcctcagcctcccaaagtgctgggattacagatgtgagccactgcacctggccccagaaattatgcttaaaaaaaaaattaagctgtgtggaatctggacaaggctatgtttctcctagaaacaggttttgctgtaaatggttttgatgggcgaaagtgtgagaaaaggttataatagattcttttttttaattttgtgagaaattccaggtcttcttgcttaacttatatgcatgtggatatatttgttttcaaagccatggaagaatctctgttcatatattttaatgcaaattaccttgtatgctgctatgcaaattctattaaaaggcctacctgcttaagaattaaacatttttgaaactttcagggaagacctgtagactcaagcactttctctgcttttttgtatcttatcttggacacttatgctgaattatgttcttattattttcactggttataagctattccttgtacataatatttaaactatccaaatatccagcatacatttccatgtggctgccatcggctgttgatgccatgaatgaaatggctggttagaaagccaaaggtcttcttttttcaattcctaatgaataagtaaaatgccagatctctttggtctcaaagcaaattgctctgatcagatcaaatatctatgtaatgaaaagagacttacttaaatttgggattctgcttaaactttaagttgaatttgactgtagtcattcattctttttatatatctctgtcaggtatgacattaattaccaggtggtattatactctactttgagtttggacatcactttcagttaaatttctgttgttattgtggcttttttttttttttaaccccactgaagatggaagtagagcagtctgccatctcctgctgttctttctctgtgccccctaattgcttggtaatctaaaattattctgactttccacatactgtctttaaaaaccaattgtagcaatctgcccgcctccaccctttaagctaaatctttcactgtgctggatacatagacactcgataaatgtgtgatgatagttctaaaataattatgctatatatcagggttctgtatttttgagcaatatcattattcctatgctgtgatgttaaatggaatttattttacactagtaatagactgcttaagtggctgatttgaaacctttctctaaaaaaacaaaaacatctggcagatgagtgacacaaattcattctcttaaaggatagaatttcaagttaaggataaggcacaataaataggcacatagaggacatctgtttttgtttttggtttgggttttgtttttttttggtctctctgactagctaaactgccaactagaagaatggttgttatgtagtaactcagaagaatcttttaataagtttcttctttggtttcaaaacaaacttgagcttcatttcttgccacctctattctttcttcccacgttgggtgactgaactgatgcttattctagttttagaagaggatccacatttaatgtaaggcataaatatgccttttgcaaattattgcttgttctccagtgaacatttgatcatattcaacagaaatccaccatataaaccataatccttgaattgccccttttaaaatagattggttaaaaccaaaaacctataagagagaaatgatatttcattgtattgtaggtttgggaatcctggttagatttataatttctggccgggtgcggtggctcatgcctgtattcccagtactttgggagcccaaggtgggtggatcacctgaggtaaggagtttgagaccagcctggccaacatggtgaaaccccatctctactaaaaatacaaaaagttagctgggcatggtggtgcgcgcctgtggtcccagctactcgggaggctgaggtgggagaatcccttgaacccaggaggcagaagttgcagtgagctgagatcatgccattgcactccagcctgggcaacagagcgagacttcatctccaaaaaaagaaaaagaagaaaaagatttataatttctgagtcccctaagtccctttctcagtttgcaataatcttacgtccatgctattgacactaattttgaaactggaaagctaattaatgacatattcatgtgttctttcatctaataaacatttattaatgtatagttctacaccaggcattctgaagggtccaaaagaaagttcctgccctctagtagcacataatccgttatttctcagcacaccatgccatctgtttatcattcagcagttaagtaattcatcacttcatatttttaccaaagtatatttacaagtctgtttatctggatctggcaaactggaaaatgtttgaagggatactcaggctttgatccatgccaacatgaaaggactccaagcacatttaagtaggctggtcttttcatcatgcatgattttttttttagtgcaaatttagactttagtttgggaaagagaacagtatacagtatcctttgtaagataaatcacaacaacaaaaattaagttttattgcacaaagtagataaatgagaaagtctttcttaaaaaatgcttctttaactgtaacagcaaaactaaatgcatattttatcaaccccttatttctaattgctgtattcatttccacccttaaactatttaagcatttcatctgctgaaagtccttatatacatggtagacggaatatttctccattaatgatagatcaaaatgaagatatttaaaaattaacaaaatcaggccaaggcaggaggatcactttagcccaggaggtccagaccagcctgggcaacacagcgggaccccgactccatttaaaaaattaaaaaaaaaaaaaaaacttttaacatttaaaaaataaaaattaacaaaatttcacttattccaggacacgctggcatttggactcaatgaaaagggcacctaaagaaaataaggctgactgaatgttttccataattttcacacaataacagtccctttctatccagcttgccttccatttatctctagggttagcttttcaggcaacatccttggtcattgcccagaaagtacctgagctatcagtgattggaatggcacaggaaaccgaatcacatgggtgccctccccttggttttcaagtatcttggagttgtgcacaaaaattaggtcatgccttcagtgtcttgttctttaaacctaccctttgacaatcaggtgctaatgattgtatactattaaaaccagcacataagtattgtaaatgtgtgttcctcctaggttggaagaaatgtctttccttctatctgggtcctgttaaagcgggtgtcagttgtgtcttttcacctcgatttgtgaattaatagaattggggggagaggaaatgatgatgtcaattaagtttcaggtttggcatgatcatcattctcgatgatattctcactttgtcgcaaatctgcccttatcgtaagaacaagtttcagaattttccctccactatacgactccagtattatgtttacaatccattggatgagtgcagcattataagaccttggtgcccagaaaaatctgtcctttttggtaccaaacctgaggtcttttggaagataatgtagaaaaccactacctattgaaggcctgttttggctaatctgtgcaaactctgatgatacctgcttatgtggattcttttccacactgctttcatttttaagtataaagacttagaaaactagaataatgcttttacaaataattaaaagtatgtgatgttctgggttttttccttctttttagaaccctgtatttaaacaagccttctttttaagtcttgtttgaaatttaagtctcagatcttctggataccaaatcaaaaacccaacgcgtaaaacagggcagtatttgtgttcctaattttaaaaagctttatgtatactctataaatatagatgcataaacaacacttccccttgagtagcacatcaacatacagcattgtacattacaatgaaaatgtgtaacttaagggtattatatatataaatacatatatacctttgtaacctttatactgtaaataaaaaagttgctttagtcacgtgggttgttt

SEQ ID NO: 312400 - DNA, 4122 bp, Homo sapiens
acccagccttctatacaaccgtggagccagggcaagggagagacagaaggagcaagtgacccagggagacaaacacttggagatacttggggctgagtttgagcaagactccctaacctgtgtctggacaagtctgatgtcctgtgtggcccaagaagaactgaccccgtgtctggagctcccaccgttattgcatccctgctgtggctcacctgctgctgtctccaggagcccctgagaagatttgcctcctctcccctgctaagctccaggtcctgagattgaattaggggctggagctcactgcactccagcagtcatgggacccaggatagggccagcgggtgaggtaccccaggtaccagacaaggaaaccaaagccacaatgggcacagaaaacacacctggaggcaaagccagcccagaccctcaggacgtgcggccaagtgtgttccataacatcaagctgttcgttctgtgccacagcctgctgcagctggcgcagctcatgatctccggctacctaaagagctccatctccacagtggagaagcgcttcggcctctccagccagacgtcggggctgctggcctccttcaacgaggtggggaacacagccttgattgtgtttgtgagctattttggcagccgggtgcaccgaccccgaatgattggctatggggctatccttgtggccctggcgggcctgctcatgactctcccgcacttcatctcggagccataccgctacgacaacaccagccctgaggatatgccacaggacttcaaggcttccctgtgcctgcccacaacctcggccccagcctcggccccctccaatggcaactgctcaagctacacagaaacccagcatctgagtgtggtggggatcatgttcgtggcacagaccctgctgggcgtgggcggggtgcccattcagccctttggcatctcctacatcgatgactttgcccacaacagcaactcgcccctctacctcgggatcctgtttgcagtgaccatgatggggccaggcctggcctttgggctgggcagcctcatgctgcgcctttatgtggacattaaccagatgccagaaggtggtatcagcctgaccataaaggacccccgatgggtgggtgcctggtggctgggtttcctcatcgctgccggtgcagtggccctggctgccatcccctacttcttcttccccaaggaaatgcccaaggaaaaacgtgagcttcagtttcggcgaaaggtcttagcagtcacagactcacctgccaggaagggcaaggactctccctctaagcagagccctggggagtccacgaagaagcaggatggcctagtccagattgcaccaaacctgactgtgatccagttcattaaagtcttccccagggtgctgctgcagaccctacgccaccccatcttcctgctggtggtcctgtcccaggtatgcttgtcatccatggctgcgggcatggccaccttcctgcccaagttcctggagcgccagttttccatcacagcctcctacgccaacctgctcatcggctgcctctccttcccttcggtcatcgtgggcatcgtggtgggtggcgtcctggtcaagcggctccacctgggccctgtgggatgcggtgccctttgcctgctggggatgctgctgtgcctcttcttcagcctgccgctcttctttatcggctgctccagccaccagattgcgggcatcacacaccagaccagtgcccaccctgggctggagctgtctccaagctgcatggaggcctgctcctgcccattggacggctttaaccctgtctgcgaccccagcactcgtgtggaatacatcacaccctgccacgcaggctgctcaagctgggtggtccaggatgctctggacaacagccaggttttctacaccaactgcagctgcgtggtggagggcaaccccgtgctggcaggatcctgcgactcaacgtgcagccatctggtggtgcccttcctgctcctggtcagcctgggctcggccctggcctgtctcacccacacaccctccttcatgctcatcctaagaggagtgaagaaagaagacaagactttggctgtgggcatccagttcatgttcctgaggattttggcctggatgcccagccccgtgatccacggcagcgccatcgacaccacctgtgtgcactgggccctgagctgtgggcgtcgagctgtctgtcgctactacaataatgacctgctccgaaaccggttcatcggcctccagttcttcttcaaaacaggttctgtgatctgcttcgccttagttttggctgtcctgaggcagcaggacaaagaggcaaggaccaaagagagcagatccagccctgccgtagagcagcaattgctagtgtcggggccagggaagaagccagaggattcccgagtgtgagctgtcttggggccccacctggccaagagtagcagccacagcagtacctcctctgagtcctttgcccaagattgggtgtcaagagccctgtgttccattctggctcctccactaaattgctgtgtgacttcaggcaagacattgatcctctctcagcctttgcttgctagtctgaaccaaagagttgtttgggcatttgctgtgttggccatttctggagcaagagggtcttcttcctccttcccccagccagccagctgtcctggggccaggctttcctgggtggaaagaagtatacctttccctggggccctaggatagcaaagtgagccatagtgggccaggctgccctccatgctgggccccagcccaggtctgcactcgcctggatcaccttctttgagccttagccatctcctgtcaggtaggaatgaacttgccagccttcaggctcgttcagctatgaccatctgtgcggtcagggtacactcagctctcctccccaactccagcagcctttaagaagtgtccctttggcgccccctggaggcagagcactgagctggaccctgggtagactcccacagggaggacggagctggcctcaggagtgggacacccagacttggcagggccttcaagaggcctgtgtgggggccccaggaatccttagctgaagcggggagactcactctccatctcaggaaattctagcccttgccctcagggagccacggttgagggtgaggcccaacacctgccttagggccctgggtgggcaagtctgggccctggggtagggagggagactcaggcccacacttgggtattttctaatttcagacaaacacacactcagcgcgcactcactgattcctacacattgccaagatttcacacatgtgaccaggggccaccaaagtccctgtgacctttgtgactaggatcctaatttctctattttctcctgggtgcctgggtctgtgtcacctggggcagtgtggataatgtttagttctgtgacactgttttttgggggtggcacctggttctccgatgcctgggctggtgtcaggcccaggactgtagtgctgggagcagtaaagctcagctctgtgtaatgagtgatgctatggcttgctcgtgtcttatgatccaatccttttctacatcagcccttgttttgttttatggctagtcttatctggcctggttatttccttgcggggaggagagggtttgctaatctgctcccagcccaacctattaccaccccacctcgctgggacctactgctcgggaggcagcagacagggagccaccagcagtggcttcctggccctgtgctgggggtggggggaagctgggggcacatgtggcccttgccttctgagcagctcccagtgccagggctttgagactttcccacatgataaaagaaaagggaggtacagaagttccaattccctttttattttgctggttggtatctgtaaatgtttaataaatatctgagcatgtatctatcaacgccaagaatttcaaagtctccttcaacaatatgaggcttttaggatgtttatattccttcatccctcttgtttcccaggttttgcagggaaaaaaagtctggaattatagatacagcttattattaaatttgttcttgcata

SEQ ID NO: 312401 - DNA, 3378 bp, Homo sapiens
acccagccttctatacaaccgtggagccagggcaagggagagacagaaggagcaagtgacccagggagacaaacacttggagatacttggggctgagtttgagcaagactccctaacctgtgtctggacaagtctgatgtcctgtgtggcccaagaagaactgaccccgtgtctggagctcccaccgttattgcatccctgctgtggctcacctgctgctgtctccaggagcccctgagaagatttgcctcctctcccctgctaagctccaggtcctgagattgaattaggggctggagctcactgcactccagcagtcatgggacccaggataggtggggaacacagccttgattgtgtttgtgagctattttggcagccgggtgcaccgaccccgaatgattggctatggggctatccttgtggccctggcgggcctgctcatgactctcccgcacttcatctcggagccataccgctacgacaacaccagccctggtggtatcagcctgaccataaaggacccccgatgggtgggtgcctggtggctgggtttcctcatcgctgccggtgcagtggccctggctgccatcccctacttcttcttccccaaggaaatgcccaaggaaaaacgtgagcttcagtttcggcgaaaggtcttagcagtcacagactcacctgccaggaagggcaaggactctccctctaagcagagccctggggagtccacgaagaagcaggatggcctagtccagattgcaccaaacctgactgtgatccagttcattaaagtcttccccagggtgctgctgcagaccctacgccaccccatcttcctgctggtggtcctgtcccaggtatgcttgtcatccatggctgcgggcatggccaccttcctgcccaagttcctggagcgccagttttccatcacagcctcctacgccaacctgctcatcggctgcctctccttcccttcggtcatcgtgggcatcgtggtgggtggcgtcctggtcaagcggctccacctgggccctgtgggatgcggtgccctttgcctgctggggatgctgctgtgcctcttcttcagcctgccgctcttctttatcggctgctccagccaccagattgcgggcatcacacaccagaccagtgcccaccctgggctggagctgtctccaagctgcatggaggcctgctcctgcccattggacggctttaaccctgtctgcgaccccagcactcgtgtggaatacatcacaccctgccacgcaggctgctcaagctgggtggtccaggatgctctggacaacagccaggttttctacaccaactgcagctgcgtggtggagggcaaccccgtgctggcaggatcctgcgactcaacgtgcagccatctggtggtgcccttcctgctcctggtcagcctgggctcggccctggcctgtctcacccacacaccctccttcatgctcatcctaagaggagtgaagaaagaagacaagactttggctgtgggcatccagttcatgttcctgaggattttggcctggatgcccagccccgtgatccacggcagcgccatcgacaccacctgtgtgcactgggccctgagctgtgggcgtcgagctgtctgtcgctactacaataatgacctgctccgaaaccggttcatcggcctccagttcttcttcaaaacaggttctgtgatctgcttcgccttagttttggctgtcctgaggcagcaggacaaagaggcaaggaccaaagagagcagatccagccctgccgtagagcagcaattgctagtgtcggggccagggaagaagccagaggattcccgagtgtgagctgtcttggggccccacctggccaagagtagcagccacagcagtacctcctctgagtcctttgcccaagattgggtgtcaagagccctgtgttccattctggctcctccactaaattgctgtgtgacttcaggcaagacattgatcctctctcagcctttgcttgctagtctgaaccaaagagttgtttgggcatttgctgtgttggccatttctggagcaagagggtcttcttcctccttcccccagccagccagctgtcctggggccaggctttcctgggtggaaagaagtatacctttccctggggccctaggatagcaaagtgagccatagtgggccaggctgccctccatgctgggccccagcccaggtctgcactcgcctggatcaccttctttgagccttagccatctcctgtcaggtaggaatgaacttgccagccttcaggctcgttcagctatgaccatctgtgcggtcagggtacactcagctctcctccccaactccagcagcctttaagaagtgtccctttggcgccccctggaggcagagcactgagctggaccctgggtagactcccacagggaggacggagctggcctcaggagtgggacacccagacttggcagggccttcaagaggcctgtgtgggggccccaggaatccttagctgaagcggggagactcactctccatctcaggaaattctagcccttgccctcagggagccacggttgagggtgaggcccaacacctgccttagggccctgggtgggcaagtctgggccctggggtagggagggagactcaggcccacacttgggtattttctaatttcagacaaacacacactcagcgcgcactcactgattcctacacattgccaagatttcacacatgtgaccaggggccaccaaagtccctgtgacctttgtgactaggatcctaatttctctattttctcctgggtgcctgggtctgtgtcacctggggcagtgtggataatgtttagttctgtgacactgttttttgggggtggcacctggttctccgatgcctgggctggtgtcaggcccaggactgtagtgctgggagcagtaaagctcagctctgtgtaatgagtgatgctatggcttgctcgtgtcttatgatccaatccttttctacatcagcccttgttttgttttatggctagtcttatctggcctggttatttccttgcggggaggagagggtttgctaatctgctcccagcccaacctattaccaccccacctcgctgggacctactgctcgggaggcagcagacagggagccaccagcagtggcttcctggccctgtgctgggggtggggggaagctgggggcacatgtggcccttgccttctgagcagctcccagtgccagggctttgagactttcccacatgataaaagaaaagggaggtacagaagttccaattccctttttattttgctggttggtatctgtaaatgtttaataaatatctgagcatgtatctatcaac

SEQ ID NO: 312402 - DNA, 675 bp, Homo sapiens
  misc_feature (21)..(21): n is a, c, g, or t
  misc_feature (31)..(31): n is a, c, g, or t
agcccacaaggcccccacacnggtaggcacncaggcggctaataaatatgtttttattggtctttgcagtctcacgtcacaaaatagcagaatgaacacaaggcagatagagctggttggggagcacagacatgtggtggcctgaaagcagcttttccccttaagtctctagaacctgccatgagtaattaagacagtctttgaggatggggctgtcaggtgggggcgtttcagcaggtgccgacgagcgccttacaaacgactggctgctcgtgccgaattcggcacgagcctattaccaccccacctcgctgggacctactgctcgggaggcagcagacagggagccaccagcagtggcttcctggccctgtgctgggggtggggggaagctgggggcacatgtggcccttgccttctgagcagctcccagtgccagggctttgagactttcccacatgataaaagaaaagggaggtacagaagttccaattccctttttattttgctggttggtatctgtaaatgtttaataaatatctgagcatgtatctatcaacaatatgaggcttttaggatgtttatattccttcatccctcttgtttcccaggttttgcagggaaaaaaagtctggaattatagatacagcttattattaaatttgttcttgcata

SEQ ID NO: 312403 - DNA, 4416 bp, Homo sapiens
acccagccttctatacaaccgtggagccagggcaagggagagacagaaggagcaagtgacccagggagacaaacacttggagatacttggggctgagtttgagcaagactccctaacctgtgtctggacaagtctgatgtcctgtgtggcccaagaagaactgaccccgtgtctggagctcccaccgttattgcatccctgctgtggctcacctgctgctgtctccaggagcccctgagaagatttgcctcctctcccctgctaagctccaggtcctgagattgaattaggggctggagctcactgcactccagcagtcatgggacccaggatagggccagcgggtgaggtaccccaggtaccagacaaggaaaccaaagccacaatgggcacagaaaacacacctggaggcaaagccagcccagaccctcaggacgtgcggccaagtgtgttccataacatcaagctgttcgttctgtgccacagcctgctgcagctggcgcagctcatgatctccggctacctaaagagctccatctccacagtggagaagcgcttcggcctctccagccagacgtcggggctgctggcctccttcaacgaggtggggaacacagccttgattgtgtttgtgagctattttggcagccgggtgcaccgaccccgaatgattggctatggggctatccttgtggccctggcgggcctgctcatgactctcccgcacttcatctcggagccataccgctacgacaacaccagccctgaggatatgccacaggacttcaaggcttccctgtgcctgcccacaacctcggccccagcctcggccccctccaatggcaactgctcaagctacacagaaacccagcatctgagtgtggtggggatcatgttcgtggcacagaccctgctgggcgtgggcggggtgcccattcagccctttggcatctcctacatcgatgactttgcccacaacagcaactcgcccctctacctcgggatcctgtttgcagtgaccatgatggggccaggcctggcctttgggctgggcagcctcatgctgcgcctttatgtggacattaaccagatgccagaaggtggtatcagcctgaccataaaggacccccgatgggtgggtgcctggtggctgggtttcctcatcgctgccggtgcagtggccctggctgccatcccctacttcttcttccccaaggaaatgcccaaggaaaaacgtgagcttcagtttcggcgaaaggtcttagcagtcacagactcacctgccaggaagggcaaggactctccctctaagcagagccctggggagtccacgaagaagcaggatggcctagtccagattgcaccaaacctgactgtgatccagttcattaaagtcttccccagggtgctgctgcagaccctacgccaccccatcttcctgctggtggtcctgtcccaggtatgcttgtcatccatggctgcgggcatggccaccttcctgcccaagttcctggagcgccagttttccatcacagcctcctacgccaacctgctcatcggctgcctctccttcccttcggtcatcgtgggcatcgtggtgggtggcgtcctggtcaagcggctccacctgggccctgtgggatgcggtgccctttgcctgctggggatgctgctgtgcctcttcttcagcctgccgctcttctttatcggctgctccagccaccagattgcgggcatcacacaccagaccagtgcccaccctgggctggagctgtctccaagctgcatggaggcctgctcctgcccattggacggctttaaccctgtctgcgaccccagcactcgtgtggaatacatcacaccctgccacgcaggctgctcaagctgggtggtccaggatgctctggacaacagccaggttttctacaccaactgcagctgcgtggtggagggcaaccccgtgctggcaggatcctgcgactcaacgtgcagccatctggtggtgcccttcctgctcctggtcagcctgggctcggccctggcctgtctcacccacacaccctccttcatgctcatcctaagaggagtgaagaaagaagacaagactttggctgtgggcatccagttcatgttcctgaggattttggcctggatgcccagccccgtgatccacggcagcgccatcgacaccacctgtgtgcactgggccctgagctgtgggcgtcgagctgtctgtcgctactacaataatgacctgctccgaaaccggttcatcggcctccagttcttcttcaaaacaggttctgtgatctgcttcgccttagttttggctgtcctgaggcagcaggacaaagaggcaaggaccaaagagagcagatccagccctgccgtagagcagcaattgctagtgtcggggccagggaagaagccagaggattcccgagtgtgagctgtcttggggccccacctggccaagagtagcagccacagcagtacctcctctgagtcctttgcccaagattgggtgtcaagagccctgtgttccattctggctcctccactaaattgctgtgtgacttcaggcaagacattgatcctctctcagcctttgcttgctagtctgaaccaaagagttgtttgggcatttgctgtgttggccatttctggagcaagagggtcttcttcctccttcccccagccagccagctgtcctggggccaggctttcctgggtggaaagaagtatacctttccctggggccctaggatagcaaagtgagccatagtgggccaggctgccctccatgctgggccccagcccaggtctgcactcgcctggatcaccttctttgagccttagccatctcctgtcaggtaggaatgaacttgccagccttcaggctcgttcagctatgaccatctgtgcggtcagggtacactcagctctcctccccaactccagcagcctttaagaagtgtccctttggcgccccctggaggcagagcactgagctggaccctgggtagactcccacagggaggacggagctggcctcaggagtgggacacccagacttggcagggccttcaagaggcctgtgtgggggccccaggaatccttagctgaagcggggagactcactctccatctcaggaaattctagcccttgccctcagggagccacggttgagggtgaggcccaacacctgccttagggccctgggtgggcaagtctgggccctggggtagggagggagactcaggcccacacttgggtattttctaatttcagacaaacacacactcagcgcgcactcactgattcctacacattgccaagatttcacacatgtgaccaggggccaccaaagtccctgtgacctttgtgactaggatcctaatttctctattttctcctgggtgcctgggtctgtgtcacctggggcagtgtggataatgtttagttctgtgacactgttttttgggggtggcacctggttctccgatgcctgggctggtgtcaggcccaggactgtagtgctgggagcagtaaagctcagctctgtgtaatgagtgatgctatggcttgctcgtgtcttatgatccaatccttttctacatcagcccttgttttgttttatggctagtcttatctggcctggttatttccttgcggggaggagagggtttgctaatctgctcccagcccaacctattaccaccccacctcgctgggacctactgctcgggaggcagcagacagggagccaccagcagtggcttcctggccctgtgctgggggtggggggaagctgggggcacatgtggcccttgccttctgagcagctcccagtgccagggctttgagactttcccacatgataaaagaaaagggaggtacagaagttccaattccctttttattttgctggttggtatctgtaaatgtttaataaatatctgagcatgtatctatcaacgccaagaatttcaaagtctccttcaacaatatgaggcttttaggatgtttatattccttcatccctcttgtttcccaggttttgcagggaaaaaaagtctggaattatagatacagcttattattaaatttgttcttgcataatgtctcttctattacaaaaattctttcttcataaactgcattagaggtttgcaacaaccacatcatttccattaacttagatttaggttttactggattcattgctcaccattattgcttgtatattacatcttttccaatctttaaaaaagtctaatttttgtttgagtgtcttcgtctactaatggtttcaaaaatggaataaggtcatgaggatttctgaatcctcacctgtccaaattgtcattcacattttatagaagaggaaactggctcagaaagcacaagtgact

SEQ ID NO: 312404 - DNA, 4322 bp, Homo sapiens
cagacacctgagttattagtgacagacatggaggcagaagagttaaactctgctagatttcagctgtgctcaggccataatagtttttatgttctgacccatccctgctgtggctcacctgctgctgtctccaggagcccctgagaagatttgcctcctctcccctgctaagctccaggtcctgagattgaattaggggctggagctcactgcactccagcagtcatgggacccaggatagggccagcgggtgaggtaccccaggtaccagacaaggaaaccaaagccacaatgggcacagaaaacacacctggaggcaaagccagcccagaccctcaggacgtgcggccaagtgtgttccataacatcaagctgttcgttctgtgccacagcctgctgcagctggcgcagctcatgatctccggctacctaaagagctccatctccacagtggagaagcgcttcggcctctccagccagacgtcggggctgctggcctccttcaacgaggtggggaacacagccttgattgtgtttgtgagctattttggcagccgggtgcaccgaccccgaatgattggctatggggctatccttgtggccctggcgggcctgctcatgactctcccgcacttcatctcggagccataccgctacgacaacaccagccctgaggatatgccacaggacttcaaggcttccctgtgcctgcccacaacctcggccccagcctcggccccctccaatggcaactgctcaagctacacagaaacccagcatctgagtgtggtggggatcatgttcgtggcacagaccctgctgggcgtgggcggggtgcccattcagccctttggcatctcctacatcgatgactttgcccacaacagcaactcgcccctctacctcgggatcctgtttgcagtgaccatgatggggccaggcctggcctttgggctgggcagcctcatgctgcgcctttatgtggacattaaccagatgccagaaggtggtatcagcctgaccataaaggacccccgatgggtgggtgcctggtggctgggtttcctcatcgctgccggtgcagtggccctggctgccatcccctacttcttcttccccaaggaaatgcccaaggaaaaacgtgagcttcagtttcggcgaaaggtcttagcagtcacagactcacctgccaggaagggcaaggactctccctctaagcagagccctggggagtccacgaagaagcaggatggcctagtccagattgcaccaaacctgactgtgatccagttcattaaagtcttccccagggtgctgctgcagaccctacgccaccccatcttcctgctggtggtcctgtcccaggtatgcttgtcatccatggctgcgggcatggccaccttcctgcccaagttcctggagcgccagttttccatcacagcctcctacgccaacctgctcatcggctgcctctccttcccttcggtcatcgtgggcatcgtggtgggtggcgtcctggtcaagcggctccacctgggccctgtgggatgcggtgccctttgcctgctggggatgctgctgtgcctcttcttcagcctgccgctcttctttatcggctgctccagccaccagattgcgggcatcacacaccagaccagtgcccaccctgggctggagctgtctccaagctgcatggaggcctgctcctgcccattggacggctttaaccctgtctgcgaccccagcactcgtgtggaatacatcacaccctgccacgcaggctgctcaagctgggtggtccaggatgctctggacaacagccaggttttctacaccaactgcagctgcgtggtggagggcaaccccgtgctggcaggatcctgcgactcaacgtgcagccatctggtggtgcccttcctgctcctggtcagcctgggctcggccctggcctgtctcacccacacaccctccttcatgctcatcctaagaggagtgaagaaagaagacaagactttggctgtgggcatccagttcatgttcctgaggattttggcctggatgcccagccccgtgatccacggcagcgccatcgacaccacctgtgtgcactgggccctgagctgtgggcgtcgagctgtctgtcgctactacaataatgacctgctccgaaaccggttcatcggcctccagttcttcttcaaaacaggttctgtgatctgcttcgccttagttttggctgtcctgaggcagcaggacaaagaggcaaggaccaaagagagcagatccagccctgccgtagagcagcaattgctagtgtcggggccagggaagaagccagaggattcccgagtgtgagctgtcttggggccccacctggccaagagtagcagccacagcagtacctcctctgagtcctttgcccaagattgggtgtcaagagccctgtgttccattctggctcctccactaaattgctgtgtgacttcaggcaagacattgatcctctctcagcctttgcttgctagtctgaaccaaagagttgtttgggcatttgctgtgttggccatttctggagcaagagggtcttcttcctccttcccccagccagccagctgtcctggggccaggctttcctgggtggaaagaagtatacctttccctggggccctaggatagcaaagtgagccatagtgggccaggctgccctccatgctgggccccagcccaggtctgcactcgcctggatcaccttctttgagccttagccatctcctgtcaggtaggaatgaacttgccagccttcaggctcgttcagctatgaccatctgtgcggtcagggtacactcagctctcctccccaactccagcagcctttaagaagtgtccctttggcgccccctggaggcagagcactgagctggaccctgggtagactcccacagggaggacggagctggcctcaggagtgggacacccagacttggcagggccttcaagaggcctgtgtgggggccccaggaatccttagctgaagcggggagactcactctccatctcaggaaattctagcccttgccctcagggagccacggttgagggtgaggcccaacacctgccttagggccctgggtgggcaagtctgggccctggggtagggagggagactcaggcccacacttgggtattttctaatttcagacaaacacacactcagcgcgcactcactgattcctacacattgccaagatttcacacatgtgaccaggggccaccaaagtccctgtgacctttgtgactaggatcctaatttctctattttctcctgggtgcctgggtctgtgtcacctggggcagtgtggataatgtttagttctgtgacactgttttttgggggtggcacctggttctccgatgcctgggctggtgtcaggcccaggactgtagtgctgggagcagtaaagctcagctctgtgtaatgagtgatgctatggcttgctcgtgtcttatgatccaatccttttctacatcagcccttgttttgttttatggctagtcttatctggcctggttatttccttgcggggaggagagggtttgctaatctgctcccagcccaacctattaccaccccacctcgctgggacctactgctcgggaggcagcagacagggagccaccagcagtggcttcctggccctgtgctgggggtggggggaagctgggggcacatgtggcccttgccttctgagcagctcccagtgccagggctttgagactttcccacatgataaaagaaaagggaggtacagaagttccaattccctttttattttgctggttggtatctgtaaatgtttaataaatatctgagcatgtatctatcaacgccaagaatttcaaagtctccttcaacaatatgaggcttttaggatgtttatattccttcatccctcttgtttcccaggttttgcagggaaaaaaagtctggaattatagatacagcttattattaaatttgttcttgcataatgtctcttctattacaaaaattctttcttcataaactgcattagaggtttgcaacaaccacatcatttccattaacttagatttaggttttactggattcattgctcaccattattgcttgtatattacatcttttccaatctttaaaaaagtctaatttttgtttgagtgtcttcgtctactaatggtttcaaaaatggaataaggtcatgaggatttctgaatcctcacctgtccaaattgtcattcacattttatagaagaggaaactggctcagaaagcacaagtgact

SEQ ID NO: 312405 - DNA, 4104 bp, Homo sapiens
acccagccttctatacaaccgtggagccagggcaagggagagacagaaggagcaagtgacccagggagacaaacacttggagatacttggggctgagtttgagcaagactccctaacctgtgtctggacaagtctgatgtcctgtgtggcccaagaagaactgaccccgtgtctggagctcccaccgttattgcatccctgctgtggctcacctgctgctgtctccaggagcccctgagaagatttgcctcctctcccctgctaagctccaggtcctgagattgaattaggggctggagctcactgcactccagcagtcatgggacccaggatagggccagcgggtgaggtaccccaggtaccagacaaggaaaccaaagccacaatgggcacagaaaacacacctggaggcaaagccagcccagaccctcaggacgtgcggccaagtgtgttccataacatcaagctgttcgttctgtgccacagcctgctgcagctggcgcagctcatgatctccggctacctaaagagctccatctccacagtggagaagcgcttcggcctctccagccagacgtcggggctgctggcctccttcaacgaggtggggaacacagccttgattgtgtttgtgagctattttggcagccgggtgcaccgaccccgaatgattggctatggggctatccttgtggccctggcgggcctgctcatgactctcccgcacttcatctcggagccataccgctacgacaacaccagccctgaggatatgccacaggacttcaaggcttccctgtgcctgcccacaacctcggccccagcctcggccccctccaatggcaactgctcaagctacacagaaacccagcatctgagtgtggtggggatcatgttcgtggcacagaccctgctgggcgtgggcggggtgcccattcagccctttggcatctcctacatcgatgactttgcccacaacagcaactcgcccctctacctcgggatcctgtttgcagtgaccatgatggggccaggcctggcctttgggctgggcagcctcatgctgcgcctttatgtggacattaaccagatgccagaaggtggtatcagcctgaccataaaggacccccgatgggtgggtgcctggtggctgggtttcctcatcgctgccggtgcagtggccctggctgccatcccctacttcttcttccccaaggaaatgcccaaggaaaaacgtgagcttcagtttcggcgaaaggtcttagcagtcacagactcacctgccaggaagggcaaggactctccctctaagcagagccctggggagtccacgaagaagcaggatggcctagtccagattgcaccaaacctgactgtgatccagttcattaaagtcttccccagggtgctgctgcagaccctacgccaccccatcttcctgctggtggtcctgtcccaggtatgcttgtcatccatggctgcgggcatggccaccttcctgcccaagttcctggagcgccagttttccatcacagcctcctacgccaacctgctcatcggctgcctctccttcccttcggtcatcgtgggcatcgtggtgggtggcgtcctggtcaagcggctccacctgggccctgtgggatgcggtgccctttgcctgctggggatgctgctgtgcctcttcttcagcctgccgctcttctttatcggctgctccagccaccagattgcgggcatcacacaccagaccagtgcccaccctgggctggagctgtctccaagctgcatggaggcctgctcctgcccattggacggctttaaccctgtctgcgaccccagcactcgtgtggaatacatcacaccctgccacgcaggctgctcaagctgggtggtccaggatgctctggacaacagccaggttttctacaccaactgcagctgcgtggtggagggcaaccccgtgctggcaggatcctgcgactcaacgtgcagccatctggtggtgcccttcctgctcctggtcagcctgggctcggccctggcctgtctcacccacacaccctccttcatgctcatcctaagaggagtgaagaaagaagacaagactttggctgtgggcatccagttcatgttcctgaggattttggcctggatgcccagccccgtgatccacggcagcgccatcgacaccacctgtgtgcactgggccctgagctgtgggcgtcgagctgtctgtcgctactacaataatgacctgctccgaaaccggttcatcggcctccagttcttcttcaaaacaggttctgtgatctgcttcgccttagttttggctgtcctgaggcagcaggacaaagaggcaaggaccaaagagagcagatccagccctgccgtagagcagcaattgctagtgtcggggccagggaagaagccagaggattcccgagtgtgagctgtcttggggccccacctggccaagagtagcagccacagcagtacctcctctgagtcctttgcccaagattgggtgtcaagagccctgtgttccattctggctcctccactaaattgctgtgtgacttcaggcaagacattgatcctctctcagcctttgcttgctagtctgaaccaaagagttgtttgggcatttgctgtgttggccatttctggagcaagagggtcttcttcctccttcccccagccagccagctgtcctggggccaggctttcctgggtggaaagaagtatacctttccctggggccctaggatagcaaagtgagccatagtgggccaggctgccctccatgctgggccccagcccaggtctgcactcgcctggatcaccttctttgagccttagccatctcctgtcaggtaggaatgaacttgccagccttcaggctcgttcagctatgaccatctgtgcggtcagggtacactcagctctcctccccaactccagcagcctttaagaagtgtccctttggcgccccctggaggcagagcactgagctggaccctgggtagactcccacagggaggacggagctggcctcaggagtgggacacccagacttggcagggccttcaagaggcctgtgtgggggccccaggaatccttagctgaagcggggagactcactctccatctcaggaaattctagcccttgccctcagggagccacggttgagggtgaggcccaacacctgccttagggccctgggtgggcaagtctgggccctggggtagggagggagactcaggcccacacttgggtattttctaatttcagacaaacacacactcagcgcgcactcactgattcctacacattgccaagatttcacacatgtgaccaggggccaccaaagtccctgtgacctttgtgactaggatcctaatttctctattttctcctgggtgcctgggtctgtgtcacctggggcagtgtggataatgtttagttctgtgacactgttttttgggggtggcacctggttctccgatgcctgggctggtgtcaggcccaggactgtagtgctgggagcagtaaagctcagctctgtgtaatgagtgatgctatggcttgctcgtgtcttatgatccaatccttttctacatcagcccttgttttgttttatggctagtcttatctggcctggttatttccttgcggggaggagagggtttgctaatctgctcccagcccaacctattaccaccccacctcgctgggacctactgctcgggaggcagcagacagggagccaccagcagtggcttcctggccctgtgctggggcacatgtggcccttgccttctgagcagctcccagtgccagggctttgagactttcccacatgataaaagaaaagggaggtacagaagttccaattccctttttattttgctggttggtatctgtaaatgtttaataaatatctgagcatgtatctatcaacgccaagaatttcaaagtctccttcaacaatatgaggcttttaggatgtttatattccttcatccctcttgtttcccaggttttgcagggaaaaaaagtctggaattatagatacagcttattattaaatttgttcttgcata

SEQ ID NO: 312406 - DNA, 1546 bp, Homo sapiens
tggggaggagagctgagtgtaccctgaccgcacagatggtcatagctgaacgagcctgaaggctggcaagttcattcctacctgacaggagatggctaaggctcaaagaaggtgatccaggcgagtgcagacctgggctggggcccagcatggagggcagcctggcccactatggctcactgtgctatcctgggacacccagacttggcagggccttcaagaggcctgtgtgggggccccaggaatccttagctgaagcggggagactcactctccatctcaggaaattctagcccttgccctcagggagccacggttgagggtgaggcccaacacctgccttagggccctgggtgggcaagtctgggccctggggtagggagggagactcaggcccacacttgggtattttctaatttcagacaaacacacactcagcgcgcactcactgattcctacacattgccaagatttcacacatgtgaccaggggccaccaaagtccctgtgacctttgtgactaggatcctaatttctctattttctcctgggtgcctgggtctgtgtcacctggggcagtgtggataatgtttagttctgtgacactgttttttgggggtggcacctggttctccgatgcctgggctggtgtcaggcccaggactgtagtgctgggagcagtaaagctcagctctgtgtaatgagtgatgctatggcttgctcgtgtcttatgatccaatccttttctacatcagcccttgttttgttttatggctagtcttatctggcctggttatttccttgcggggaggagagggtttgctaatctgctcccagcccaacctattaccaccccacctcgctgggacctactgctcgggaggcagcagacagggagccaccagcagtggcttcctggccctgtgctgggggtggggggaagctgggggcacatgtggcccttgccttctgagcagctcccagtgccagggctttgagactttcccacatgataaaagaaaagggaggtacagaagttccaattccctttttattttgctggttggtatctgtaaatgtttaataaatatctgagcatgtatctatcaacgccaagaatttcaaagtctccttcaacaatatgaggcttttaggatgtttatattccttcatccctcttgtttcccaggttttgcagggaaaaaaagtctggaattatagatacagcttattattaaatttgttcttgcataatgtctcttctattacaaaaattctttcttcataaactgcattagaggtttgcaacaaccacatcatttccattaacttagatttaggttttactggattcattgctcaccattattgcttgtatattacatcttttccaatctttaaaaaagtctaatttttgtttgagtgtcttcgtctactaatggtttcaaaaatggaataaggtcatgaggatttctgaatcctcacctgtccaaattgtcattcacattttatagaagaggaaactggctcagaaagcacaagtgact

SEQ ID NO: 312407 - DNA, 2584 bp, Homo sapiens
acccagccttctatacaaccgtggagccagggcaagggagagacagaaggagcaagtgacccagggagacaaacacttggagatacttggggctgagtttgagcaagactccctaacctgtgtctggacaagtctgatgtcctgtgtggcccaagaagaactgaccccgtgtctggagctcccaccgttattgcatccctgctgtggctcacctgctgctgtctccaggagcccctgagaagatttgcctcctctcccctgctaagctccaggtcctgagattgaattaggggctggagctcactgcactccagcagtcatgggacccaggatagggccagcgggtgaggtaccccaggtaccagacaaggaaaccaaagccacaatgggcacagaaaacacacctggaggcaaagccagcccagaccctcaggacgtgcggccaagtgtgttccataacatcaagctgttcgttctgtgccacagcctgctgcagctggcgcagctcatgatctccggctacctaaagagctccatctccacagtggagaagcgcttcggcctctccagccagacgtcggggctgctggcctccttcaacgaggtggggaacacagccttgattgtgtttgtgagctattttggcagccgggtgcaccgaccccgaatgattggctatggggctatccttgtggccctggcgggcctgctcatgactctcccgcacttcatctcggagccataccgctacgacaacaccagccctgaggatatgccacaggacttcaaggcttccctgtgcctgcccacaacctcggccccagcctcggccccctccaatggcaactgctcaagctacacagaaacccagcatctgagtgtggtggggatcatgttcgtggcacagaccctgctgggcgtgggcggggtgcccattcagccctttggcatctcctacatcgatgactttgcccacaacagcaactcgcccctctacctcgggatcctgtttgcagtgaccatgatggggccaggcctggcctttgggctgggcagcctcatgctgcgcctttatgtggacattaaccagatgccagaaggtggtatcagcctgaccataaaggacccccgatgggtgggtgcctggtggctgggtttcctcatcgctgccggtgcagtggccctggctgccatcccctacttcttcttccccaaggaaatgcccaaggaaaaacgtgagcttcagtttcggcgaaaggtcttagcagtcacagactcacctgccaggaagggcaaggactctccctctaagcagagccctggggagtccacgaagaagcaggatggcctagtccagattgcaccaaacctgactgtgatccagttcattaaagtcttccccagggtgctgctgcagaccctacgccaccccatcttcctgctggtggtcctgtcccaggtatgcttgtcatccatggctgcgggcatggccaccttcctgcccaagttcctggagcgccagttttccatcacagcctcctacgccaacctgctcatcggctgcctctccttcccttcggtcatcgtgggcatcgtggtgggtggcgtcctggtcaagcggctccacctgggccctgtgggatgcggtgccctttgcctgctggggatgctgctgtgcctcttcttcagcctgccgctcttctttatcggctgctccagccaccagattgcgggcatcacacaccagaccagtgcccaccctgggctggagctgtctccaagctgcatggaggcctgctcctgcccattggacggctttaaccctgtctgcgaccccagcactcgtgtggaatacatcacaccctgccacgcaggctgctcaagctgggtggtccaggatgctctggacaacagccaggttttctacaccaactgcagctgcgtggtggagggcaaccccgtgctggcaggatcctgcgactcaacgtgcagccatctggtggtgcccttcctgctcctggtcagcctgggctcggccctggcctgtctcacccacacaccctccttcatgctcatcctaagaggagtgaagaaagaagacaagactttggctgtgggcatccagttcatgttcctgaggattttggcctggatgcccagccccgtgatccacggcagcgccatcgacaccacctgtgtgcactgggccctgagctgtgggcgtcgagctgtctgtcgctactacaataatgacctgctccgaaaccggttcatcggcctccagttcttcttcaaaacaggttctgtgatctgcttcgccttagttttggctgtcctgaggcagcaggacaaagaggcaaggaccaaagagagcagatccagccctgccgtagagcagcaattgctagtgtcggggccagggaagaagccagaggattcccgagtgtgagctgtcttggggccccacctggccaagagtagcagccacagcagtacctcctctgagtcctttgcccaagattgggtgtcaagagccctgtgttccattctggctcctccactaaattgctgtgtgacttcaggc

SEQ ID NO: 312408 - DNA, 582 bp, Homo sapiens
ggagagaagggcataataagaacccttcaacgttgatgcatggcccttgggggctggaacccctccaacctcatgttgcccatgtctctgcttgttagaggagtgaagaaagaagacaagactttggctgtgggcatccagttcatgttcctgaggattttgggtaaagatcttgcttgggaccattggtggtggtgatggggtccagatgcccactgtgtgccaggcctggggcacaggcatgagcggaattcaatccctgatcttagggctcacaagctcatggggtgacagacctggcccagctctcctagagcggggtatagaggcagagtctagacagcccgtcaggaagccacctcggatgcaggggtggggcgggcttgagggccagacagccaagaggccccagtaacccagagcccctgaggggttgtacatgccagggagggggcagggtaggacggtgggccttcattgtcccctgagcaccacctccctcagcctggatgcccagccccgtgatccacggcagcgccatcgacaccacctgtgtgcactgggccctgagctgtgggcgtc

SEQ ID NO: 312409 - DNA, 1066 bp, Homo sapiens
acccagccttctatacaaccgtggagccagggcaagggagagacagaaggagcaagtgacccagggagacaaacacttggagatacttggggctgagtttgagcaagactccctaacctgtgtctggacaagtctgatgtcctgtgtggcccaagaagaactgaccccgtgtctggagctcccaccgttattgcatccctgctgtggctcacctgctgctgtctccaggagcccctgagaagatttgcctcctctcccctgctaagctccaggtcctgagattgaattaggggctggagctcactgcactccagcagtcatgggacccaggatagggccagcgggtgaggtaccccaggtaccagacaaggaaaccaaagccacaatgggcacagaaaacacacctggaggcaaagccagcccagaccctcaggacgtgcggccaagtgtgttccataacatcaagctgttcgttctgtgccacagcctgctgcagctggcgcagctcatgatctccggctacctaaagagctccatctccacagtggagaagcgcttcggcctctccagccagacgtcggggctgctggcctccttcaacgaggtggggaacacagccttgattgtgtttgtgagctattttggcagccgggtgcaccgaccccgaatgattggctatggggctatccttgtggccctggcgggcctgctcatgactctcccgcacttcatctcggagccataccgctacgacaacaccagccctgaggatatgccacaggacttcaaggcttccctgtgcctgcccacaacctcggccccagcctcggccccctccaatggcaactgctcaagctacacagaaacccagcatctgagtgtggtggggatcatgttcgtggcacagaccctgctgggcgtgggcggggtgcccattcagcaccttggacagcgcccaacccattacaggacgcggagccagcggaagccaagctctccacctcccttagcctctgggtgatggatttcctctcttctcaatttgattaaagcccagtagataacc

SEQ ID NO: 312410 - DNA, 2355 bp, Homo sapiens
  misc_feature (41)..(41): n is a, c, g, or t
ggataaagtactcccaggaaggctttgagccttggcagaanaggctgggattgaagcttcagggagagccagaggtgaggctggagtgggagatcacctgaggcagggccagcgggtgaggtaccccaggtaccagacaaggaaaccaaagccacaatgggcacagaaaacacacctggaggcaaagccagcccagaccctcaggacgtgcggccaagtgtgttccataacatcaagctgttcgttctgtgccacagcctgctgcagctggcgcagctcatgatctccggctacctaaagagctccatctccacagtggagaagcgcttcggcctctccagccagacgtcggggctgctggcctccttcaacgaggtggggaacacagccttgattgtgtttgtgagctattttggcagccgggtgcaccgaccccgaatgattggctatggggctatccttgtggccctggcgggcctgctcatgactctcccgcacttcatctcggagccataccgctacgacaacaccagccctgaggatatgccacaggacttcaaggcttccctgtgcctgcccacaacctcggccccagcctcggccccctccaatggcaactgctcaagctacacagaaacccagcatctgagtgtggtggggatcatgttcgtggcacagaccctgctgggcgtgggcggggtgcccattcagccctttggcatctcctacatcgatgactttgcccacaacagcaactcgcccctctacctcgggatcctgtttgcagtgaccatgatggggccaggcctggcctttgggctgggcagcctcatgctgcgcctttatgtggacattaaccagatgccagaaggtggtatcagcctgaccataaaggacccccgatgggtgggtgcctggtggctgggtttcctcatcgctgccggtgcagtggccctggctgccatcccctacttcttcttccccaaggaaatgcccaaggaaaaacgtgagcttcagtttcggcgaaaggtcttagcagtcacagactcacctgccaggaagggcaaggactctccctctaagcagagccctggggagtccacgaagaagcaggatggcctagtccagattgcaccaaacctgactgtgatccagttcattaaagtcttccccagggtgctgctgcagaccctacgccaccccatcttcctgctggtggtcctgtcccaggtatgcttgtcatccatggctgcgggcatggccaccttcctgcccaagttcctggagcgccagttttccatcacagcctcctacgccaacctgctcatcggctgcctctccttcccttcggtcatcgtgggcatcgtggtgggtggcgtcctggtcaagcggctccacctgggccctgtgggatgcggtgccctttgcctgctggggatgctgctgtgcctcttcttcagcctgccgctcttctttatcggctgctccagccaccagattgcgggcatcacacaccagaccagtgcccaccctgggctggagctgtctccaagctgcatggaggcctgctcctgcccattggacggctttaaccctgtctgcgaccccagcactcgtgtggaatacatcacaccctgccacgcaggctgctcaagctgggtggtccaggatgctctggacaacagccaggttttctacaccaactgcagctgcgtggtggagggcaaccccgtgctggcaggatcctgcgactcaacgtgcagccatctggtggtgcccttcctgctcctggtcagcctgggctcggccctggcctgtctcacccacacaccctccttcatgctcatcctaagaggagtgaagaaagaagacaagactttggctgtgggcatccagttcatgttcctgaggattttggcctggatgcccagccccgtgatccacggcagcgccatcgacaccacctgtgtgcactgggccctgagctgtgggcgtcgagctgtctgtcgctactacaataatgacctgctccgaaaccggttcatcggcctccagttcttcttcaaaacaggttctgtgatctgcttcgccttagttttggctgtcctgaggcagcaggacaaagaggcaaggaccaaagagagcagatccagccctgccgtagagcagcaattgctagtgtcggggccagggaagaagccagaggattcccgagtgtgagctgtcttggggccccacctggccaagagtagcagccacagcagtacctcctctgagtcctttgcccaagattgggtgtcaagagccctgtgttccattctggctcctccactaaattgctgtgtgacttcaggc

SEQ ID NO: 312411 - DNA, 4393 bp, Homo sapiens
acccagccttctatacaaccgtggagccagggcaagggagagacagaaggagcaagtgacccagggagacaaacacttggagatacttggggctgagtttgagcaagactccctaacctgtgtctggacaagtctgatgtcctgtgtggcccaagaagaactgaccccgtgtctggagctcccaccgttattgcatccctgctgtggctcacctgctgctgtctccaggagcccctgagaagatttgcctcctctcccctgctaagctccaggtcctgagattgaattaggggctggagctcactgcactccagcagtcatgggacccaggatagggccagcgggtgaggtaccccaggtaccagacaaggaaaccaaagccacaatgggcacagaaaacacacctggaggcaaagccagcccagaccctcaggacgtgcggccaagtgtgttccataacatcaagctgttcgttctgtgccacagcctgctgcagctggcgcagctcatgatctccggctacctaaagagctccatctccacagtggagaagcgcttcggcctctccagccagacgtcggggctgctggcctccttcaacgaggtggggaacacagccttgattgtgtttgtgagctattttggcagccgggtgcaccgaccccgaatgattggctatggggctatccttgtggccctggcgggcctgctcatgactctcccgcacttcatctcggagccataccgctacgacaacaccagccctgaggatatgccacaggacttcaaggcttccctgtgcctgcccacaacctcggccccagcctcggccccctccaatggcaactgctcaagctacacagaaacccagcatctgagtgtggtggggatcatgttcgtggcacagaccctgctgggcgtgggcggggtgcccattcagccctttggcatctcctacatcgatgactttgcccacaacagcaactcgcccctctacctcgggatcctgtttgcagtgaccatgatggggccaggcctggcctttgggctgggcagcctcatgctgcgcctttatgtggacattaaccagatgccagaaggtggtatcagcctgaccataaaggacccccgatgggtgggtgcctggtggctgggtttcctcatcgctgccggtgcagtggccctggctgccatcccctacttcttcttccccaaggaaatgcccaaggaaaaacgtgagcttcagtttcggcgaaaggtcttagcagtcacagactcacctgccaggaagggcaaggactctccctctaagcagagccctggggagtccacgaagaagcaggatggcctagtccagattgcaccaaacctgactgtgatccagttcattaaagtcttccccagggtgctgctgcagaccctacgccaccccatcttcctgctggtggtcctgtcccaggtatgcttgtcatccatggctgcgggcatggccaccttcctgcccaagttcctggagcgccagttttccatcacagcctcctacgccaacctgctcatcggctgcctctccttcccttcggtcatcgtgggcatcgtggtgggtggcgtcctggtcaagcggctccacctgggccctgtgggatgcggtgccctttgcctgctggggatgctgctgtgcctcttcttcagcctgccgctcttctttatcggctgctccagccaccagattgcgggcatcacacaccagaccagtgcccaccctgggctggagctgtctccaagctgcatggaggcctgctcctgcccattggacggctttaaccctgtctgcgaccccagcactcgtgtggaatacatcacaccctgccacgcaggctgctcaagctgggtggtccaggatgctctggacaacagccaggttttctacaccaactgcagctgcgtggtggagggcaaccccgtgctggcaggatcctgcgactcaacgtgcagccatctggtggtgcccttcctgctcctggtcagcctgggctcggccctggcctgtctcacccacacaccctccttcatgctcatcctaagaggagtgaagaaagaagacaagactttggctgtgggcatccagttcatgttcctgaggattttggcctggatgcccagccccgtgatccacggcagcgccatcgacaccacctgtgtgcactgggccctgagctgtgggcgtcgagctgtctgtcgctactacaataatgacctgctccgaaaccggttcatcggcctccagttcttcttcaaaacaggttctgtgatctgcttcgccttagttttggctgtcctgaggcagcaggacaaagaggcaaggaccaaagagagcagatccagccctgccgtagagcagcaattgctagtgtcggggccagggaagaagccagaggattcccgagtgtgagctgtcttggggccccacctggccaagagtagcagccacagcagtacctcctctgagtcctttgcccaagattgggtgtcaagagccctgtgttccattctggctcctccactaaattgctgtgtgacttcaggcaagacattgatcctctctcagcctttgcttgctagtctgaaccaaagagttgtttgggcatttgctgtgttggccatttctggagcaagagggtcttcttcctccttcccccagccagccagctgtcctggggccaggctttcctgggtggaaagaagtatacctttccctggggccctaggatagcaaagtgagccatagtgggccaggctgccctccatgctgggccccagcccaggtctgcactcgcctggatcaccttctttgagccttagccatctcctgtcaggtaggaatgaacttgccagccttcaggctcgttcagctatgaccatctgtgcggtcagggtacactcagctctcctccccaactccagcagcctttaagaagtgtccctttggcgccccctggaggcagagcactgagctggaccctgggtagactcccacagggaggacggagctggcctcaggagtgggacacccagacttggcagggccttcaagaggcctgtgtgggggccccaggaatccttagctgaagcggggagactcactctccatctcaggaaattctagcccttgccctcagggagccacggttgagggtgaggcccaacacctgccttagggccctgggtgggcaagtctgggccctggggtagggagggagactcaggcccacacttgggtattttctaatttcagacaaacacacactcagcgcgcactcactgattcctacacattgccaagatttcacacatgtgaccaggggccaccaaagtccctgtgacctttgtgactaggatcctaatttctctattttctcctgggtgcctgggtctgtgtcacctggggcagtgtggataatgtttagttctgtgacactgttttttgggggtggcacctggttctccgatgcctgggctggtgtcaggcccaggactgtagtgctgggagcagtaaagctcagctctgtgtaatgagtgatgctatggcttgctcgtgtcttatgatccaatccttttctacatcagcccttgttttgttttatggctagtcttatctggcctggttatttccttgcggggaggagagggtttgctaatctgctcccagcccaacctattaccaccccacctcgctgggacctactgctcgggaggcagcagacagggagccaccagcagtggcttcctggccctgtgctgggggtggggggaagctgggggcacatgtggcccttgccttctgagcagctcccagtgccagggctttgagactttcccacatgataaaagaaaagggaggtacagaagttccaattccctttttattttgctggttggtatctgtaaatgtttaataaatatctgagcatgtatctatcaacgccaaaaaaaaaaaaaaaaaaaaaaaaaaaaaaaaaaaaaaaaaaaaaaaaaaaaaaaaaaaaaaaaaaaaaaaaaaaaaaaaaaaaaaaaaaaaaaccatttggcccgcttggcccaagtcaattttaaactggacaaagtttatccatgcgcccgaaattggagctaattggccaaattccccttatagggagccgattaaaaatcaatggcccgtgttttaaaaacgtcggaattggaaaacccttggggtacccaaattaaatccctttgaagaaaatccccttttccccagttggcgaaataccaaaaagccccgaaccaatcgcctttccaaaaatttgccaaccctaaaggccaatggaaaattgaaagcgtaaaaatttggtaaaaatccccgtaaaatttttgg

SEQ ID NO: 312412 - DNA, 1970 bp, Homo sapiens
tgcgccatttcctccagcctggagtgtctccgcccttcccgcctcccgtctccgagcttcttaaacacaggccttgggcctacggctctgggggtacttgggggggcgggggcaggtctgatgagtaacccctccccccaggttccagaggaagaagcctccacatctgtctgccggcccaagagttccatggcctccacttcccgccgccaacgccgagaacgtcgctttcgtcgttacttgtctgcaggacggctggtccgggcccaggccctcctccagcgacacccaggcctcgatgtagatgctgggcagcccccaccactgcaccgggcctgtgcccgccacgatgcccctgccctgtgcctgctgcttcggctcggggctgaccctgcccaccaggaccgccatggggacacggcactgcatgctgctgcccgccagggcccagatgcctacaccgatttcttcctcccgctgctaagccgctgtccctccgccatgggaataaagaataaggatggggagacccctggccaaattttgggctggggacccccctgggattctgctgaagaggaggaagaagatgatgcctccaaggagcgggaatggagacagaagctccagggtgatgcctcccatgaaacccaggaacctgagtccttctcagcctggtcagatcgcctggcccgggaacatgcccagaagtgccagcagcagcagcgagaagcagagggatcctgtcgacccccacgtgctgagggctccagccagagctggcgacagcaggaggaggagcagcggctcttcagggagcgagcccgggccaaggaggaagagctgcgtgagagccgagccaggagggcgcaggaggctctaggggaccgagaacccaagccaaccagggccgggcccagggaagagcaccccagaggagcggggaggggcagcctctggcgatttggtgatgtgccctggccctgccctgggggaggggacccagaggccatggctgcagccctggtggccaggggcccccctttggaggaacagggggctctgaggaggtacttgagggtccagcaggtccgctggcaccctgaccgcttcctgcagcgattccgaagccagattgagacctgggagctgggccgtgtgatgggagcagtgacagccctttctcaggccctgaatcgccatgcagaggccctcaagtgaccctagggaagaagcaagaaacttcggggctgcagcctcaggatgaggcagaaggaagggtaagggaaaggatggggaccacaaggaagagccaggtgctgctcagcagaggatatgggtgggagcgaaagttgtaacaagtgggggtggggggtgcgggccgccaccactgctccttgactctgccgtttcctaataagacctggttccacatctcaaaaaaaaaaaaaaaaaaaaagaaaaaaacaaagatgaaagaaacaaacacaaaacataaagaaaaaaacgcaaaaaccagaaaacacaaaaaagagggggggcgcagaaacaaaaacaccgcggggggcaccccaaatgaccacacacagacttgatacgacagggggccacaaaaaagcgggagggacatataaaagaaccgaggcacgagcggcgcgaccgataccaaacagcgcgtgcgcagcgagaacaacagtgcgaaacaaggagagattgaagagaaagaagacgaccaacacacggggaggggaacacacacaaggggcgcacaagcccgcagaagggagaaacaaacggccccccgagggaggaagaaaaataacaaaagagagtggaagagcaggaggggaagaacaaaaaacgacagatagtacgggcgcgaggagagagaagacgagcgcccaagggcagcagactagaagcgggaacattaaacgccgaggggggaacgaaagaaagggggcggcggc

SEQ ID NO: 312413 - DNA, 2102 bp, Homo sapiens
tgcgccatttcctccagcctggagtgtctccgcccttcccgcctcccgtctccgagcttcttaaacacaggccttgggcctacggctctgggggtacttgggggggcgggggcaggtctgatgagtaacccctccccccaggttccagaggaagaagcctccacatctgtctgccggcccaagagttccatggcctccacttcccgccgccaacgccgagaacgtcgctttcgtcgttacttgtctgcaggacggctggtccgggcccaggccctcctccagcgacacccaggcctcgatgtagatgctgggcagcccccaccactgcaccgggcctgtgcccgccacgatgcccctgccctgtgcctgctgcttcggctcggggctgaccctgcccaccaggaccgccatggggacacggcactgcatgctgctgcccgccagggcccagatggtcagcagtcatttggaaagagcttgctctgccgccggccatagttgttgccggttcacctccccacccctctcccatcatcccctgcctacaccgatttcttcctcccgctgctaagccgctgtccctccgccatgggaataaagaataaggatggggagacccctggccaaattttgggctggggacccccctgggattctgctgaagaggaggaagaagatgatgcctccaaggagcgggaatggagacagaagctccagggtgagctggaggacgagtggcaggaagtcatggggaggtttgaaggtgatgcctcccatgaaacccaggaacctgagtccttctcagcctggtcagatcgcctggcccgggaacatgcccagaagtgccagcagcagcagcgagaagcagagggatcctgtcgacccccacgtgctgagggctccagccagagctggcgacagcaggaggaggagcagcggctcttcagggagcgagcccgggccaaggaggaagagctgcgtgagagccgagccaggagggcgcaggaggctctaggggaccgagaacccaagccaaccagggccgggcccagggaagagcaccccagaggagcggggaggggcagcctctggcgatttggtgatgtgccctggccctgccctgggggaggggacccagaggccatggctgcagccctggtggccaggggcccccctttggaggaacagggggctctgaggaggtacttgagggtccagcaggtccgctggcaccctgaccgcttcctgcagcgattccgaagccagattgagacctgggagctgggccgtgtgatgggagcagtgacagccctttctcaggccctgaatcgccatgcagaggccctcaagtgaccctagggaagaagcaagaaacttcggggctgcagcctcaggatgaggcagaaggaagggtaagggaaaggatggggaccacaaggaagagccaggtgctgctcagcagaggatatgggtgggagcgaaagttgtaacaagtgggggtggggggtgcgggccgccaccactgctccttgactctgccgtttcctaataagacctggttccacatctcaaaaaaaaaaaaaaaaaaaaagaaaaaaacaaagatgaaagaaacaaacacaaaacataaagaaaaaaacgcaaaaaccagaaaacacaaaaaagagggggggcgcagaaacaaaaacaccgcggggggcaccccaaatgaccacacacagacttgatacgacagggggccacaaaaaagcgggagggacatataaaagaaccgaggcacgagcggcgcgaccgataccaaacagcgcgtgcgcagcgagaacaacagtgcgaaacaaggagagattgaagagaaagaagacgaccaacacacggggaggggaacacacacaaggggcgcacaagcccgcagaagggagaaacaaacggccccccgagggaggaagaaaaataacaaaagagagtggaagagcaggaggggaagaacaaaaaacgacagatagtacgggcgcgaggagagagaagacgagcgcccaagggcagcagactagaagcgggaacattaaacgccgaggggggaacgaaagaaagggggcggcggc

SEQ ID NO: 312414 - DNA, 358 bp, Homo sapiens
aggacgagtggcaggaagtcatggggaggtttgaaggtgagaagtccactgctatccacagctgcccttccccactggctgctttccatctgcatgaatgcgtcacactaggctcctctgccccctcctctgtgcttccctgcttcttggggcccatcaccttctcacagcctctctccaactacccccatcccaccctcccaaacaggtgatgcctcccatgaaacccaggaacctgagtccttctcagcctggtcagatcgcctggcccgggaacatgcccagaagtgccagcagcagcagcgagaagcagagggatcctgtcgacccccacgtgctgagggctccagccagagct

SEQ ID NO: 312415 - DNA, 2015 bp, Homo sapiens
tgcgccatttcctccagcctggagtgtctccgcccttcccgcctcccgtctccgagcttcttaaacacaggccttgggcctacggctctgggggtacttgggggggcgggggcaggtctgatgagtaacccctccccccaggttccagaggaagaagcctccacatctgtctgccggcccaagagttccatggcctccacttcccgccgccaacgccgagaacgtcgctttcgtcgttacttgtctgcaggacggctggtccgggcccaggccctcctccagcgacacccaggcctcgatgtagatgctgggcagcccccaccactgcaccgggcctgtgcccgccacgatgcccctgccctgtgcctgctgcttcggctcggggctgaccctgcccaccaggaccgccatggggacacggcactgcatgctgctgcccgccagggcccagatgcctacaccgatttcttcctcccgctgctaagccgctgtccctccgccatgggaataaagaataaggatggggagacccctggccaaattttgggctggggacccccctgggattctgctgaagaggaggaagaagatgatgcctccaaggagcgggaatggagacagaagctccagggtgagctggaggacgagtggcaggaagtcatggggaggtttgaaggtgatgcctcccatgaaacccaggaacctgagtccttctcagcctggtcagatcgcctggcccgggaacatgcccagaagtgccagcagcagcagcgagaagcagagggatcctgtcgacccccacgtgctgagggctccagccagagctggcgacagcaggaggaggagcagcggctcttcagggagcgagcccgggccaaggaggaagagctgcgtgagagccgagccaggagggcgcaggaggctctaggggaccgagaacccaagccaaccagggccgggcccagggaagagcaccccagaggagcggggaggggcagcctctggcgatttggtgatgtgccctggccctgccctgggggaggggacccagaggccatggctgcagccctggtggccaggggcccccctttggaggaacagggggctctgaggaggtacttgagggtccagcaggtccgctggcaccctgaccgcttcctgcagcgattccgaagccagattgagacctgggagctgggccgtgtgatgggagcagtgacagccctttctcaggccctgaatcgccatgcagaggccctcaagtgaccctagggaagaagcaagaaacttcggggctgcagcctcaggatgaggcagaaggaagggtaagggaaaggatggggaccacaaggaagagccaggtgctgctcagcagaggatatgggtgggagcgaaagttgtaacaagtgggggtggggggtgcgggccgccaccactgctccttgactctgccgtttcctaataagacctggttccacatctcaaaaaaaaaaaaaaaaaaaaagaaaaaaacaaagatgaaagaaacaaacacaaaacataaagaaaaaaacgcaaaaaccagaaaacacaaaaaagagggggggcgcagaaacaaaaacaccgcggggggcaccccaaatgaccacacacagacttgatacgacagggggccacaaaaaagcgggagggacatataaaagaaccgaggcacgagcggcgcgaccgataccaaacagcgcgtgcgcagcgagaacaacagtgcgaaacaaggagagattgaagagaaagaagacgaccaacacacggggaggggaacacacacaaggggcgcacaagcccgcagaagggagaaacaaacggccccccgagggaggaagaaaaataacaaaagagagtggaagagcaggaggggaagaacaaaaaacgacagatagtacgggcgcgaggagagagaagacgagcgcccaagggcagcagactagaagcgggaacattaaacgccgaggggggaacgaaagaaagggggcggcggc

SEQ ID NO: 312416 - DNA, 533 bp, Homo sapiens
  misc_feature (521)..(521): n is a, c, g, or t
tgcgccatttcctccagcctggagtgtctccgcccttcccgcctcccgtctccgagcttcttaaacacaggccttgggcctacggctctgggggtacttgggggggcgggggcaggtctgatgagtaacccctccccccaggttccagaggaagaagcctccacatctgtctgccggcccaagagttccatggcctccacttcccgccgccaacgccgagaacgtcgctttcgtcgttacttgtctgcaggacggctggtccgggcccaggccctcctccagcgacacccaggcctcgatgtagatgctgggcagcccccaccactgcaccgggcctgtgcccgccacgatgcccctgccctgtgcctgctgcttcggctcggggctgaccctgcccaccaggaccgccatggggacacggcactgcatgctgctgcccgccagggcccagatgcctacaccgatttcttcctcccgctgctaagccgctgtccctccgccatggagtaaatggcagggtngcgagctcgata

SEQ ID NO: 312417 - DNA, 364 bp, Homo sapiens
agtcatctgtggaggagaaaagtcacatccagctccttcatgttgctgccgatgtgggattttcctggcttcgtcagccaagcaattggctgcctttgccggaggctttgagaaccaaggcttgaaggccggcaggagcatccagggggaagcttggcttcagggaggacctagcagagtgagtaagatgagcacccggaggtgcctttgtggcttggggtatatgacttagggcatgtggcatcccccctctgatcttagtctgtcctctgggcatcaagggagaggtatgtggtgatttctgccagcctgtgagtggtgaggcgggggctgggcctggggctccccaccccatttctgtgtc

SEQ ID NO: 312418 - DNA, 5417 bp, Homo sapiens
agtcatctgtggaggagaaaagtcacatccagctccttcatgttgctgccgatgtgggattttcctggcttcgtcagccaagcaattggctgcctttgccggaggctttgagaaccaaggcttgaaggccggcaggagcatccagggggaagcttggcttcagggaggacctagcagacgttgggccggagcactagcctcacggagaaggatctgaaagaagccaaggcgcggagccagcagattgcagcccagctgaccacccctcccagctccaattcccgtggcgtccagctcttcaacaggcgccggcagagggtgaacgagttcaccttggagagccacggccagaggggacagaagcccagccaggagtccctcagagtgctcccttcaagcctcccaggccatgcaccggggctcagcctgagttccacctcgctgccggagccaggccctccacggcaccccagtccccagagccccgacagaggggtccctggccacagcatggaggggtactcagaggaggctagcttgctgcggcacctggagaaggtggccagtgaggaggaagaggtaccactggtggtttatctaaaggagaatgcagcactgctgacagccaatgggctgcacctgtcccaaaaccgagaggcccagcagtcctcaccggccccacctccagctgaggtccacagcccagctgcagatgtcaaccaaaaccttgcctcgcccagtgccacgctcaccacaccaacttctaacagcagccacaatccgccagccaccgatgtcaatcagaacccaccggcaactgttgtcccacagagcctgccactttctagcatccaacagaattcctcagaggcccaactcccatctaatggcacagggcctgcttccaaacccagcaccctgtgtgctgatgggcaaccccaggcaccggctgaggaggtgagatgcagcacactcctaattgacaaggtatcaactccagctaccaccaccagcaccttctccagagaagctacgctcatccccagctccaggcccccagcctcagatttcatgtccagctccctgctcattgacatccagcccaacaccctagtggtgtcagcagatcaagagatgtctgggcgagcagctgccaccacgcccaccaaggtctacagtgaggtccacttcacactggccaagcccccatcagtggtcaacaggacggccaggccttttgggatccaggcgccagggggcaccagccagatggagaggagccccatgctagagagacgacattttggggagaaggccccggctccccagccccccagtttgccagacaggagcccccggccacagagacacataatgtcccgcagccccatggtggaaaggaggatgatggggcagcgaagcccggcctcagagagacgccccttggggaacttcactgcaccccccacctacactgagaccttgtccacagcccctctggcttcctgggtgaggtctcctccctcatattctgtcctgtatcccagctccgaccccaagtcttctcatctgaagggccaggcggttcctgccagcaagacgggcattctggaggagtcgatggcccgccggggcagccgcaaatccatgtttactttcgtggagaagcccaaggtgaccccgaatccagacttgctggatctggtacagacagcggatgagaagcggcggcagagggaccagggggaggtaggcgtggaggaggagcccttcgcactgggggccgaggcctccaacttccagcaggagccagcacctcgtgacagggccagccccgcggcggcggaggaggtggtaccagagtgggcctcctgcctcaagtcaccccgcatccaggccaagccgaagcccaaacccaaccagaacctctccgaggcctctgggaagggagctgagctctacgcccgccgccagtcacggatggagaaatatgtcatcgagtcttcaagccacacgccagagctggcccgctgcccatcacctaccatgtccctgccttcctcctggaaataccccactaacgcccccggggccttccgagtggcatcccgaagcccagcccggaccccgcctgcctccctctaccatggctacctgcctgagaacggggtcctgcgcccagagcccaccaagcagccgccataccagctgcgcccctcgctctttgtcctctcacctatcaaggagcctgccaaggtctcaccaagagctgcctcgcccgccaagcccagctccttggacctggtgcccaacctgcccaagggggctctccctccatctcctgccctgcctcggccctcgcgctcctcaccgggcctctacacctcccccggccaggacagcctgcagcccactgccgtgagccctccttacggcggtgacatctcccccgtgtctccctccagggcgtggtctccccgagccaagcaggcccccaggccctccttctctacccggaacgccgggatcgaggctcaggaccgccgggagagcctgcccacctccccaccctggacgccgggcgcgtcccggccccccagcagcctagacggctgggtgagcccgggcccgtgggagccaggtcgcgggagcagcatgagcagccccccgccgctgccgccgccaccgcccatgtctccctcgtggagcgagcgctcggtgtccccgctgcgacctgagaccgaggcgcggccccccagccgccagctgcaggcgcttctggcgcgaaacatcatcaatgcggcccggcgcaagagcgcctccccgcggtcggcgggcgccgagaacccgcggcccttctccccgccgagggcgccaccgcccccgcccccgcccccgcccccgcccccgcgcatgcgctcgccacagcccgcccgccccggctcggctgctgtgccgggggcagccttcgcgcccatcccgcggagcccgttgcccgccggtccttcgtcctgcaccagtccccggagcccgctgcccgcgcctcccaggcccttcctctaccgccgctcgcccacggactccgacgtgtccctcgactccgaggactccggggctaagtctccaggcatcctgggctacaatatctgtccccgcgggtggaatggcagccttcggctcaagcgtggcagcctccccgccgaggcctcctgcaccacctagagccccacccccgaccccaccccgggagggcagagccagaagaaggctcattagacctgggggacccaaagggtctggcctctttgggcagccccagagatgaggggtcagcagaggagagctctggggttggggatgggttagggacgcaagcttgagttctagcccttgctctcattcagctgttgtgtgaccctgggtaagacccttccttgtttgaccctcagctttcccatctgtttaatggtggctttggccaaggcaatccacaaacgtcaaaattccccttcccatcagtacacacaccgatgcacacacactctctctttctctctctctctctctcactcacacacacacacacacacacacacacacacacacactagttagtgccttggatgaggcggggcagtgtgtatatggacccctggacttgctaccttcagggttccatactcgtccctcccctcctggctctgctgtctggagtctggcaagcggggtgtgttcagaaggtcctaggcctgtgtcgcatgtccaggcactggcctgaccatccggctccctggcaccaagtcccaggcaggagcagctgttttccatcccttcccagacaagctctatttttatcacaatgacctttagagaggtctcccaggccagctcaaggtgtcccactatcccctctggagggaagaggcaggaaaattctccccgggtccctgtcatgctactttctccatcccagttcagactgtccaggacatcttatctgcagccataagagaattataaggcagtgatttcccttaggcccaggacttgggcctccagctcatctgttccttctgggcccattcatggcaggttctgggctcaaagctgaactggggagagaagagatacagagctaccatgtgactttacctgattgccctcagtttggggttgcttattgggaaagagagagacaaagagttacttgttacgggaaatatgaaaagcatggccaggatgcatagaggagattctagcaggggacaggattggctcagatgacccctgagggctcttccagtcttgaaatgcattccatgatattaggaagtcgggggtgggtggtggtggtgggctagttgggcttgaatttaggggccgatgagcttgggtacgtgagcagggtgttaagttagggtctgcctgtatttctggtccccttggaaatgtccccttcttcagtgtcagacctcagtcccagtgtccatatcgtgcccagaaaagtagacattatcctgccccatcccttccccagtgcactctgacctagctagtgcctggtgcccagtgacctgggggagcctggctgcaggccctcactggttccctaaaccttggtggctgtgattcaggtccccaggggggactcagggaggaatatggctgagttctgtagtttccagagttggctggtagagccttctagaggttcagaatattagcttcaggatcagctgggggtatggaattggctgaggatcaaacgtatgtaggtgaaaggataccaggatgttgctaaaggtgagggacagtttgggtttgggacttaccggggtgatgttagatctggaacccccaagtgaggctggagggagttaaggtcagtatggaagatagggttgggacagggtgctttggaatgaaagagtgaccttagagggctccttgggcctcaggaatgctcctgctgctgtgaagatgagaaggtgctcttactcagttaatgatgagtgactatatttaccaaagcccctacctgctgctgggtcccttgtagcacaggagactggggctaagggcccctcccagggaagggacaccatcaggcctctggctgaggcagtagcatagaggatccatttctacctgcatttcccagaggactagcaggaggcagccttgagaaaccggcagttcccaagccagcgcctggctgttctctcattgtcactgccctctccccaacctctcctctaacccactagagattgcctgtgtcctgcctcttgcctcttgtagaatgcagctctggccctcaataaatgcttcctgcaccaacactccctaacccattattttcaaccctccttccccccaaacccaccctacccctcccccctctgccaccccttccc

SEQ ID NO: 312419 - DNA, 4373 bp, Homo sapiens
tgggggtaaaaatgattatcataatttaatgagtcgaacccacccgtccggggacgcgtgggtttgggatccaggcgccagggggcaccagccagatggagaggagccccatgctagagagacgacattttggggagaaggccccggctccccagccccccagtttgccagacaggagcccccggccacagagacacataatgtcccgcagccccatggtggaaaggaggatgatggggcagcgaagcccggcctcagagagacgccccttggggaacttcactgcaccccccacctacactgagaccttgtccacagcccctctggcttcctgggtgaggtctcctccctcatattctgtcctgtatcccagctccgaccccaagtcttctcatctgaagggccaggcggttcctgccagcaagacgggcattctggaggagtcgatggcccgccggggcagccgcaaatccatgtttactttcgtggagaagcccaaggtgaccccgaatccagacttgctggatctggtacagacagcggatgagaagcggcggcagagggaccagggggaggtaggcgtggaggaggagcccttcgcactgggggccgaggcctccaacttccagcaggagccagcacctcgtgacagggccagccccgcggcggcggaggaggtggtaccagagtgggcctcctgcctcaagtcaccccgcatccaggccaagccgaagcccaaacccaaccagaacctctccgaggcctctgggaagggagctgagctctacgcccgccgccagtcacggatggagaaatatgtcatcgagtcttcaagccacacgccagagctggcccgctgcccatcacctaccatgtccctgccttcctcctggaaataccccactaacgcccccggggccttccgagtggcatcccgaagcccagcccggaccccgcctgcctccctctaccatggctacctgcctgagaacggggtcctgcgcccagagcccaccaagcagccgccataccagctgcgcccctcgctctttgtcctctcacctatcaaggagcctgccaaggtctcaccaagagctgcctcgcccgccaagcccagctccttggacctggtgcccaacctgcccaagggggctctccctccatctcctgccctgcctcggccctcgcgctcctcaccgggcctctacacctcccccggccaggacagcctgcagcccactgccgtgagccctccttacggcggtgacatctcccccgtgtctccctccagggcgtggtctccccgagccaagcaggcccccaggccctccttctctacccggaacgccgggatcgaggctcaggaccgccgggagagcctgcccacctccccaccctggacgccgggcgcgtcccggccccccagcagcctagacggctgggtgagcccgggcccgtgggagccaggtcgcgggagcagcatgagcagccccccgccgctgccgccgccaccgcccatgtctccctcgtggagcgagcgctcggtgtccccgctgcgacctgagaccgaggcgcggccccccagccgccagctgcaggcgcttctggcgcgaaacatcatcaatgcggcccggcgcaagagcgcctccccgcggtcggcgggcgccgagaacccgcggcccttctccccgccgagggcgccaccgcccccgcccccgcccccgcccccgcccccgcgcatgcgctcgccacagcccgcccgccccggctcggctgctgtgccgggggcagccttcgcgcccatcccgcggagcccgttgcccgccggtccttcgtcctgcaccagtccccggagcccgctgcccgcgcctcccaggcccttcctctaccgccgctcgcccacggactccgacgtgtccctcgactccgaggactccggggctaagtctccaggcatcctgggctacaatatctgtccccgcgggtggaatggcagccttcggctcaagcgtggcagcctccccgccgaggcctcctgcaccacctagagccccacccccgaccccaccccgggagggcagagccagaagaaggctcattagacctgggggacccaaagggtctggcctctttgggcagccccagagatgaggggtcagcagaggagagctctggggttggggatgggttagggacgcaagcttgagttctagcccttgctctcattcagctgttgtgtgaccctgggtaagacccttccttgtttgaccctcagctttcccatctgtttaatggtggctttggccaaggcaatccacaaacgtcaaaattccccttcccatcagtacacacaccgatgcacacacactctctctttctctctctctctctctcactcacacacacacacacacacacacacacacacacacactagttagtgccttggatgaggcggggcagtgtgtatatggacccctggacttgctaccttcagggttccatactcgtccctcccctcctggctctgctgtctggagtctggcaagcggggtgtgttcagaaggtcctaggcctgtgtcgcatgtccaggcactggcctgaccatccggctccctggcaccaagtcccaggcaggagcagctgttttccatcccttcccagacaagctctatttttatcacaatgacctttagagaggtctcccaggccagctcaaggtgtcccactatcccctctggagggaagaggcaggaaaattctccccgggtccctgtcatgctactttctccatcccagttcagactgtccaggacatcttatctgcagccataagagaattataaggcagtgatttcccttaggcccaggacttgggcctccagctcatctgttccttctgggcccattcatggcaggttctgggctcaaagctgaactggggagagaagagatacagagctaccatgtgactttacctgattgccctcagtttggggttgcttattgggaaagagagagacaaagagttacttgttacgggaaatatgaaaagcatggccaggatgcatagaggagattctagcaggggacaggattggctcagatgacccctgagggctcttccagtcttgaaatgcattccatgatattaggaagtcgggggtgggtggtggtggtgggctagttgggcttgaatttaggggccgatgagcttgggtacgtgagcagggtgttaagttagggtctgcctgtatttctggtccccttggaaatgtccccttcttcagtgtcagacctcagtcccagtgtccatatcgtgcccagaaaagtagacattatcctgccccatcccttccccagtgcactctgacctagctagtgcctggtgcccagtgacctgggggagcctggctgcaggccctcactggttccctaaaccttggtggctgtgattcaggtccccaggggggactcagggaggaatatggctgagttctgtagtttccagagttggctggtagagccttctagaggttcagaatattagcttcaggatcagctgggggtatggaattggctgaggatcaaacgtatgtaggtgaaaggataccaggatgttgctaaaggtgagggacagtttgggtttgggacttaccggggtgatgttagatctggaacccccaagtgaggctggagggagttaaggtcagtatggaagatagggttgggacagggtgctttggaatgaaagagtgaccttagagggctccttgggcctcaggaatgctcctgctgctgtgaagatgagaaggtgctcttactcagttaatgatgagtgactatatttaccaaagcccctacctgctgctgggtcccttgtagcacaggagactggggctaagggcccctcccagggaagggacaccatcaggcctctggctgaggcagtagcatagaggatccatttctacctgcatttcccagaggactagcaggaggcagccttgagaaaccggcagttcccaagccagcgcctggctgttctctcattgtcactgccctctccccaacctctcctctaacccactagagattgcctgtgtcctgcctcttgcctcttgtagaatgcagctctggccctcaataaatgcttcctgcattcttctgcctcctgtgtcattttcagctgtgtctgatgtccttcccttctccccaagcatggagcagtccatgggactctgggtggctgggaatatttgagacatatgggatgggagcttgggaagaagcagccatggggagagatgggaacaacggacaacttgaggccatagaagtacctggactgcagtcctggtcctgtcatggac

SEQ ID NO: 312420 - DNA, 4585 bp, Homo sapiens
agtcatctgtggaggagaaaagtcacatccagctccttcatgttgctgccgatgtgggattttcctggcttcgtcagccaagcaattggctgcctttgccggaggctttgagaaccaaggcttgaaggccggcaggagcatccagggggaagcttggcttcagggaggacctagcagacgttgggccggagcactagcctcacggagaaggatctgaaagaagccaaggcgcggagccagcagattgcagcccagctgaccacccctcccagctccaattcccgtggcgtccagctcttcaacaggcgccggcagagggtgaacgagttcaccttggagagccacggccagaggggacagaagcccagccaggagtccctcagagtgctcccttcaagcctcccaggccatgcaccggggctcagcctgagttccacctcgctgccggagccaggccctccacggcaccccagtccccagagccccgacagaggggtccctggccacagcatggaggggtactcagaggaggctagcttgctgcggcacctggagaaggtggccagtgaggaggaagaggtaccactggtggtttatctaaaggagaatgcagcactgctgacagccaatgggctgcacctgtcccaaaaccgagaggcccagcagtcctcaccggccccacctccagctgaggtccacagcccagctgcagatgtcaaccaaaaccttgcctcgcccagtgccacgctcaccacaccaacttctaacagcagccacaatccgccagccaccgatgtcaatcagaacccaccggcaactgttgtcccacagagcctgccactttctagcatccaacagaattcctcagaggcccaactcccatctaatggcacagggcctgcttccaaacccagcaccctgtgtgctgatgggcaaccccaggcaccggctgaggaggtgagatgcagcacactcctaattgacaaggtatcaactccagctaccaccaccagcaccttctccagagaagctacgctcatccccagctccaggcccccagcctcagatttcatgtccagctccctgctcattgacatccagcccaacaccctagtggtgtcagcagatcaagagatgtctgggcgagcagctgccaccacgcccaccaaggtctacagtgaggtccacttcacactggccaagcccccatcagtggtcaacaggacggccaggccttttgggatccaggcgccagggggcaccagccagatggagaggagccccatgctagagagacgacattttggggagaaggccccggctccccagccccccagtttgccagacaggagcccccggccacagagacacataatgtcccgcagccccatggtggaaaggaggatgatggggcagcgaagcccggcctcagagagacgccccttggggaacttcactgcaccccccacctacactgagaccttgtccacagcccctctggcttcctgggtgaggtctcctccctcatattctgtcctgtatcccagctccgaccccaagtcttctcatctgaagggccaggcggttcctgccagcaagacgggcattctggaggagtcgatggcccgccggggcagccgcaaatccatgtttactttcgtggagaagcccaaggtgaccccgaatccagacttgctggatctggtacagacagcggatgagaagcggcggcagagggaccagggggaggtaggcgtggaggaggagcccttcgcactgggggccgaggcctccaacttccagcaggagccagcacctcgtgacagggccagccccgcggcggcggaggaggtggtaccagagtgggcctcctgcctcaagtcaccccgcatccaggccaagccgaagcccaaacccaaccagaacctctccgaggcctctgggaagggagctgagctctacgcccgccgccagtcacggatggagaaatatgtcatcgagtcttcaagccacacgccagagctggcccgctgcccatcacctaccatgtccctgccttcctcctggaaataccccactaacgcccccggggccttccgagtggcatcccgaagcccagcccggaccccgcctgcctccctctaccatggctacctgcctgagaacggggtcctgcgcccagagcccaccaagcagccgccataccagctgcgcccctcgctctttgtcctctcacctatcaaggagcctgccaaggtctcaccaagagctgcctcgcccgccaagcccagctccttggacctggtgcccaacctgcccaagggggctctccctccatctcctgccctgcctcggccctcgcgctcctcaccgggcctctacacctcccccggccaggacagcctgcagcccactgccgtgagccctccttacggcggtgacatctcccccgtgtctccctccagggcgtggtctccccgagccaagcaggcccccaggccctccttctctacccggaacgccgggatcgaggctcaggtgtggaagccttccttctgcttcaagtaacgaaccccacgggggtcccactgccggtcaagttcccctccttgagggccagatggagagcagatgtggcaggaaatggcacagagctgagtgaggagaatggggagtccatggttcaaggtcagatgcggccaccagctggctttgtgaccttgggcgagtcgcctcccctctctgagctgaagccgcccctcccctactacaacaggggtcggactccatgtctgagcggggaggagggtcatggagagagaactgtctggcagccctgatgcggtagaggggcatcctctggcctttgtgagctgtagggatgcagagtctgatgccagcgtcttgctgggggagtggcctagaaggggatcctaacagggacttctggagcagacagagcctgccagtgcctgtggagtcagccagccgagggtctgcctcctcagctgccccaggggggcctccctcctgaggctcaagctcctggcgtctttcttcctgttgctggattctcacctccatgggcctgtctcttctgcctctgccttctggacaccgtttcctctccgctgcttcagagagctttgcctcgcctccgcctgcgctcccctccagggtccttctgctggctgcggactcggcccaccactgctgtctgacgcttttcttcctgccccctctgaggcctggctctgttttagggagatcactgggcccaggcctcagccccagttctacctggcttgctgtcaccgctctaggggtgggggacgtcccaggggatccccaggagaaggagagccctgtagggggctgtgcagatgtgggtgtgccacagggagggtggcccctagccatgtatccattggctgttttggcttcagattcaaccaagatctgcctgactaaaagaagccacctcagcgcagtggaacggggcccagggggaggcaggagaggagggttccggtcccatgtcaccttctcatttgctgtgtgactttggcccactcacattctctttgggcctcagttttatcatttatacaaggagggcttttctagctgtaacaatctgtgaggattgagaggataggctggtgctttgaagaaaggccttgtaagtgacaagacagtcccctgggaagaaagagaaaggaaatgggctattgccaaaggacaggtggcgttagatggctgtgagggtgacctggtgagggaagggttggaatgagctgctgcaggaggccaagggatgcctgggctgggctgggctgggctggcttaggctcaggattgcctggggacagtaggagcatggcaggagctggggcaggtgcatagcagtgcagtgggaagggacagaggagatcttagaattttgaggaaaatctgggacttgagacctggattctaacagaccaactgcatgtgtgtctgtaggtctcagtttccacattcatacagtgagggtgttaagtcaggtagctggagacttcccatcgcctctgacacttttggaggtgatatgatacagcccccgaccaaaccaggctttgtggggggtgagagaatacagacacaagtggcaggattcagatggaagcttcgcaaggctgggggccgaggaccacccacttctctttcccagccctagttctgggttccccagtggggcaaggggtggtggaggcagtgcccatgctgggctgagcctgcagtttttgtgagctctgggcttgtctccatgggaacaggggtgccttcttagtgagctcatttcacacagatcgagggggtatgcgtgggggagttgtgagtgagctcagctccttcaggcctggcctctcccagaacagagtgaagcccctgccctggacccctgctcccttctacccttgagggccaccaatggaagagcccgcccttcattctgcagctcctgcggccaggctgagctctgcccccaactttgttttctctcatgttctcaatacactctgcctcaaatccgtcttgcttc

SEQ ID NO: 312421 - DNA, 5294 bp, Homo sapiens
agtcatctgtggaggagaaaagtcacatccagctccttcatgttgctgccgatgtgggattttcctggcttcgtcagccaagcaattggctgcctttgccggaggctttgagaaccaaggcttgaaggccggcaggagcatccagggggaagcttggcttcagggaggacctagcagacgttgggccggagcactagcctcacggagaaggatctgaaagaagccaaggcgcggagccagcagattgcagcccagctgaccacccctcccagctccaattcccgtggcgtccagctcttcaacaggcgccggcagagggtgaacgagttcaccttggagagccacggccagaggggacagaagcccagccaggagtccctcagagtgctcccttcaagcctcccaggccatgcaccggggctcagcctgagttccacctcgctgccggagccaggccctccacggcaccccagtccccagagccccgacagaggggtccctggccacagcatggaggggtactcagaggaggctagcttgctgcggcacctggagaaggtggccagtgaggaggaagaggtaccactggtggtttatctaaaggagaatgcagcactgctgacagccaatgggctgcacctgtcccaaaaccgagaggcccagcagtcctcaccggccccacctccagctgaggtccacagcccagctgcagatgtcaaccaaaaccttgcctcgcccagtgccacgctcaccacaccaacttctaacagcagccacaatccgccagccaccgatgtcaatcagaacccaccggcaactgttgtcccacagagcctgccactttctagcatccaacagaattcctcagaggcccaactcccatctaatggcacagggcctgcttccaaacccagcaccctgtgtgctgatgggcaaccccaggcaccggctgaggaggtgagatgcagcacactcctaattgacaaggtatcaactccagctaccaccaccagcaccttctccagagaagctacgctcatccccagctccaggcccccagcctcagatttcatgtccagctccctgctcattgacatccagcccaacaccctagtggtgtcagcagatcaagagatgtctgggcgagcagctgccaccacgcccaccaaggtctacagtgaggtccacttcacactggccaagcccccatcagtggtcaacaggacggccaggccttttgggatccaggcgccagggggcaccagccagatggagaggagccccatgctagagagacgacattttggggagaaggccccggctccccagccccccagtttgccagacaggagcccccggccacagagacacataatgtcccgcagccccatggtggaaaggaggatgatggggcagcgaagcccggcctcagagagacgccccttggggaacttcactgcaccccccacctacactgagaccttgtccacagcccctctggcttcctgggtgaggtctcctccctcatattctgtcctgtatcccagctccgaccccaagtcttctcatctgaagggccaggcggttcctgccagcaagacgggcattctggaggagtcgatggcccgccggggcagccgcaaatccatgtttactttcgtggagaagcccaaggtgaccccgaatccagacttgctggatctggtacagacagcggatgagaagcggcggcagagggaccagggggaggtaggcgtggaggaggagcccttcgcactgggggccgaggcctccaacttccagcaggagccagcacctcgtgacagggccagccccgcggcggcggaggaggtggtaccagagtgggcctcctgcctcaagtcaccccgcatccaggccaagccgaagcccaaacccaaccagaacctctccgaggcctctgggaagggagctgagctctacgcccgccgccagtcacggatggagaaatatgtcatcgagtcttcaagccacacgccagagctggcccgctgcccatcacctaccatgtccctgccttcctcctggaaataccccactaacgcccccggggccttccgagtggcatcccgaagcccagcccggaccccgcctgcctccctctaccatggctacctgcctgagaacggggtcctgcgcccagagcccaccaagcagccgccataccagctgcgcccctcgctctttgtcctctcacctatcaaggagcctgccaaggtctcaccaagagctgcctcgcccgccaagcccagctccttggacctggtgcccaacctgcccaagggggctctccctccatctcctgccctgcctcggccctcgcgctcctcaccgggcctctacacctcccccggccaggacagcctgcagcccactgccgtgagccctccttacggcggtgacatctcccccgtgtctccctccagggcgtggtctccccgagccaagcaggcccccaggccctccttctctacccggaacgccgggatcgaggctcaggaccgccgggagagcctgcccacctccccaccctggacgccgggcgcgtcccggccccccagcagcctagacggctgggtgagcccgggcccgtgggagccaggtcgcgggagcagcatgagcagccccccgccgctgccgccgccaccgcccatgtctccctcgtggagcgagcgctcggtgtccccgctgcgacctgagaccgaggcgcggccccccagccgccagctgcaggcgcttctggcgcgaaacatcatcaatgcggcccggcgcaagagcgcctccccgcggtcggcgggcgccgagaacccgcggcccttctccccgccgagggcgccaccgcccccgcccccgcccccgcccccgcccccgcgcatgcgctcgccacagcccgcccgccccggctcggctgctgtgccgggggcagccttcgcgcccatcccgcggagcccgttgcccgccggtccttcgtcctgcaccagtccccggagcccgctgcccgcgcctcccaggcccttcctctaccgccgctcgcccacggactccgacgtgtccctcgactccgaggactccggggctaagtctccaggcatcctgggctacaatatctgtccccgcgggtggaatggcagccttcggctcaagcgtggcagcctccccgccgaggcctcctgcaccacctagagccccacccccgaccccaccccgggagggcagagccagaagaaggctcattagacctgggggacccaaagggtctggcctctttgggcagccccagagatgaggggtcagcagaggagagctctggggttggggatgggttagggacgcaagcttgagttctagcccttgctctcattcagctgttgtgtgaccctgggtaagacccttccttgtttgaccctcagctttcccatctgtttaatggtggctttggccaaggcaatccacaaacgtcaaaattccccttcccatcagtacacacaccgatgcacacacactctctctttctctctctctctctctcactcacacacacacacacacacacacacacacacacacactagttagtgccttggatgaggcggggcagtgtgtatatggacccctggacttgctaccttcagggttccatactcgtccctcccctcctggctctgctgtctggagtctggcaagcggggtgtgttcagaaggtcctaggcctgtgtcgcatgtccaggcactggcctgaccatccggctccctggcaccaagtcccaggcaggagcagctgttttccatcccttcccagacaagctctatttttatcacaatgacctttagagaggtctcccaggccagctcaaggtgtcccactatcccctctggagggaagaggcaggaaaattctccccgggtccctgtcatgctactttctccatcccagttcagactgtccaggacatcttatctgcagccataagagaattataaggcagtgatttcccttaggcccaggacttgggcctccagctcatctgttccttctgggcccattcatggcaggttctgggctcaaagctgaactggggagagaagagatacagagctaccatgtgactttacctgattgccctcagtttggggttgcttattgggaaagagagagacaaagagttacttgttacgggaaatatgaaaagcatggccaggatgcatagaggagattctagcaggggacaggattggctcagatgacccctgagggctcttccagtcttgaaatgcattccatgatattaggaagtcgggggtgggtggtggtggtgggctagttgggcttgaatttaggggccgatgagcttgggtacgtgagcagggtgttaagttagggtctgcctgtatttctggtccccttggaaatgtccccttcttcagtgtcagacctcagtcccagtgtccatatcgtgcccagaaaagtagacattatcctgccccatcccttccccagtgcactctgacctagctagtgcctggtgcccagtgacctgggggagcctggctgcaggccctcactggttccctaaaccttggtggctgtgattcaggtccccaggggggactcagggaggaatatggctgagttctgtagtttccagagttggctggtagagccttctagaggttcagaatattagcttcaggatcagctgggggtatggaattggctgaggatcaaacgtatgtaggtgaaaggataccaggatgttgctaaaggtgagggacagtttgggtttgggacttaccggggtgatgttagatctggaacccccaagtgaggctggagggagttaaggtcagtatggaagatagggttgggacagggtgctttggaatgaaagagtgaccttagagggctccttgggcctcaggaatgctcctgctgctgtgaagatgagaaggtgctcttactcagttaatgatgagtgactatatttaccaaagcccctacctgctgctgggtcccttgtagcacaggagactggggctaagggcccctcccagggaagggacaccatcaggcctctggctgaggcagtagcatagaggatccatttctacctgcatttcccagaggactagcaggaggcagccttgagaaaccggcagttcccaagccagcgcctggctgttctctcattgtcactgccctctccccaacctctcctctaacccactagttttccgcgcccactagttccgcgccc

SEQ ID NO: 312422 - DNA, 2021 bp, Homo sapiens
agtcatctgtggaggagaaaagtcacatccagctccttcatgttgctgccgatgtgggattttcctggcttcgtcagccaagcaattggctgcctttgccggaggctttgagaaccaaggcttgaaggccggcaggagcatccagggggaagcttggcttcagggaggacctagcagacgttgggccggagcactagcctcacggagaaggatctgaaagaagccaaggcgcggagccagcagattgcagcccagctgaccacccctcccagctccaattcccgtggcgtccagctcttcaacaggcgccggcagagggtgaacgagttcaccttggagagccacggccagaggggacagaagcccagccaggagtccctcagagtgctcccttcaagcctcccaggccatgcaccggggctcagcctgagttccacctcgctgccggagccaggccctccacggcaccccagtccccagagccccgacagaggggtccctggccacagcatggaggggtactcagaggaggctagcttgctgcggcacctggagaaggtggccagtgaggaggaagaggtaccactggtggtttatctaaaggagaatgcagcactgctgacagccaatgggctgcacctgtcccaaaaccgagaggcccagcagtcctcaccggccccacctccagctgaggtccacagcccagctgcagatgtcaaccaaaaccttgcctcgcccagtgccacgctcaccacaccaacttctaacagcagccacaatccgccagccaccgatgtcaatcagaacccaccggcaactgttgtcccacagagcctgccactttctagcatccaacagaattcctcagaggcccaactcccatctaatggcacagggcctgcttccaaacccagcaccctgtgtgctgatgggcaaccccaggcaccggctgaggaggtgagatgcagcacactcctaattgacaaggtatcaactccagctaccaccaccagcaccttctccagagaagctacgctcatccccagctccaggcccccagcctcagatttcatgtccagctccctgctcattgacatccagcccaacaccctagtggtgtcagcagatcaagagatgtctgggcgagcagctgccaccacgcccaccaaggtctacagtgaggtccacttcacactggccaagcccccatcagtggtcaacaggacggccaggccttttgggatccaggcgccagggggcaccagccagatggagaggagccccatgctagagagacgacattttggggagaaggccccggctccccagccccccagtttgccagacaggagcccccggccacagagacacataatgtcccgcagccccatggtggaaaggaggatgatggggcagcgaagcccggcctcagagagacgccccttggggaacttcactgcaccccccacctacactgagaccttgtccacagcccctctggcttcctgggtgaggtctcctccctcatattctgtcctgtatcccagctccgaccccaagtcttctcatctgaagggccaggcggttcctgccagcaagacgggcattctggaggagtcgatggcccgccggggcagccgcaaatccatgtttactttcgtggagaagcccaaggtgaccccgaatccagacttgctggatctggtacagacagcggatgagaagcggcggcagagggaccagggggaggtaggcgtggaggaggagcccttcgcactgggggccgaggcctccaacttccagcaggagccagcacctcgtgacagggccagccccgcggcggcggaggaggtggtaccagagtgggcctcctgcctcaagtcaccccgcatccaggccaagccgaagcccaaacccaaccagaacctctccgaggcctctgggaagggagctgagctctgcccccaactttgttttctctcatgttctcaatacactctgcctcaaatccgtcttgcttc

SEQ ID NO: 312423 - DNA, 350 bp, Homo sapiens
tttttttttgatttgaggcaaagtgtattgagaacatgagaaaaaacaaagttgggggcaaagctcaacctggccgcaggagctgcaaaatgaagggcgggctcttccattggtggccctcaggggtatgcgtgggggagttgtgagtgagctcagctccttcaggcctggcctctcccagaacagagtgaagcccctgccctggacccctgctcccttctacccttgagggccaccaatggaagagcccgcccttcattctgcagctcctgcggccaggctgagctctgcccccaactttgttttctctcatgttctcaatacactctgcctcaaatccgtcttgcttc

SEQ ID NO: 312424 - DNA, 5547 bp, Homo sapiens
agtcatctgtggaggagaaaagtcacatccagctccttcatgttgctgccgatgtgggattttcctggcttcgtcagccaagcaattggctgcctttgccggaggctttgagaaccaaggcttgaaggccggcaggagcatccagggggaagcttggcttcagggaggacctagcagacgttgggccggagcactagcctcacggagaaggatctgaaagaagccaaggcgcggagccagcagattgcagcccagctgaccacccctcccagctccaattcccgtggcgtccagctcttcaacaggcgccggcagagggtgaacgagttcaccttggagagccacggccagaggggacagaagcccagccaggagtccctcagagtgctcccttcaagcctcccaggccatgcaccggggctcagcctgagttccacctcgctgccggagccaggccctccacggcaccccagtccccagagccccgacagaggggtccctggccacagcatggaggggtactcagaggaggctagcttgctgcggcacctggagaaggtggccagtgaggaggaagaggtaccactggtggtttatctaaaggagaatgcagcactgctgacagccaatgggctgcacctgtcccaaaaccgagaggcccagcagtcctcaccggccccacctccagctgaggtccacagcccagctgcagatgtcaaccaaaaccttgcctcgcccagtgccacgctcaccacaccaacttctaacagcagccacaatccgccagccaccgatgtcaatcagaacccaccggcaactgttgtcccacagagcctgccactttctagcatccaacagaattcctcagaggcccaactcccatctaatggcacagggcctgcttccaaacccagcaccctgtgtgctgatgggcaaccccaggcaccggctgaggaggtgagatgcagcacactcctaattgacaaggtatcaactccagctaccaccaccagcaccttctccagagaagctacgctcatccccagctccaggcccccagcctcagatttcatgtccagctccctgctcattgacatccagcccaacaccctagtggtgtcagcagatcaagagatgtctgggcgagcagctgccaccacgcccaccaaggtctacagtgaggtccacttcacactggccaagcccccatcagtggtcaacaggacggccaggccttttgggatccaggcgccagggggcaccagccagatggagaggagccccatgctagagagacgacattttggggagaaggccccggctccccagccccccagtttgccagacaggagcccccggccacagagacacataatgtcccgcagccccatggtggaaaggaggatgatggggcagcgaagcccggcctcagagagacgccccttggggaacttcactgcaccccccacctacactgagaccttgtccacagcccctctggcttcctgggtgaggtctcctccctcatattctgtcctgtatcccagctccgaccccaagtcttctcatctgaagggccaggcggttcctgccagcaagacgggcattctggaggagtcgatggcccgccggggcagccgcaaatccatgtttactttcgtggagaagcccaaggtgaccccgaatccagacttgctggatctggtacagacagcggatgagaagcggcggcagagggaccagggggaggtaggcgtggaggaggagcccttcgcactgggggccgaggcctccaacttccagcaggagccagcacctcgtgacagggccagccccgcggcggcggaggaggtggtaccagagtgggcctcctgcctcaagtcaccccgcatccaggccaagccgaagcccaaacccaaccagaacctctccgaggcctctgggaagggagctgagctctacgcccgccgccagtcacggatggagaaatatgtcatcgagtcttcaagccacacgccagagctggcccgctgcccatcacctaccatgtccctgccttcctcctggaaataccccactaacgcccccggggccttccgagtggcatcccgaagcccagcccggaccccgcctgcctccctctaccatggctacctgcctgagaacggggtcctgcgcccagagcccaccaagcagccgccataccagctgcgcccctcgctctttgtcctctcacctatcaaggagcctgccaaggtctcaccaagagctgcctcgcccgccaagcccagctccttggacctggtgcccaacctgcccaagggggctctccctccatctcctgccctgcctcggccctcgcgctcctcaccgggcctctacacctcccccggccaggacagcctgcagcccactgccgtgagccctccttacggcggtgacatctcccccgtgtctccctccagggcgtggtctccccgagccaagcaggcccccaggccctccttctctacccggaacgccgggatcgaggctcaggaccgccgggagagcctgcccacctccccaccctggacgccgggcgcgtcccggccccccagcagcctagacggctgggtgagcccgggcccgtgggagccaggtcgcgggagcagcatgagcagccccccgccgctgccgccgccaccgcccatgtctccctcgtggagcgagcgctcggtgtccccgctgcgacctgagaccgaggcgcggccccccagccgccagctgcaggcgcttctggcgcgaaacatcatcaatgcggcccggcgcaagagcgcctccccgcggtcggcgggcgccgagaacccgcggcccttctccccgccgagggcgccaccgcccccgcccccgcccccgcccccgcccccgcgcatgcgctcgccacagcccgcccgccccggctcggctgctgtgccgggggcagccttcgcgcccatcccgcggagcccgttgcccgccggtccttcgtcctgcaccagtccccggagcccgctgcccgcgcctcccaggcccttcctctaccgccgctcgcccacggactccgacgtgtccctcgactccgaggactccggggctaagtctccaggcatcctgggctacaatatctgtccccgcgggtggaatggcagccttcggctcaagcgtggcagcctccccgccgaggcctcctgcaccacctagagccccacccccgaccccaccccgggagggcagagccagaagaaggctcattagacctgggggacccaaagggtctggcctctttgggcagccccagagatgaggggtcagcagaggagagctctggggttggggatgggttagggacgcaagcttgagttctagcccttgctctcattcagctgttgtgtgaccctgggtaagacccttccttgtttgaccctcagctttcccatctgtttaatggtggctttggccaaggcaatccacaaacgtcaaaattccccttcccatcagtacacacaccgatgcacacacactctctctttctctctctctctctctcactcacacacacacacacacacacacacacacacacacactagttagtgccttggatgaggcggggcagtgtgtatatggacccctggacttgctaccttcagggttccatactcgtccctcccctcctggctctgctgtctggagtctggcaagcggggtgtgttcagaaggtcctaggcctgtgtcgcatgtccaggcactggcctgaccatccggctccctggcaccaagtcccaggcaggagcagctgttttccatcccttcccagacaagctctatttttatcacaatgacctttagagaggtctcccaggccagctcaaggtgtcccactatcccctctggagggaagaggcaggaaaattctccccgggtccctgtcatgctactttctccatcccagttcagactgtccaggacatcttatctgcagccataagagaattataaggcagtgatttcccttaggcccaggacttgggcctccagctcatctgttccttctgggcccattcatggcaggttctgggctcaaagctgaactggggagagaagagatacagagctaccatgtgactttacctgattgccctcagtttggggttgcttattgggaaagagagagacaaagagttacttgttacgggaaatatgaaaagcatggccaggatgcatagaggagattctagcaggggacaggattggctcagatgacccctgagggctcttccagtcttgaaatgcattccatgatattaggaagtcgggggtgggtggtggtggtgggctagttgggcttgaatttaggggccgatgagcttgggtacgtgagcagggtgttaagttagggtctgcctgtatttctggtccccttggaaatgtccccttcttcagtgtcagacctcagtcccagtgtccatatcgtgcccagaaaagtagacattatcctgccccatcccttccccagtgcactctgacctagctagtgcctggtgcccagtgacctgggggagcctggctgcaggccctcactggttccctaaaccttggtggctgtgattcaggtccccaggggggactcagggaggaatatggctgagttctgtagtttccagagttggctggtagagccttctagaggttcagaatattagcttcaggatcagctgggggtatggaattggctgaggatcaaacgtatgtaggtgaaaggataccaggatgttgctaaaggtgagggacagtttgggtttgggacttaccggggtgatgttagatctggaacccccaagtgaggctggagggagttaaggtcagtatggaagatagggttgggacagggtgctttggaatgaaagagtgaccttagagggctccttgggcctcaggaatgctcctgctgctgtgaagatgagaaggtgctcttactcagttaatgatgagtgactatatttaccaaagcccctacctgctgctgggtcccttgtagcacaggagactggggctaagggcccctcccagggaagggacaccatcaggcctctggctgaggcagtagcatagaggatccatttctacctgcatttcccagaggactagcaggaggcagccttgagaaaccggcagttcccaagccagcgcctggctgttctctcattgtcactgccctctccccaacctctcctctaacccactagagattgcctgtgtcctgcctcttgcctcttgtagaatgcagctctggccctcaataaatgcttcctgcattcttctgcctcctgtgtcattttcagctgtgtctgatgtccttcccttctccccaagcatggagcagtccatgggactctgggtggctgggaatatttgagacatatgggatgggagcttgggaagaagcagccatggggagagatgggaacaacggacaacttgaggccatagaagtacctggactgcagtcctggtcctgtcatggac

SEQ ID NO: 312425 - DNA, 5830 bp, Homo sapiens
  misc_feature (5351)..(5351): n is a, c, g, or t
  misc_feature (5365)..(5365): n is a, c, g, or t
  misc_feature (5377)..(5377): n is a, c, g, or t
agtcatctgtggaggagaaaagtcacatccagctccttcatgttgctgccgatgtgggattttcctggcttcgtcagccaagcaattggctgcctttgccggaggctttgagaaccaaggcttgaaggccggcaggagcatccagggggaagcttggcttcagggaggacctagcagacgttgggccggagcactagcctcacggagaaggatctgaaagaagccaaggcgcggagccagcagattgcagcccagctgaccacccctcccagctccaattcccgtggcgtccagctcttcaacaggcgccggcagagggtgaacgagttcaccttggagagccacggccagaggggacagaagcccagccaggagtccctcagagtgctcccttcaagcctcccaggccatgcaccggggctcagcctgagttccacctcgctgccggagccaggccctccacggcaccccagtccccagagccccgacagaggggtccctggccacagcatggaggggtactcagaggaggctagcttgctgcggcacctggagaaggtggccagtgaggaggaagaggtaccactggtggtttatctaaaggagaatgcagcactgctgacagccaatgggctgcacctgtcccaaaaccgagaggcccagcagtcctcaccggccccacctccagctgaggtccacagcccagctgcagatgtcaaccaaaaccttgcctcgcccagtgccacgctcaccacaccaacttctaacagcagccacaatccgccagccaccgatgtcaatcagaacccaccggcaactgttgtcccacagagcctgccactttctagcatccaacagaattcctcagaggcccaactcccatctaatggcacagggcctgcttccaaacccagcaccctgtgtgctgatgggcaaccccaggcaccggctgaggaggtgagatgcagcacactcctaattgacaaggtatcaactccagctaccaccaccagcaccttctccagagaagctacgctcatccccagctccaggcccccagcctcagatttcatgtccagctccctgctcattgacatccagcccaacaccctagtggtgtcagcagatcaagagatgtctgggcgagcagctgccaccacgcccaccaaggtctacagtgaggtccacttcacactggccaagcccccatcagtggtcaacaggacggccaggccttttgggatccaggcgccagggggcaccagccagatggagaggagccccatgctagagagacgacattttggggagaaggccccggctccccagccccccagtttgccagacaggagcccccggccacagagacacataatgtcccgcagccccatggtggaaaggaggatgatggggcagcgaagcccggcctcagagagacgccccttggggaacttcactgcaccccccacctacactgagaccttgtccacagcccctctggcttcctgggtgaggtctcctccctcatattctgtcctgtatcccagctccgaccccaagtcttctcatctgaagggccaggcggttcctgccagcaagacgggcattctggaggagtcgatggcccgccggggcagccgcaaatccatgtttactttcgtggagaagcccaaggtgaccccgaatccagacttgctggatctggtacagacagcggatgagaagcggcggcagagggaccagggggaggtaggcgtggaggaggagcccttcgcactgggggccgaggcctccaacttccagcaggagccagcacctcgtgacagggccagccccgcggcggcggaggaggtggtaccagagtgggcctcctgcctcaagtcaccccgcatccaggccaagccgaagcccaaacccaaccagaacctctccgaggcctctgggaagggagctgagctctacgcccgccgccagtcacggatggagaaatatgtcatcgagtcttcaagccacacgccagagctggcccgctgcccatcacctaccatgtccctgccttcctcctggaaataccccactaacgcccccggggccttccgagtggcatcccgaagcccagcccggaccccgcctgcctccctctaccatggctacctgcctgagaacggggtcctgcgcccagagcccaccaagcagccgccataccagctgcgcccctcgctctttgtcctctcacctatcaaggagcctgccaaggtctcaccaagagctgcctcgcccgccaagcccagctccttggacctggtgcccaacctgcccaagggggctctccctccatctcctgccctgcctcggccctcgcgctcctcaccgggcctctacacctcccccggccaggacagcctgcagcccactgccgtgagccctccttacggcggtgacatctcccccgtgtctccctccagggcgtggtctccccgagccaagcaggcccccaggccctccttctctacccggaacgccgggatcgaggctcaggaccgccgggagagcctgcccacctccccaccctggacgccgggcgcgtcccggccccccagcagcctagacggctgggtgagcccgggcccgtgggagccaggtcgcgggagcagcatgagcagccccccgccgctgccgccgccaccgcccatgtctccctcgtggagcgagcgctcggtgtccccgctgcgacctgagaccgaggcgcggccccccagccgccagctgcaggcgcttctggcgcgaaacatcatcaatgcggcccggcgcaagagcgcctccccgcggtcggcgggcgccgagaacccgcggcccttctccccgccgagggcgccaccgcccccgcccccgcccccgcccccgcccccgcgcatgcgctcgccacagcccgcccgccccggctcggctgctgtgccgggggcagccttcgcgcccatcccgcggagcccgttgcccgccggtccttcgtcctgcaccagtccccggagcccgctgcccgcgcctcccaggcccttcctctaccgccgctcgcccacggactccgacgtgtccctcgactccgaggactccggggctaagtctccaggcatcctgggctacaatatctgtccccgcgggtggaatggcagccttcggctcaagcgtggcagcctccccgccgaggcctcctgcaccacctagagccccacccccgaccccaccccgggagggcagagccagaagaaggctcattagacctgggggacccaaagggtctggcctctttgggcagccccagagatgaggggtcagcagaggagagctctggggttggggatgggttagggacgcaagcttgagttctagcccttgctctcattcagctgttgtgtgaccctgggtaagacccttccttgtttgaccctcagctttcccatctgtttaatggtggctttggccaaggcaatccacaaacgtcaaaattccccttcccatcagtacacacaccgatgcacacacactctctctttctctctctctctctctcactcacacacacacacacacacacacacacacacacacactagttagtgccttggatgaggcggggcagtgtgtatatggacccctggacttgctaccttcagggttccatactcgtccctcccctcctggctctgctgtctggagtctggcaagcggggtgtgttcagaaggtcctaggcctgtgtcgcatgtccaggcactggcctgaccatccggctccctggcaccaagtcccaggcaggagcagctgttttccatcccttcccagacaagctctatttttatcacaatgacctttagagaggtctcccaggccagctcaaggtgtcccactatcccctctggagggaagaggcaggaaaattctccccgggtccctgtcatgctactttctccatcccagttcagactgtccaggacatcttatctgcagccataagagaattataaggcagtgatttcccttaggcccaggacttgggcctccagctcatctgttccttctgggcccattcatggcaggttctgggctcaaagctgaactggggagagaagagatacagagctaccatgtgactttacctgattgccctcagtttggggttgcttattgggaaagagagagacaaagagttacttgttacgggaaatatgaaaagcatggccaggatgcatagaggagattctagcaggggacaggattggctcagatgacccctgagggctcttccagtcttgaaatgcattccatgatattaggaagtcgggggtgggtggtggtggtgggctagttgggcttgaatttaggggccgatgagcttgggtacgtgagcagggtgttaagttagggtctgcctgtatttctggtccccttggaaatgtccccttcttcagtgtcagacctcagtcccagtgtccatatcgtgcccagaaaagtagacattatcctgccccatcccttccccagtgcactctgacctagctagtgcctggtgcccagtgacctgggggagcctggctgcaggccctcactggttccctaaaccttggtggctgtgattcaggtccccaggggggactcagggaggaatatggctgagttctgtagtttccagagttggctggtagagccttctagaggttcagaatattagcttcaggatcagctgggggtatggaattggctgaggatcaaacgtatgtaggtgaaaggataccaggatgttgctaaaggtgagggacagtttgggtttgggacttaccggggtgatgttagatctggaacccccaagtgaggctggagggagttaaggtcagtatggaagatagggttgggacagggtgctttggaatgaaagagtgaccttagagggctccttgggcctcaggaatgctcctgctgctgtgaagatgagaaggtgctcttactcagttaatgatgagtgactatatttaccaaagcccctacctgctgctgggtcccttgtagcacaggagactggggctaagggcccctcccagggaagggacaccatcaggcctctggctgaggcagtagcatagaggatccatttctacctgcatttcccagaggactagcaggaggcagccttgagaaaccggcagttcccaagccagcgcctggctgttctctcattgtcactgccctctccccaacctctcctctaacccactagagattgcctgtgtcctgcctcttgcctcttgtagaatgcagctctggccctcaataaatgcttcctgcaaaaaaaaaaaaaaanaaaaaaaaaaaaanaaaaaaaaaaanaaaaaaaaaaaaacaaaaaacaaaaaaaaagaaaaaaaaaaaaaaaaagagagagagggcgacgcaggacgcacaaaaaaaaaacacgagaggagagagcacgcaccacaggggaggaggggggcaccaccatctcgacaagcgagggcgcgcccacaacatacaaagcgcggccaagcactacaatataatacggacgaggagcggccgcagcccagcccccacaaaaaagacagagcaggggatgcgaaaaagatcgggaagcaacacacgcgcgccgcgcggcggcgcgcacaccactcggagcagaagcgacgccacccaccacaccgccgcgcgggcgggcggaccgacacacctagctggcggtgagaacaaacgagcaccgcacgaacccgacgaaagaatagtgggacgacctacgcagccgggagcgacgcagaacccaccacc

SEQ ID NO: 312426 - DNA, 5390 bp, Homo sapiens
aacgggctgatgcggttggagcgttgggccggagcactagcctcacggagaaggatctgaaagaagccaaggcgcggagccagcagattgcagcccagctgaccacccctcccagctccaattcccgtggcgtccagctcttcaacaggcgccggcagagggtgaacgagttcaccttggagagccacggccagaggggacagaagcccagccaggagtccctcagagtgctcccttcaagcctcccaggccatgcaccggggctcagcctgagttccacctcgctgccggagccaggccctccacggcaccccagtccccagagccccgacagaggggtccctggccacagcatggaggggtactcagaggaggctagcttgctgcggcacctggagaaggtggccagtgaggaggaagaggtaccactggtggtttatctaaaggagaatgcagcactgctgacagccaatgggctgcacctgtcccaaaaccgagaggcccagcagtcctcaccggccccacctccagctgaggtccacagcccagctgcagatgtcaaccaaaaccttgcctcgcccagtgccacgctcaccacaccaacttctaacagcagccacaatccgccagccaccgatgtcaatcagaacccaccggcaactgttgtcccacagagcctgccactttctagcatccaacagaattcctcagaggcccaactcccatctaatggcacagggcctgcttccaaacccagcaccctgtgtgctgatgggcaaccccaggcaccggctgaggaggtgagatgcagcacactcctaattgacaaggtatcaactccagctaccaccaccagcaccttctccagagaagctacgctcatccccagctccaggcccccagcctcagatttcatgtccagctccctgctcattgacatccagcccaacaccctagtggtgtcagcagatcaagagatgtctgggcgagcagctgccaccacgcccaccaaggtctacagtgaggtccacttcacactggccaagcccccatcagtggtcaacaggacggccaggccttttgggatccaggcgccagggggcaccagccagatggagaggagccccatgctagagagacgacattttggggagaaggccccggctccccagccccccagtttgccagacaggagcccccggccacagagacacataatgtcccgcagccccatggtggaaaggaggatgatggggcagcgaagcccggcctcagagagacgccccttggggaacttcactgcaccccccacctacactgagaccttgtccacagcccctctggcttcctgggtgaggtctcctccctcatattctgtcctgtatcccagctccgaccccaagtcttctcatctgaagggccaggcggttcctgccagcaagacgggcattctggaggagtcgatggcccgccggggcagccgcaaatccatgtttactttcgtggagaagcccaaggtgaccccgaatccagacttgctggatctggtacagacagcggatgagaagcggcggcagagggaccagggggaggtaggcgtggaggaggagcccttcgcactgggggccgaggcctccaacttccagcaggagccagcacctcgtgacagggccagccccgcggcggcggaggaggtggtaccagagtgggcctcctgcctcaagtcaccccgcatccaggccaagccgaagcccaaacccaaccagaacctctccgaggcctctgggaagggagctgagctctacgcccgccgccagtcacggatggagaaatatgtcatcgagtcttcaagccacacgccagagctggcccgctgcccatcacctaccatgtccctgccttcctcctggaaataccccactaacgcccccggggccttccgagtggcatcccgaagcccagcccggaccccgcctgcctccctctaccatggctacctgcctgagaacggggtcctgcgcccagagcccaccaagcagccgccataccagctgcgcccctcgctctttgtcctctcacctatcaaggagcctgccaaggtctcaccaagagctgcctcgcccgccaagcccagctccttggacctggtgcccaacctgcccaagggggctctccctccatctcctgccctgcctcggccctcgcgctcctcaccgggcctctacacctcccccggccaggacagcctgcagcccactgccgtgagccctccttacggcggtgacatctcccccgtgtctccctccagggcgtggtctccccgagccaagcaggcccccaggccctccttctctacccggaacgccgggatcgaggctcaggaccgccgggagagcctgcccacctccccaccctggacgccgggcgcgtcccggccccccagcagcctagacggctgggtgagcccgggcccgtgggagccaggtcgcgggagcagcatgagcagccccccgccgctgccgccgccaccgcccatgtctccctcgtggagcgagcgctcggtgtccccgctgcgacctgagaccgaggcgcggccccccagccgccagctgcaggcgcttctggcgcgaaacatcatcaatgcggcccggcgcaagagcgcctccccgcggtcggcgggcgccgagaacccgcggcccttctccccgccgagggcgccaccgcccccgcccccgcccccgcccccgcccccgcgcatgcgctcgccacagcccgcccgccccggctcggctgctgtgccgggggcagccttcgcgcccatcccgcggagcccgttgcccgccggtccttcgtcctgcaccagtccccggagcccgctgcccgcgcctcccaggcccttcctctaccgccgctcgcccacggactccgacgtgtccctcgactccgaggactccggggctaagtctccaggcatcctgggctacaatatctgtccccgcgggtggaatggcagccttcggctcaagcgtggcagcctccccgccgaggcctcctgcaccacctagagccccacccccgaccccaccccgggagggcagagccagaagaaggctcattagacctgggggacccaaagggtctggcctctttgggcagccccagagatgaggggtcagcagaggagagctctggggttggggatgggttagggacgcaagcttgagttctagcccttgctctcattcagctgttgtgtgaccctgggtaagacccttccttgtttgaccctcagctttcccatctgtttaatggtggctttggccaaggcaatccacaaacgtcaaaattccccttcccatcagtacacacaccgatgcacacacactctctctttctctctctctctctctcactcacacacacacacacacacacacacacacacacacactagttagtgccttggatgaggcggggcagtgtgtatatggacccctggacttgctaccttcagggttccatactcgtccctcccctcctggctctgctgtctggagtctggcaagcggggtgtgttcagaaggtcctaggcctgtgtcgcatgtccaggcactggcctgaccatccggctccctggcaccaagtcccaggcaggagcagctgttttccatcccttcccagacaagctctatttttatcacaatgacctttagagaggtctcccaggccagctcaaggtgtcccactatcccctctggagggaagaggcaggaaaattctccccgggtccctgtcatgctactttctccatcccagttcagactgtccaggacatcttatctgcagccataagagaattataaggcagtgatttcccttaggcccaggacttgggcctccagctcatctgttccttctgggcccattcatggcaggttctgggctcaaagctgaactggggagagaagagatacagagctaccatgtgactttacctgattgccctcagtttggggttgcttattgggaaagagagagacaaagagttacttgttacgggaaatatgaaaagcatggccaggatgcatagaggagattctagcaggggacaggattggctcagatgacccctgagggctcttccagtcttgaaatgcattccatgatattaggaagtcgggggtgggtggtggtggtgggctagttgggcttgaatttaggggccgatgagcttgggtacgtgagcagggtgttaagttagggtctgcctgtatttctggtccccttggaaatgtccccttcttcagtgtcagacctcagtcccagtgtccatatcgtgcccagaaaagtagacattatcctgccccatcccttccccagtgcactctgacctagctagtgcctggtgcccagtgacctgggggagcctggctgcaggccctcactggttccctaaaccttggtggctgtgattcaggtccccaggggggactcagggaggaatatggctgagttctgtagtttccagagttggctggtagagccttctagaggttcagaatattagcttcaggatcagctgggggtatggaattggctgaggatcaaacgtatgtaggtgaaaggataccaggatgttgctaaaggtgagggacagtttgggtttgggacttaccggggtgatgttagatctggaacccccaagtgaggctggagggagttaaggtcagtatggaagatagggttgggacagggtgctttggaatgaaagagtgaccttagagggctccttgggcctcaggaatgctcctgctgctgtgaagatgagaaggtgctcttactcagttaatgatgagtgactatatttaccaaagcccctacctgctgctgggtcccttgtagcacaggagactggggctaagggcccctcccagggaagggacaccatcaggcctctggctgaggcagtagcatagaggatccatttctacctgcatttcccagaggactagcaggaggcagccttgagaaaccggcagttcccaagccagcgcctggctgttctctcattgtcactgccctctccccaacctctcctctaacccactagagattgcctgtgtcctgcctcttgcctcttgtagaatgcagctctggccctcaataaatgcttcctgcattcttctgcctcctgtgtcattttcagctgtgtctgatgtccttcccttctccccaagcatggagcagtccatgggactctgggtggctgggaatatttgagacatatgggatgggagcttgggaagaagcagccatggggagagatgggaacaacggacaacttgaggccatagaagtacctggactgcagtcctggtcctgtcatggac

SEQ ID NO: 312427 - DNA, 5351 bp, Homo sapiens
agtcatctgtggaggagaaaagtcacatccagctccttcatgttgctgccgatgtgggattttcctggcttcgtcagccaagcaattggctgcctttgccggaggctttgagaaccaaggcttgaaggccggcaggagcatccagggggaagcttggcttcagggaggacctagcagacgttgggccggagcactagcctcacggagaaggatctgaaagaagccaaggcgcggagccagcagattgcagcccagctgaccacccctcccagctccaattcccgtggcgtccagctcttcaacaggcgccggcagagggtgaacgagttcaccttggagagccacggccagaggggacagaagcccagccaggagtccctcagagtgctcccttcaagcctcccaggccatgcaccggggctcagcctgagttccacctcgctgccggagccaggccctccacggcaccccagtccccagagccccgacagaggggtccctggccacagcatggaggggtactcagaggaggctagcttgctgcggcacctggagaaggtggccagtgaggaggaagaggtaccactggtggtttatctaaaggagaatgcagcactgctgacagccaatgggctgcacctgtcccaaaaccgagaggcccagcagtcctcaccggccccacctccagctgaggtccacagcccagctgcagatgtcaaccaaaaccttgcctcgcccagtgccacgctcaccacaccaacttctaacagcagccacaatccgccagccaccgatgtcaatcagaacccaccggcaactgttgtcccacagagcctgccactttctagcatccaacagaattcctcagaggcccaactcccatctaatggcacagggcctgcttccaaacccagcaccctgtgtgctgatgggcaaccccaggcaccggctgaggaggtgagatgcagcacactcctaattgacaaggtatcaactccagctaccaccaccagcaccttctccagagaagctacgctcatccccagctccaggcccccagcctcagatttcatgtccagctccctgctcattgacatccagcccaacaccctagtggtgtcagcagatcaagagatgtctgggcgagcagctgccaccacgcccaccaaggtctacagtgaggtccacttcacactggccaagcccccatcagtggtcaacaggacggccaggccttttgggatccaggcgccagggggcaccagccagatggagaggagccccatgctagagagacgacattttggggagaaggccccggctccccagccccccagtttgccagacaggagcccccggccacagagacacataatgtcccgcagccccatggtggaaaggaggatgatggggcagcgaagcccggcctcagagagacgccccttggggaacttcactgcaccccccacctacactgagaccttgtccacagcccctctggcttcctgggtgaggtctcctccctcatattctgtcctgtatcccagctccgaccccaagtcttctcatctgaagggccaggcggttcctgccagcaagacgggcattctggaggagtcgatggcccgccggggcagccgcaaatccatgtttactttcgtggagaagcccaaggtgaccccgaatccagacttgctggatctggtacagacagcggatgagaagcggcggcagagggaccagggggaggtaggcgtggaggaggagcccttcgcactgggggccgaggcctccaacttccagcaggagccagcacctcgtgacagggccagccccgcggcggcggaggaggtggtaccagagtgggcctcctgcctcaagtcaccccgcatccaggccaagccgaagcccaaacccaaccagaacctctccgaggcctctgggaagggagctgagctctacgcccgccgccagtcacggatggagaaatatgtcatcgagtcttcaagccacacgccagagctggcccgctgcccatcacctaccatgtccctgccttcctcctggaaataccccactaacgcccccggggccttccgagtggcatcccgaagcccagcccggaccccgcctgcctccctctaccatggctacctgcctgagaacggggtcctgcgcccagagcccaccaagcagccgccataccagctgcgcccctcgctctttgtcctctcacctatcaaggagcctgccaaggtctcaccaagagctgcctcgcccgccaagcccagctccttggacctggtgcccaacctgcccaagggggctctccctccatctcctgccctgcctcggccctcgcgctcctcaccgggcctctacacctcccccggccaggacagcctgcagcccactgccgtgagccctccttacggcggtgacatctcccccgtgtctccctccagggcgtggtctccccgagccaagcaggcccccaggccctccttctctacccggaacgccgggatcgaggctcaggaccgccgggagagcctgcccacctccccaccctggacgccgggcgcgtcccggccccccagcagcctagacggctgggtgagcccgggcccgtgggagccaggtcgcgggagcagcatgagcagccccccgccgctgccgccgccaccgcccatgtctccctcgtggagcgagcgctcggtgtccccgctgcgacctgagaccgaggcgcggccccccagccgccagctgcaggcgcttctggcgcgaaacatcatcaatgcggcccggcgcaagagcgcctccccgcggtcggcgggcgccgagaacccgcggcccttctccccgccgagggcgccaccgcccccgcccccgcccccgcccccgcccccgcgcatgcgctcgccacagcccgcccgccccggctcggctgctgtgccgggggcagccttcgcgcccatcccgcggagcccgttgcccgccggtccttcgtcctgcaccagtccccggagcccgctgcccgcgcctcccaggcccttcctctaccgccgctcgcccacggactccgacgtgtccctcgactccgaggactccggggctaagtctccaggcatcctgggctacaatatctgtccccgcgggtggaatggcagccttcggctcaagcgtggcagcctccccgccgaggcctcctgcaccacctagagccccacccccgaccccaccccgggagggcagagccagaagaaggctcattagacctgggggacccaaagggtctggcctctttgggcagccccagagatgaggggtcagcagaggagagctctggggttggggatgggttagggacgcaagcttgagttctagcccttgctctcattcagctgttgtgtgaccctgggtaagacccttccttgtttgaccctcagctttcccatctgtttaatggtggctttggccaaggcaatccacaaacgtcaaaattccccttcccatcagtacacacaccgatgcacacacactctctctttctctctctctctctctcactcacacacacacacacacacacacacacacacacacactagttagtgccttggatgaggcggggcagtgtgtatatggacccctggacttgctaccttcagggttccatactcgtccctcccctcctggctctgctgtctggagtctggcaagcggggtgtgttcagaaggtcctaggcctgtgtcgcatgtccaggcactggcctgaccatccggctccctggcaccaagtcccaggcaggagcagctgttttccatcccttcccagacaagctctatttttatcacaatgacctttagagaggtctcccaggccagctcaaggtgtcccactatcccctctggagggaagaggcaggaaaattctccccgggtccctgtcatgctactttctccatcccagttcagactgtccaggacatcttatctgcagccataagagaattataaggcagtgatttcccttaggcccaggacttgggcctccagctcatctgttccttctgggcccattcatggcaggttctgggctcaaagctgaactggggagagaagagatacagagctaccatgtgactttacctgattgccctcagtttggggttgcttattgggaaagagagagacaaagagttacttgttacgggaaatatgaaaagcatggccaggatgcatagaggagattctagcaggggacaggattggctcagatgacccctgagggctcttccagtcttgaaatgcattccatgatattaggaagtcgggggtgggtggtggtggtgggctagttgggcttgaatttaggggccgatgagcttgggtacgtgagcagggtgttaagttagggtctgcctgtatttctggtccccttggaaatgtccccttcttcagtgtcagacctcagtcccagtgtccatatcgtgcccagaaaagtagacattatcctgccccatcccttccccagtgcactctgacctagctagtgcctggtgcccagtgacctgggggagcctggctgcaggccctcactggttccctaaaccttggtggctgtgattcaggtccccaggggggactcagggaggaatatggctgagttctgtagtttccagagttggctggtagagccttctagaggttcagaatattagcttcaggatcagctgggggtatggaattggctgaggatcaaacgtatgtaggtgaaaggataccaggatgttgctaaaggtgagggacagtttgggtttgggacttaccggggtgatgttagatctggaacccccaagtgaggctggagggagttaaggtcagtatggaagatagggttgggacagggtgctttggaatgaaagagtgaccttagagggctccttgggcctcaggaatgctcctgctgctgtgaagatgagaaggtgctcttactcagttaatgatgagtgactatatttaccaaagcccctacctgctgctgggtcccttgtagcacaggagactggggctaagggcccctcccagggaagggacaccatcaggcctctggctgaggcagtagcatagaggatccatttctacctgcatttcccagaggactagcaggaggcagccttgagaaaccggcagttcccaagccagcgcctggctgttctctcattgtcactgccctctccccaacctctcctctaacccactagagattgcctgtgtcctgcctcttgcctcttgtagaatgcagctctggcccacatcgaaggatcctctaatcaacctcaccaaca

SEQ ID NO: 312428 - DNA, 3987 bp, Homo sapiens
agtcatctgtggaggagaaaagtcacatccagctccttcatgttgctgccgatgtgggattttcctggcttcgtcagccaagcaattggctgcctttgccggaggctttgagaaccaaggcttgaaggccggcaggagcatccagggggaagcttggcttcagggaggacctagcagacgttgggccggagcactagcctcacggagaaggatctgaaagaagccaaggcgcggagccagcagattgcagcccagctgaccacccctcccagctccaattcccgtggcgtccagctcttcaacaggcgccggcagagggtgaacgagttcaccttggagagccacggccagaggggacagaagcccagccaggagtccctcagagtgctcccttcaagcctcccaggccatgcaccggggctcagcctgagttccacctcgctgccggagccaggccctccacggcaccccagtccccagagccccgacagaggggtccctggccacagcatggaggggtactcagaggaggctagcttgctgcggcacctggagaaggtggccagtgaggaggaagaggtaccactggtggtttatctaaaggagaatgcagcactgctgacagccaatgggctgcacctgtcccaaaaccgagaggcccagcagtcctcaccggccccacctccagctgaggtccacagcccagctgcagatgtcaaccaaaaccttgcctcgcccagtgccacgctcaccacaccaacttctaacagcagccacaatccgccagccaccgatgtcaatcagaacccaccggcaactgttgtcccacagagcctgccactttctagcatccaacagaattcctcagaggcccaactcccatctaatggcacagggcctgcttccaaacccagcaccctgtgtgctgatgggcaaccccaggcaccggctgaggaggtgagatgcagcacactcctaattgacaaggtatcaactccagctaccaccaccagcaccttctccagagaagctacgctcatccccagctccaggcccccagcctcagatttcatgtccagctccctgctcattgacatccagcccaacaccctagtggtgtcagcagatcaagagatgtctgggcgagcagctgccaccacgcccaccaaggtctacagtgaggtccacttcacactggccaagcccccatcagtggtcaacaggacggccaggccttttgggatccaggcgccagggggcaccagccagatggagaggagccccatgctagagagacgacattttggggagaaggccccggctccccagccccccagtttgccagacaggagcccccggccacagagacacataatgtcccgcagccccatggtggaaaggaggatgatggggcagcgaagcccggcctcagagagacgccccttggggaacttcactgcaccccccacctacactgagaccttgtccacagcccctctggcttcctgggtgaggtctcctccctcatattctctgcctccctctaccatggctacctgcctgagaacggggtcctgcgcccagagcccaccaagcagccgccataccagctgcgcccctcgctctttgtcctctcacctatcaaggagcctgccaaggtctcaccaagagctgcctcgcccgccaagcccagctccttggacctggtgcccaacctgcccaagggggctctccctccatctcctgccctgcctcggccctcgcgctcctcaccgggcctctacacctcccccggccaggacagcctgcagcccactgccgtgagccctccttacggcggtgacatctcccccgtgtctccctccagggcgtggtctccccgagccaagcaggcccccaggccctccttctctacccggaacgccgggatcgaggctcaggtgtggaagccttccttctgcttcaagtaacgaaccccacgggggtcccactgccggtcaagttcccctccttgagggccagatggagagcagatgtggcaggaaatggcacagagctgagtgaggagaatggggagtccatggttcaaggtcagatgcggccaccagctggctttgtgaccttgggcgagtcgcctcccctctctgagctgaagccgcccctcccctactacaacaggggtcggactccatgtctgagcggggaggagggtcatggagagagaactgtctggcagccctgatgcggtagaggggcatcctctggcctttgtgagctgtagggatgcagagtctgatgccagcgtcttgctgggggagtggcctagaaggggatcctaacagggacttctggagcagacagagcctgccagtgcctgtggagtcagccagccgagggtctgcctcctcagctgccccaggggggcctccctcctgaggctcaagctcctggcgtctttcttcctgttgctggattctcacctccatgggcctgtctcttctgcctctgccttctggacaccgtttcctctccgctgcttcagagagctttgcctcgcctccgcctgcgctcccctccagggtccttctgctggctgcggactcggcccaccactgctgtctgacgcttttcttcctgccccctctgaggcctggctctgttttagggagatcactgggcccaggcctcagccccagttctacctggcttgctgtcaccgctctaggggtgggggacgtcccaggggatccccaggagaaggagagccctgtagggggctgtgcagatgtgggtgtgccacagggagggtggcccctagccatgtatccattggctgttttggcttcagattcaaccaagatctgcctgactaaaagaagccacctcagcgcagtggaacggggcccagggggaggcaggagaggagggttccggtcccatgtcaccttctcatttgctgtgtgactttggcccactcacattctctttgggcctcagttttatcatttatacaaggagggcttttctagctgtaacaatctgtgaggattgagaggataggctggtgctttgaagaaaggccttgtaagtgacaagacagtcccctgggaagaaagagaaaggaaatgggctattgccaaaggacaggtggcgttagatggctgtgagggtgacctggtgagggaagggttggaatgagctgctgcaggaggccaagggatgcctgggctgggctgggctgggctggcttaggctcaggattgcctggggacagtaggagcatggcaggagctggggcaggtgcatagcagtgcagtgggaagggacagaggagatcttagaattttgaggaaaatctgggacttgagacctggattctaacagaccaactgcatgtgtgtctgtaggtctcagtttccacattcatacagtgagggtgttaagtcaggtagctggagacttcccatcgcctctgacacttttggaggtgatatgatacagcccccgaccaaaccaggctttgtggggggtgagagaatacagacacaagtggcaggattcagatggaagcttcgcaaggctgggggccgaggaccacccacttctctttcccagccctagttctgggttccccagtggggcaaggggtggtggaggcagtgcccatgctgggctgagcctgcagtttttgtgagctctgggcttgtctccatgggaacaggggtgccttcttagtgagctcatttcacacagatcgagggggtatgcgtgggggagttgtgagtgagctcagctccttcaggcctggcctctcccagaacagagtgaagcccctgccctggacccctgctcccttctacccttgagggccaccaatggaagagcccgcccttcattctgcagctcctgcggccaggctgagctctgcccccaactttgttttctctcatgttctcaatacactctgcctcaaatccgtcttgcttc

SEQ ID NO: 312429 - DNA, 1250 bp, Homo sapiens
acccctgggcaggaccctagccctaagcacacaccaccctgtgctgcaaccatgagaaagtgcccatgccttgggctgtccagaagctcaggagtgatcagagggcaccttctctaagaggggaggttcctggctaagggaccatggagtggtgggcagcctgaaggggctgggcacagcccagctttgcgcacactcgcctggtcccatcattccctaccttggcttaaacctaggaggcctggattttgcagttagcctaatcttccagccccaggcgaggctccctggtgaggaatcagctgagccatcaccacgttttggggcctgtatcctcttccctgagccgctgacgcatccagggctctagtctgcacataaattccctctcagctgggcttgtaaaatcccttctcaccccagttagcaaaaatcaagggaagagcctagtttttttaaaagattcacttaatatccaccccccacctcaagcccaagaccgcccattcaaaaaacaagtatacggcacagcaagggagacccactagattttgagcttacagagacataagggtacttaaaaccctgccggcctagtatttgagcttagaacttttatttaaaatgagccggcagtctctagacacacaccgatcctcaggctagtccgagccctgaggtcaagaatgaaatgcacttcccttctcattttctcaaatagatcttttccagccgtctcacagttgaccccaactttggaactcagatcataggatctcccagaggtttcaggtgttcctaagaagcttctaaaggaagttttggaagaaagactaataggtgtaaacatataaacatatatattatatatagctatatatatttaaagagatctctacatatatatatatataaatacaactactgtactctctgcatctgtacaaagtatgagttaaactgcccaggtagtgtgagatacgtaatgcatgaatgtgaatatcctgaaatctgccttcttagcaacgtgccgcgtgtactggagagaggacagttgctcctgggagttctctcaatgggcaaatgtacaagttgatgccgtcttatccaccaacaagccattaaggttggtttcctgctgagacttttgtaccggaagcgagaccggcagcactgggggtgtccatatgccacttatgaggaagaaagcaccatgacttttttattttcaataaaaatatagagatgtc

SEQ ID NO: 312430 - DNA, 305 bp, Homo sapiens
caagtctgtctactttattgcagggcccagaggttcccccaagaccgcctgataataatttggtatttggaggctcctgtgtcactgcaggaactaaaatgttggaatttttactcttgatatccttccagatcaactctctcaatgttcccatcctcaaaactatcatctggggtaactgaggcagtcagagatttactgactcaatgtcactcagttgattctgagttcactgctgattacatctgaccaaactgctttttctgaagtctactctgtttcatcatgctggtgatgattttgtg

SEQ ID NO: 312431 - DNA, 7439 bp, Homo sapiens
aagacggattctcagacaaggcttgcaaatgccccgcagccatcatttaactgcacccgcagaatagttacggtttgtcacccgaccctcccggatcgcctaatttgtccctagtgagaccccgaggctctgcccgcgcctggcttcttcgtagctggatgcatatcgtgctccgggcagcgcgggcgcagggcacgcgttcgcgcacaccctagcacacatgaacacgcgcaagagctgaaccaagcacggtttccatttcaaaaagggagacagcctctaccgcgattgtagaagagactgtggtgtgaattagggaccgggaggcgtcgaacggaggaacggttcatcttagagactaattttctggagtttctgcccctgctctgcgtcagccctcacgtcacttcgccagcagtagcagaggcggcggcggcggctcccggaattgggttggagcaggagcctcgctggctgcttcgctcgcgctctacgcgctcagtccccggcggtagcaggagcctggacccaggcgccgccggcgggcgtgaggcgccggagcccggcctcgaggtgcataccggacccccattcgcatctaacaaggaatctgcgccccagagagtcccgggagcgccgccggtcggtgcccggcgcgccgggccatgcagcgacggccgccgcggagctccgagcagcggtagcgcccccctgtaaagcggttcgctatgccggggccactgtgaaccctgccgcctgccggaacactcttcgctccggaccagctcagcctctgataagctggactcggcacgcccgcaacaagcaccgaggagttaagagagccgcaagcgcagggaaggcctccccgcacgggtgggggaaagcggccggtgcagcgcggggacaggcactcgggctggcactggctgctagggatgtcgtcctggataaggtggcatggacccgccatggcgcggctctggggcttctgctggctggttgtgggcttctggagggccgctttcgcctgtcccacgtcctgcaaatgcagtgcctctcggatctggtgcagcgacccttctcctggcatcgtggcatttccgagattggagcctaacagtgtagatcctgagaacatcaccgaaattttcatcgcaaaccagaaaaggttagaaatcatcaacgaagatgatgttgaagcttatgtgggactgagaaatctgacaattgtggattctggattaaaatttgtggctcataaagcatttctgaaaaacagcaacctgcagcacatcaattttacccgaaacaaactgacgagtttgtctaggaaacatttccgtcaccttgacttgtctgaactgatcctggtgggcaatccatttacatgctcctgtgacattatgtggatcaagactctccaagaggctaaatccagtccagacactcaggatttgtactgcctgaatgaaagcagcaagaatattcccctggcaaacctgcagatacccaattgtggtttgccatctgcaaatctggccgcacctaacctcactgtggaggaaggaaagtctatcacattatcctgtagtgtggcaggtgatccggttcctaatatgtattgggatgttggtaacctggtttccaaacatatgaatgaaacaagccacacacagggctccttaaggataactaacatttcatccgatgacagtgggaagcagatctcttgtgtggcggaaaatcttgtaggagaagatcaagattctgtcaacctcactgtgcattttgcaccaactatcacatttctcgaatctccaacctcagaccaccactggtgcattccattcactgtgaaaggcaaccccaaaccagcgcttcagtggttctataacggggcaatattgaatgagtccaaatacatctgtactaaaatacatgttaccaatcacacggagtaccacggctgcctccagctggataatcccactcacatgaacaatggggactacactctaatagccaagaatgagtatgggaaggatgagaaacagatttctgctcacttcatgggctggcctggaattgacgatggtgcaaacccaaattatcctgatgtaatttatgaagattatggaactgcagcgaatgacatcggggacaccacgaacagaagtaatgaaatcccttccacagacgtcactgataaaaccggtcgggaacatctctcggtctatgctgtggtggtgattgcgtctgtggtgggattttgccttttggtaatgctgtttctgcttaagttggcaagacactccaagtttggcatgaaaggttttgttttgtttcataagatcccactggatgggtagctgaaataaaggaaaagacagagaaaggggctgtggtgcttgttggttgatgctgccatgtaagctggactcctgggactgctgttggcttatcccgggaagtgctgcttatctggggttttctggtagatgtgggcggtgtttggaggctgtactatatgaagcctgcatatactgtgagctgtgattggggaacaccaatgcagaggtaactctcaggcagctaagcagcacctcaagaaaacatgttaaattaatgcttctcttcttacagtagttcaaatacaaaactgaaatgaaatcccattggattgtacttctcttctgaaaagtgtgctttttgaccctactggacatttattgacttaattgcttctgtttattaaaattgacctgcaaagttaaaaaaaaattaaagttgagaacaggtataagtgcacactgaatagtctaatctacatgtaacacatattttagtgtgattttctatactctaatcagcactgaattcagagggtttgactttttcatctataacacagtgactaaaagagttaagggtatatataccatcactttgggacttggtagtattattaaaaggttatttccttcactgtcaataaaagtccaaatgtttagcttaggtctgagagtcaaacaatgttaaggattgtcttaaagttccttagccagcaaaacaaaacaaaacaaaacaaacaaatgaaaaacgtttaaaaagaagaagaagatagtcaatttcagaataactaagagtggaatatatgcatatggtgaaattataaccttgcccttttttatttgccctctgcgatccacctgctttttagaagtctgccgagtgagaaggccacagtatctcatgctgtttgcattacagaactgcagcttttctactctgaaaaggcctgggagcagaatggctggcctgctgtgagcaggagaggagattctaagaaggatagtcccccctacaacatactgtcatactgctgggttttcatgggtaggaaagcttgtcctgaccccagcagcaaagaggtggcaggtcgctaatgaatatatgctttataatgtccttcttcattgctgagagggcagccttagagctgtggatttctgcatcccccctgagtctgacccatggacacctgtttcattcactttagcatcacagtgacctttgtatgctctgttcagtctgtgtcaggcagtatgcttgtcctgaagagaggtttggctatcccccaccccaccccacccaccctgttccttttttatcaggaggacttcagagccaggcctgcagcattttgtttgaaaacacaatcagctctgacagttagacatgcacacagacgccatagctggattggaaacattgatgttttaaaaatttatttttttttggaaatagttgcacaaatgctgcaatttagctttaaggttctatagatttttaactagtccaacacagtcagaaacattgttttgaatcctctgtaaaccaaggcattaatcttaataaaccaggatccatttaggtaccacttgatataaaaaggatatccataatgaatattttatactgcatcctttacattagccactaaatacgttattgcttgatgaagacctttcacagaatcctatggattgcagcatttcacttggctacttcatacccatgccttaaagaggggcagtttctcaaaagcagaaacatgccgccagttctcaagttttcctcctaactccatttgaatgtaagggcagctggcccccaatgtggggaggtccgaacattttctgaattcccattttcttgttcgcggctaaatgacagtttctgtcattacttagattccgatctttcccaaaggtgttgatttacaaagaggccagctaatagcagaaatcatgaccctgaaagagagatgaaattcaagctgtgagccaggcaggagctcagtatggcaaaggttcttgagaatcagccatttggtacaaaaaagatttttaaagcttttatgttataccatggagccatagaaaggctatggattgtttaagaactattttaaagtgttccagacccaaaaaggaaaaataaaaaaaaaggaatatttgtacccaacagctagaaggattgcaaggtagatttttgttttaaaatggagagaagtggacagataaggccatttaatatatcaaagatcagttgacatctcctagggaatgatgaaaacagcaggctattagaaaattatttcatatagttctcgtgttcttttcttttttttaatccctgaagggatgatcagtaacatagcttctcttttctgtactctagaccaccccttttcatcattttgctttttatgtctcccataagaaatgtgctttttagagcttcctaatgcatgtgttgcattattgcagcattagaaaaggagaggtagcatttttgctgaaatcgggcctgtcactctccaataaaggttctggcacttcaatgccaggcaggtctcctaaatgaacagaatgatctgtgtgagccgatgcctgcccttccagaggggccactgtccccagccgcagccaactgtgtcccacaggaatgggagcctaggtttccaaatcttgtgattctttaggagaaacatgaaacctggatttcgtgtgaaatgtcccgattgttaaaaagttggctcaattatttttaaaacattttgtaagccaacaaaagtctgtggggctgccagtttattacttttgtcttaaaacatgatcattgttctctcacggtatccttctgtcttcccgttggcaaattcacttttctttcttcctgacattgccattgagggctttgttaccacaagctaagaaactgagtttaacagcccagttatctgcaacatgtcaattacctttgctcctctcctgtgattcccaccatgctgtgaccctcagctgtctccctttgctgggaattctgcaccaatgtctcccctcaacccattccctggttggtcctactcccgtgtggccagagacatcctagcaaatccttcctcctattatatctgacactaatttcttttcaacagcgctcatgtctcttggcccagtcaggtgctgccaggtttagataggaaagtacatgtcccattttcatgggtgcccttaatgtggtccacgtcctatatcttattatatttactcatggctcaatgggggcctccagagaccctctcaggctgctgagctagactaaggaatgcatccaccgtcatcacatgagacactgactctgtgacgacaaaagtacaaacagtctgaggctaagaaaggttcatctcacaacaggaaaaacaaatctcaacacacattagagataattgattcaggggttttctctcccagtctcccagcagggactgatttcatttctgacccactaggttttctttccagaaataggtagcaaggacaagaactaaacaatcccagccccacccagcaacacagaacacaggagtttgcttttggcttctcactctccaagtaaccctgaattaggcccagaatggctgaggcttggagcatctcctcagacagagcagaggcgacacctcttcaggggtgtgtggagtaaatagctcgaagagctgaagacagaaaaccagtttcacgccaggtgcgagagagagcgtaatggagggaagcccgctttctctctcctcttcttttctctttatttctttagagcacttgacttttttttctctctctctctagtattctaaactgaccccatgaccaactgagaatttatttttgtttcattggttgtttcacagaattagaacacacacgactttttattcctccattgcaaaatggaatcaagatactacacaagacctgtgctttcttcctttgcatgatttacacctccgcctgttttggtgctagctgtctagaacttctctcttggtttgaatctgattccttcacactacactagaagtttatttcatcttgttttgtctagactccagatacagagggacagctggactgaggacaagcaattccatctagcatagggtctctcagggttggtgcatccagccacatgggcagggccagtcacatctagtctatgtccccagagcccttggagttgcgcagcttagctgacttgactccaaggaaattagtacagaagtaaccactctattaagtgtgttctgctatgttcacatgcctgtagtacctgcaaaccatgccaggttcatctaaagacataggggaagattaaggactcttttggacagaccatgaattgaatttgctgccaggtgctgccagactgaatttggctgacagaactcccagcccaggaaagttccatgacaatgactgtcgcagaaggaaatttcccactaaagtcagtccattttcaagttttggtcttcagagacaaaagaacgtcccagccacctgattttgatggtgaggtaactctaagttgaattcaggctagtgttgcagtatagctttggcatgttcatgagtgagcacccagaatgtgttgaaccaacccccacccctaactactgactatgactgcagtgggtttttatggggaaaaaaagtgtgaaaagcaaaaagaaaggaacagagattttttatcacctttattgtaagacagtccatttatgaattgagtataaacacatacaaagtaacaagagattcctaagaaacgcaaatccttgagtttcacgcacttcatgttcaaccatttgctgtaatccagaggcagcctgtgaatcattctcatgccctgttttttttttttttttcctataatgttctgggtttaaaagccatcttttccacattttctgtaaataatggataatcattttaaaaaattttatttttagtgctgttttaacaatgtagatagatcataaatgtacttgctgaattcaatcatttttaacaagccaataaagtttgataattcat

SEQ ID NO: 312432 - DNA, 7442 bp, Homo sapiens
aagacggattctcagacaaggcttgcaaatgccccgcagccatcatttaactgcacccgcagaatagttacggtttgtcacccgaccctcccggatcgcctaatttgtccctagtgagaccccgaggctctgcccgcgcctggcttcttcgtagctggatgcatatcgtgctccgggcagcgcgggcgcagggcacgcgttcgcgcacaccctagcacacatgaacacgcgcaagagctgaaccaagcacggtttccatttcaaaaagggagacagcctctaccgcgattgtagaagagactgtggtgtgaattagggaccgggaggcgtcgaacggaggaacggttcatcttagagactaattttctggagtttctgcccctgctctgcgtcagccctcacgtcacttcgccagcagtagcagaggcggcggcggcggctcccggaattgggttggagcaggagcctcgctggctgcttcgctcgcgctctacgcgctcagtccccggcggtagcaggagcctggacccaggcgccgccggcgggcgtgaggcgccggagcccggcctcgaggtgcataccggacccccattcgcatctaacaaggaatctgcgccccagagagtcccgggagcgccgccggtcggtgcccggcgcgccgggccatgcagcgacggccgccgcggagctccgagcagcggtagcgcccccctgtaaagcggttcgctatgccggggccactgtgaaccctgccgcctgccggaacactcttcgctccggaccagctcagcctctgataagctggactcggcacgcccgcaacaagcaccgaggagttaagagagccgcaagcgcagggaaggcctccccgcacgggtgggggaaagcggccggtgcagcgcggggacaggcactcgggctggcactggctgctagggatgtcgtcctggataaggtggcatggacccgccatggcgcggctctggggcttctgctggctggttgtgggcttctggagggccgctttcgcctgtcccacgtcctgcaaatgcagtgcctctcggatctggtgcagcgacccttctcctggcatcgtggcatttccgagattggagcctaacagtgtagatcctgagaacatcaccgaaattttcatcgcaaaccagaaaaggttagaaatcatcaacgaagatgatgttgaagcttatgtgggactgagaaatctgacaattgtggattctggattaaaatttgtggctcataaagcatttctgaaaaacagcaacctgcagcacatcaattttacccgaaacaaactgacgagtttgtctaggaaacatttccgtcaccttgacttgtctgaactgatcctggtgggcaatccatttacatgctcctgtgacattatgtggatcaagactctccaagaggctaaatccagtccagacactcaggatttgtactgcctgaatgaaagcagcaagaatattcccctggcaaacctgcagatacccaattgtggtttgccatctgcaaatctggccgcacctaacctcactgtggaggaaggaaagtctatcacattatcctgtagtgtggcaggtgatccggttcctaatatgtattgggatgttggtaacctggtttccaaacatatgaatgaaacaagccacacacagggctccttaaggataactaacatttcatccgatgacagtgggaagcagatctcttgtgtggcggaaaatcttgtaggagaagatcaagattctgtcaacctcactgtgcattttgcaccaactatcacatttctcgaatctccaacctcagaccaccactggtgcattccattcactgtgaaaggcaaccccaaaccagcgcttcagtggttctataacggggcaatattgaatgagtccaaatacatctgtactaaaatacatgttaccaatcacacggagtaccacggctgcctccagctggataatcccactcacatgaacaatggggactacactctaatagccaagaatgagtatgggaaggatgagaaacagatttctgctcacttcatgggctggcctggaattgacgatggtgcaaacccaaattatcctgatgtaatttatgaagattatggaactgcagcgaatgacatcggggacaccacgaacagaagtaatgaaatcccttccacagacgtcactgataaaaccggtcgggaacatctctcggtctatgctgtggtggtgattgcgtctgtggtgggattttgccttttggtaatgctgtttctgcttaagttggcaagacactccaagtttggcatgaaaggttttgttttgtttcataagatcccactggatgggtagctgaaataaaggaaaagacagagaaaggggctgtggtgcttgttggttgatgctgccatgtaagctggactcctgggactgctgttggcttatcccgggaagtgctgcttatctggggttttctggtagatgtgggcggtgtttggaggctgtactatatgaagcctgcatatactgtgagctgtgattggggaacaccaatgcagaggtaactctcaggcagctaagcagcacctcaagaaaacatgttaaattaatgcttctcttcttacagtagttcaaatacaaaactgaaatgaaatcccattggattgtacttctcttctgaaaagtgtgctttttgaccctactggacatttattgacttaattgcttctgtttattaaaattgacctgcaaagttaaaaaaaaattaaagttgagaacaggtataagtgcacactgaatagtctaatctacatgtaacacatattttagtgtgattttctatactctaatcagcactgaattcagagggtttgactttttcatctataacacagtgactaaaagagttaagggtatatataccatcactttgggacttggtagtattattaaaaggttatttccttcactgtcaataaaagtccaaatgtttagcttaggtctgagagtcaaacaatgttaaggattgtcttaaagttccttagccagcaaaacaaaacaaaacaaaacaaacaaatgaaaaacgtttaaaaagaagaagaagaaaaaaaacaagaacaagcagcaacagctgttttgttggggctatagatttaagttaggcatagtcaatttcagaataactaagagtggaatatatgcatatggtgaaattataaccttgcccttttttatttgccctctgcgatccacctgctttttagaagtctgccgagtgagaaggccacagtatctcatgctgtttgcattacagaactgcagcttttctactctgaaaaggcctgggagcagaatggctggcctgctgtgagcaggagaggagattctaagaaggatagtcccccctacaacatactgtcatactgctgggttttcatgggtaggaaagcttgtcctgaccccagcagcaaagaggtggcaggtcgctaatgaatatatgctttataatgtccttcttcattgctgagagggcagccttagagctgtggatttctgcatcccccctgagtctgacccatggacacctgtttcattcactttagcatcacagtgacctttgtatgctctgttcagtctgtgtcaggcagtatgcttgtcctgaagagaggtttggctatcccccaccccaccccacccaccctgttccttttttatcaggaggacttcagagccaggcctgcagcattttgtttgaaaacacaatcagctctgacagttagacatgcacacagacgccatagctggattggaaacattgatgttttaaaaatttatttttttttggaaatagttgcacaaatgctgcaatttagctttaaggttctatagatttttaactagtccaacacagtcagaaacattgttttgaatcctctgtaaaccaaggcattaatcttaataaaccaggatccatttaggtaccacttgatataaaaaggatatccataatgaatattttatactgcatcctttacattagccactaaatacgttattgcttgatgaagacctttcacagaatcctatggattgcagcatttcacttggctacttcatacccatgccttaaagaggggcagtttctcaaaagcagaaacatgccgccagttctcaagttttcctcctaactccatttgaatgtaagggcagctggcccccaatgtggggaggtccgaacattttctgaattcccattttcttgttcgcggctaaatgacagtttctgtcattacttagattccgatctttcccaaaggtgttgatttacaaagaggccagctaatagcagaaatcatgaccctgaaagagagatgaaattcaagctgtgagccaggcaggagctcagtatggcaaaggttcttgagaatcagccatttggtacaaaaaagatttttaaagcttttatgttataccatggagccatagaaaggctatggattgtttaagaactattttaaagtgttccagacccaaaaaggaaaaataaaaaaaaaggaatatttgtacccaacagctagaaggattgcaaggtagatttttgttttaaaatggagagaagtggacagataaggccatttaatatatcaaagatcagttgacatctcctagggaatgatgaaaacagcaggctattagaaaattatttcatatagttctcgtgttcttttcttttttttaatccctgaagggatgatcagtaacatagcttctcttttctgtactctagaccaccccttttcatcattttgctttttatgtctcccataagaaatgtgctttttagagcttcctaatgcatgtgttgcattattgcagcattagaaaaggagaggtagcatttttgctgaaatcgggcctgtcactctccaataaaggttctggcacttcaatgccaggcaggtctcctaaatgaacagaatgatctgtgtgagccgatgcctgcccttccagaggggccactgtccccagccgcagccaactgtgtcccacaggaatgggagcctaggtttccaaatcttgtgattctttaggagaaacatgaaacctggatttcgtgtgaaatgtcccgattgttatgccagtttattacttttgtcttaaaacatgatcattgttctctcacggtatccttctgtcttcccgttggcaaattcacttttctttcttcctgacattgccattgagggctttgttaccacaagctaagaaactgagtttaacagcccagttatctgcaacatgtcaattacctttgctcctctcctgtgattcccaccatgctgtgaccctcagctgtctccctttgctgggaattctgcaccaatgtctcccctcaacccattccctggttggtcctactcccgtgtggccagagacatcctagcaaatccttcctcctattatatctgacactaatttcttttcaacagcgctcatgtctcttggcccagtcaggtgctgccaggtttagataggaaagtacatgtcccattttcatgggtgcccttaatgtggtccacgtcctatatcttattatatttactcatggctcaatgggggcctccagagaccctctcaggctgctgagctagactaaggaatgcatccaccgtcatcacatgagacactgactctgtgacgacaaaagtacaaacagtctgaggctaagaaaggttcatctcacaacaggaaaaacaaatctcaacacacattagagataattgattcaggggttttctctcccagtctcccagcagggactgatttcatttctgacccactaggttttctttccagaaataggtagcaaggacaagaactaaacaatcccagccccacccagcaacacagaacacaggagtttgcttttggcttctcactctccaagtaaccctgaattaggcccagaatggctgaggcttggagcatctcctcagacagagcagaggcgacacctcttcaggggtgtgtggagtaaatagctcgaagagctgaagacagaaaaccagtttcacgccaggtgcgagagagagcgtaatggagggaagcccgctttctctctcctcttcttttctctttatttctttagagcacttgacttttttttctctctctctctagtattctaaactgaccccatgaccaactgagaatttatttttgtttcattggttgtttcacagaattagaacacacacgactttttattcctccattgcaaaatggaatcaagatactacacaagacctgtgctttcttcctttgcatgatttacacctccgcctgttttggtgctagctgtctagaacttctctcttggtttgaatctgattccttcacactacactagaagtttatttcatcttgttttgtctagactccagatacagagggacagctggactgaggacaagcaattccatctagcatagggtctctcagggttggtgcatccagccacatgggcagggccagtcacatctagtctatgtccccagagcccttggagttgcgcagcttagctgacttgactccaaggaaattagtacagaagtaaccactctattaagtgtgttctgctatgttcacatgcctgtagtacctgcaaaccatgccaggttcatctaaagacataggggaagattaaggactcttttggacagaccatgaattgaatttgctgccaggtgctgccagactgaatttggctgacagaactcccagcccaggaaagttccatgacaatgactgtcgcagaaggaaatttcccactaaagtcagtccattttcaagttttggtcttcagagacaaaagaacgtcccagccacctgattttgatggtgaggtaactctaagttgaattcaggctagtgttgcagtatagctttggcatgttcatgagtgagcacccagaatgtgttgaaccaacccccacccctaactactgactatgactgcagtgggtttttatggggaaaaaaagtgtgaaaagcaaaaagaaaggaacagagattttttatcacctttattgtaagacagtccatttatgaattgagtataaacacatacaaagtaacaagagattcctaagaaacgcaaatccttgagtttcacgcacttcatgttcaaccatttgctgtaatccagaggcagcctgtgaatcattctcatgccctgttttttttttttttttcctataatgttctgggtttaaaagccatcttttccacattttctgtaaataatggataatcattttaaaaaattttatttttagtgctgttttaacaatgtagatagatcataaatgtacttgctgaattcaatcatttttaacaagccaataaagtttgataattcat

SEQ ID NO: 312433 - DNA, 7717 bp, Homo sapiens
  misc_feature (7717)..(7717): n is a, c, g, or t
aagacggattctcagacaaggcttgcaaatgccccgcagccatcatttaactgcacccgcagaatagttacggtttgtcacccgaccctcccggatcgcctaatttgtccctagtgagaccccgaggctctgcccgcgcctggcttcttcgtagctggatgcatatcgtgctccgggcagcgcgggcgcagggcacgcgttcgcgcacaccctagcacacatgaacacgcgcaagagctgaaccaagcacggtttccatttcaaaaagggagacagcctctaccgcgattgtagaagagactgtggtgtgaattagggaccgggaggcgtcgaacggaggaacggttcatcttagagactaattttctggagtttctgcccctgctctgcgtcagccctcacgtcacttcgccagcagtagcagaggcggcggcggcggctcccggaattgggttggagcaggagcctcgctggctgcttcgctcgcgctctacgcgctcagtccccggcggtagcaggagcctggacccaggcgccgccggcgggcgtgaggcgccggagcccggcctcgaggtgcataccggacccccattcgcatctaacaaggaatctgcgccccagagagtcccgggagcgccgccggtcggtgcccggcgcgccgggccatgcagcgacggccgccgcggagctccgagcagcggtagcgcccccctgtaaagcggttcgctatgccggggccactgtgaaccctgccgcctgccggaacactcttcgctccggaccagctcagcctctgataagctggactcggcacgcccgcaacaagcaccgaggagttaagagagccgcaagcgcagggaaggcctccccgcacgggtgggggaaagcggccggtgcagcgcggggacaggcactcgggctggcactggctgctagggatgtcgtcctggataaggtggcatggacccgccatggcgcggctctggggcttctgctggctggttgtgggcttctggagggccgctttcgcctgtcccacgtcctgcaaatgcagtgcctctcggatctggtgcagcgacccttctcctggcatcgtggcatttccgagattggagcctaacagtgtagatcctgagaacatcaccgaaattttcatcgcaaaccagaaaaggttagaaatcatcaacgaagatgatgttgaagcttatgtgggactgagaaatctgacaattgtggattctggattaaaatttgtggctcataaagcatttctgaaaaacagcaacctgcagcacatcaattttacccgaaacaaactgacgagtttgtctaggaaacatttccgtcaccttgacttgtctgaactgatcctggtgggcaatccatttacatgctcctgtgacattatgtggatcaagactctccaagaggctaaatccagtccagacactcaggatttgtactgcctgaatgaaagcagcaagaatattcccctggcaaacctgcagatacccaattgtggtttgccatctgcaaatctggccgcacctaacctcactgtggaggaaggaaagtctatcacattatcctgtagtgtggcaggtgatccggttcctaatatgtattgggatgttggtaacctggtttccaaacatatgaatgaaacaagccacacacagggctccttaaggataactaacatttcatccgatgacagtgggaagcagatctcttgtgtggcggaaaatcttgtaggagaagatcaagattctgtcaacctcactgtgcattttgcaccaactatcacatttctcgaatctccaacctcagaccaccactggtgcattccattcactgtgaaaggcaaccccaaaccagcgcttcagtggttctataacggggcaatattgaatgagtccaaatacatctgtactaaaatacatgttaccaatcacacggagtaccacggctgcctccagctggataatcccactcacatgaacaatggggactacactctaatagccaagaatgagtatgggaaggatgagaaacagatttctgctcacttcatgggctggcctggaattgacgatggtgcaaacccaaattatcctgatgtaatttatgaagattatggaactgcagcgaatgacatcggggacaccacgaacagaagtaatgaaatcccttccacagacgtcactgataaaaccggtcgggaacatctctcggtctatgctgtggtggtgattgcgtctgtggtgggattttgccttttggtaatgctgtttctgcttaagttggcaagacactccaagtttggcatgaaaggttttgttttgtttcataagatcccactggatgggtagctgaaataaaggaaaagacagagaaaggggctgtggtgcttgttggttgatgctgccatgtaagctggactcctgggactgctgttggcttatcccgggaagtgctgcttatctggggttttctggtagatgtgggcggtgtttggaggctgtactatatgaagcctgcatatactgtgagctgtgattggggaacaccaatgcagaggtaactctcaggcagctaagcagcacctcaagaaaacatgttaaattaatgcttctcttcttacagtagttcaaatacaaaactgaaatgaaatcccattggattgtacttctcttctgaaaagtgtgctttttgaccctactggacatttattgacttaattgcttctgtttattaaaattgacctgcaaagttaaaaaaaaattaaagttgagaacaggtataagtgcacactgaatagtctaatctacatgtaacacatattttagtgtgattttctatactctaatcagcactgaattcagagggtttgactttttcatctataacacagtgactaaaagagttaagggtatatataccatcactttgggacttggtagtattattaaaaggttatttccttcactgtcaataaaagtccaaatgtttagcttaggtctgagagtcaaacaatgttaaggattgtcttaaagttccttagccagcaaaacaaaacaaaacaaaacaaacaaatgaaaaacgtttaaaaagaagaagaagaaaaaaaacaagaacaagcagcaacagctgttttgttggggctatagatttaagttaggcatagtcaatttcagaataactaagagtggaatatatgcatatggtgaaattataaccttgcccttttttatttgccctctgcgatccacctgctttttagaagtctgccgagtgagaaggccacagtatctcatgctgtttgcattacagaactgcagcttttctactctgaaaaggcctgggagcagaatggctggcctgctgtgagcaggagaggagattctaagaaggatagtcccccctacaacatactgtcatactgctgggttttcatgggtaggaaagcttgtcctgaccccagcagcaaagaggtggcaggtcgctaatgaatatatgctttataatgtccttcttcattgctgagagggcagccttagagctgtggatttctgcatcccccctgagtctgacccatggacacctgtttcattcactttagcatcacagtgacctttgtatgctctgttcagtctgtgtcaggcagtatgcttgtcctgaagagaggtttggctatcccccaccccaccccacccaccctgttccttttttatcaggaggacttcagagccaggcctgcagcattttgtttgaaaacacaatcagctctgacagttagacatgcacacagacgccatagctggattggaaacattgatgttttaaaaatttatttttttttggaaatagttgcacaaatgctgcaatttagctttaaggttctatagatttttaactagtccaacacagtcagaaacattgttttgaatcctctgtaaaccaaggcattaatcttaataaaccaggatccatttaggtaccacttgatataaaaaggatatccataatgaatattttatactgcatcctttacattagccactaaatacgttattgcttgatgaagacctttcacagaatcctatggattgcagcatttcacttggctacttcatacccatgccttaaagaggggcagtttctcaaaagcagaaacatgccgccagttctcaagttttcctcctaactccatttgaatgtaagggcagctggcccccaatgtggggaggtccgaacattttctgaattcccattttcttgttcgcggctaaatgacagtttctgtcattacttagattccgatctttcccaaaggtgttgatttacaaagaggccagctaatagcagaaatcatgaccctgaaagagagatgaaattcaagctgtgagccaggcaggagctcagtatggcaaaggttcttgagaatcagccatttggtacaaaaaagatttttaaagcttttatgttataccatggagccatagaaaggctatggattgtttaagaactattttaaagtgttccagacccaaaaaggaaaaataaaaaaaaaggaatatttgtacccaacagctagaaggattgcaaggtagatttttgttttaaaatggagagaagtggacagataaggccatttaatatatcaaagatcagttgacatctcctagggaatgatgaaaacagcaggctattagaaaattatttcatatagttctcgtgttcttttcttttttttaatccctgaagggatgatcagtaacatagcttctcttttctgtactctagaccaccccttttcatcattttgctttttatgtctcccataagaaatgtgctttttagagcttcctaatgcatgtgttgcattattgcagcattagaaaaggagaggtagcatttttgctgaaatcgggcctgtcactctccaataaaggttctggcacttcaatgccaggcaggtctcctaaatgaacagaatgatctgtgtgagccgatgcctgcccttccagaggggccactgtccccagccgcagccaactgtgtcccacaggaatgggagcctaggtttccaaatcttgtgattctttaggagaaacatgaaacctggatttcgtgtgaaatgtcccgattgttaaaaagttggctcaattatttttaaaacattttgtaagccaacaaaagtctgtggggctgccagtttattacttttgtcttaaaacatgatcattgttctctcacggtatccttctgtcttcccgttggcaaattcacttttctttcttcctgacattgccattgagggctttgttaccacaagctaagaaactgagtttaacagcccagttatctgcaacatgtcaattacctttgctcctctcctgtgattcccaccatgctgtgaccctcagctgtctccctttgctgggaattctgcaccaatgtctcccctcaacccattccctggttggtcctactcccgtgtggccagagacatcctagcaaatccttcctcctattatatctgacactaatttcttttcaacagcgctcatgtctcttggcccagtcaggtgctgccaggtttagataggaaagtacatgtcccattttcatgggtgcccttaatgtggtccacgtcctatatcttattatatttactcatggctcaatgggggcctccagagaccctctcaggctgctgagctagactaaggaatgcatccaccgtcatcacatgagacactgactctgtgacgacaaaagtacaaacagtctgaggctaagaaaggttcatctcacaacaggaaaaacaaatctcaacacacattagagataattgattcaggggttttctctcccagtctcccagcagggactgatttcatttctgacccactaggttttctttccagaaataggtagcaaggacaagaactaaacaatcccagccccacccagcaacacagaacacaggagtttgcttttggcttctcactctccaagtaaccctgaattaggcccagaatggctgaggcttggagcatctcctcagacagagcagaggcgacacctcttcaggggtgtgtggagtaaatagctcgaagagctgaagacagaaaaccagtttcacgccaggtgcgagagagagcgtaatggagggaagcccgctttctctctcctcttcttttctctttatttctttagagcacttgacttttttttctctctctctctagtattctaaactgaccccatgaccaactgagaatttatttttgtttcattggttgtttcacagaattagaacacacacgactttttattcctccattgcaaaatggaatcaagatactacacaagacctgtgctttcttcctttgcatgatttacacctccgcctgttttggtgctagctgtctagaacttctctcttggtttgaatctgattccttcacactacactagaagtttatttcatcttgttttgtctagactccagatacagagggacagctggactgaggacaagcaattccatctagcatagggtctctcagggttggtgcatccagccacatgggcagggccagtcacatctagtctatgtccccagagcccttggagttgcgcagcttagctgacttgactccaaggaaattagtacagaagtaaccactctattaagtgtgttctgctatgttcacatgcctgtagtacctgcaaaccatgccaggttcatctaaagacataggggaagattaaggactcttttggacagaccatgaattgaatttgctgccaggtgctgccagactgaatttggctgacagaactcccagcccaggaaagttccatgacaatgactgtcgcagaaggaaatttcccactaaagtcagtccattttcaagttttggtcttcagagacaaaagaacgtcccagccacctgattttgatggtgaggtaactctaagttgaattcaggctagtgttgcagtatagctttggcatgttcatgagtgagcacccagaatgtgttgaaccaacccccacccctaactactgactatgactgcagtgggtttttatggggaaaaaaagtgtgaaaagcaaaaagaaaggaacagagattttttatcacctttattgtaagacagtccatttatgaattgagtataaacacatacaaagtaacaagagattcctaagaaacgcaaatccttgagtttcacgcacttcatgttcaaccatttgctgtaatccagaggcagcctgtgaatcattctcatgccctgttttttttttttttttcctataatgttctgggtttaaaagccatcttttccacattttctgtaaataatggataatcattttaaaaaattttatttttagtgctgttttaacaatgtagatagatcataaatgtacttgctgaattcaatcatttttaacaagccaataaagtttgataattcatattctttaatgaagatttgctatgaatttgtttactctttcataccaccttcagatagctagtcagttcagcaggagcagagaccaggttagcacgcggatggggtgtaattcagtgtttttgtgttgtacagcctgagaaatgccagtggcctgacagcagcagacattgcaccccagggtttccaagagtgtgcccagtttctcttgaacctccgn

SEQ ID NO: 312434 - DNA, 7442 bp, Homo sapiens
aagacggattctcagacaaggcttgcaaatgccccgcagccatcatttaactgcacccgcagaatagttacggtttgtcacccgaccctcccggatcgcctaatttgtccctagtgagaccccgaggctctgcccgcgcctggcttcttcgtagctggatgcatatcgtgctccgggcagcgcgggcgcagggcacgcgttcgcgcacaccctagcacacatgaacacgcgcaagagctgaaccaagcacggtttccatttcaaaaagggagacagcctctaccgcgattgtagaagagactgtggtgtgaattagggaccgggaggcgtcgaacggaggaacggttcatcttagagactaattttctggagtttctgcccctgctctgcgtcagccctcacgtcacttcgccagcagtagcagaggcggcggcggcggctcccggaattgggttggagcaggagcctcgctggctgcttcgctcgcgctctacgcgctcagtccccggcggtagcaggagcctggacccaggcgccgccggcgggcgtgaggcgccggagcccggcctcgaggtgcataccggacccccattcgcatctaacaaggaatctgcgccccagagagtcccgggagcgccgccggtcggtgcccggcgcgccgggccatgcagcgacggccgccgcggagctccgagcagcggtagcgcccccctgtaaagcggttcgctatgccggggccactgtgaaccctgccgcctgccggaacactcttcgctccggaccagctcagcctctgataagctggactcggcacgcccgcaacaagcaccgaggagttaagagagccgcaagcgcagggaaggcctccccgcacgggtgggggaaagcggccggtgcagcgcggggacaggcactcgggctggcactggctgctagggatgtcgtcctggataaggtggcatggacccgccatggcgcggctctggggcttctgctggctggttgtgggcttctggagggccgctttcgcctgtcccacgtcctgcaaatgcagtgcctctcggatctggtgcagcgacccttctcctggcatcgtggcatttccgagattggagcctaacagtgtagatcctgagaacatcaccgaaattttcatcgcaaaccagaaaaggttagaaatcatcaacgaagatgatgttgaagcttatgtgggactgagaaatctgacaattgtggattctggattaaaatttgtggctcataaagcatttctgaaaaacagcaacctgcagcacatcaattttacccgaaacaaactgacgagtttgtctaggaaacatttccgtcaccttgacttgtctgaactgatcctggtgggcaatccatttacatgctcctgtgacattatgtggatcaagactctccaagaggctaaatccagtccagacactcaggatttgtactgcctgaatgaaagcagcaagaatattcccctggcaaacctgcagatacccaattgtggtttgccatctgcaaatctggccgcacctaacctcactgtggaggaaggaaagtctatcacattatcctgtagtgtggcaggtgatccggttcctaatatgtattgggatgttggtaacctggtttccaaacatatgaatgaaacaagccacacacagggctccttaaggataactaacatttcatccgatgacagtgggaagcagatctcttgtgtggcggaaaatcttgtaggagaagatcaagattctgtcaacctcactgtgcattttgcaccaactatcacatttctcgaatctccaacctcagaccaccactggtgcattccattcactgtgaaaggcaaccccaaaccagcgcttcagtggttctataacggggcaatattgaatgagtccaaatacatctgtactaaaatacatgttaccaatcacacggagtaccacggctgcctccagctggataatcccactcacatgaacaatggggactacactctaatagccaagaatgagtatgggaaggatgagaaacagatttctgctcacttcatgggctggcctggaattgacgatggtgcaaacccaaattatcctgatgtaatttatgaagattatggaactgcagcgaatgacatcggggacaccacgaacagaagtaatgaaatcccttccacagacgtcactgataaaaccggtcgggaacatctctcggtctatgctgtggtggtgattgcgtctgtggtgggattttgccttttggtaatgctgtttctgcttaagttggcaagacactccaagtttggcatgaaaggttttgttttgtttcataagatcccactggatgggtagctgaaataaaggaaaagacagagaaaggggctgtggtgcttgttggttgatgctgccatgtaagctggactcctgggactgctgttggcttatcccgggaagtgctgcttatctggggttttctggtagatgtgggcggtgtttggaggctgtactatatgaagcctgcatatactgtgagctgtgattggggaacaccaatgcagaggtaactctcaggcagctaagcagcacctcaagaaaacatgttaaattaatgcttctcttcttacagtagttcaaatacaaaactgaaatgaaatcccattggattgtacttctcttctgaaaagtgtgctttttgaccctactggacatttattgacttaattgcttctgtttattaaaattgacctgcaaagttaaaaaaaaattaaagttgagaacaggtataagtgcacactgaatagtctaatctacatgtaacacatattttagtgtgattttctatactctaatcagcactgaattcagagggtttgactttttcatctataacacagtgactaaaagagttaagggtatatataccatcactttgggacttggtagtattattaaaaggttatttccttcactgtcaataaaagtccaaatgtttagcttaggtctgagagtcaaacaatgttaaggattgtcttaaagttccttagccagcaaaacaaaacaaaacaaaacaaacaaatgaaaaacgtttaaaaagaagaagaagaaaaaaaacaagaacaagcagcaacagctgttttgttggggctatagatttaagttaggcatagtcaatttcagaataactaagagtggaatatatgcatatggtgaaattataaccttgcccttttttatttgccctctgcgatccacctgctttttagaagtctgccgagtgagaaggccacagtatctcatgctgtttgcattacagaactgcagcttttctactctgaaaaggcctgggagcagaatggctggcctgctgtgagcaggagaggagattctaagaaggatagtcccccctacaacatactgtcatactgctgggttttcatgggtaggaaagcttgtcctgaccccagcagcaaagaggtggcaggtcgctaatgaatatatgctttataatgtccttcttcattgctgagagggcagccttagagctgtggatttctgcatcccccctgagtctgacccatggacacctgtttcattcactttagcatcacagtgacctttgtatgctctgttcagtctgtgtcaggcagtatgcttgtcctgaagagaggtttggctatcccccaccccaccccacccaccctgttccttttttatcaggaggacttcagagccaggcctgcagcattttgtttgaaaacacaatcagctctgacagttagacatgcacacagacgccatagctggattggaaacattgatgttttaaaaatttatttttttttggaaatagttgcacaaatgctgcaatttagctttaaggttctatagatttttaactagtccaacacagtcagaaacattgttttgaatcctctgtaaaccaaggcattaatcttaataaaccaggatccatttaggtaccacttgatataaaaaggatatccataatgaatattttatactgcatcctttacattagccactaaatacgttattgcttgatgaagacctttcacagaatcctatggattgcagcatttcacttggctacttcatacccatgccttaaagaggggcagtttctcaaaagcagaaacatgccgccagttctcaagttttcctcctaactccatttgaatgtaagggcagctggcctctttgtaaatcaacacctttgggaaagatcggaatctaagtaatgacagaaactgtcatttagccgcgaacaagaaaatgggaatcctgaaagagagatgaaattcaagctgtgagccaggcaggagctcagtatggcaaaggttcttgagaatcagccatttggtacaaaaaagatttttaaagcttttatgttataccatggagccatagaaaggctatggattgtttaagaactattttaaagtgttccagacccaaaaaggaaaaataaaaaaaaaggaatatttgtacccaacagctagaaggattgcaaggtagatttttgttttaaaatggagagaagtggacagataaggccatttaatatatcaaagatcagttgacatctcctagggaatgatgaaaacagcaggctattagaaaattatttcatatagttctcgtgttcttttcttttttttaatccctgaagggatgatcagtaacatagcttctcttttctgtactctagaccaccccttttcatcattttgctttttatgtctcccataagaaatgtgctttttagagcttcctaatgcatgtgttgcattattgcagcattagaaaaggagaggtagcatttttgctgaaatcgggcctgtcactctccaataaaggttctggcacttcaatgccaggcaggtctcctaaatgaacagaatgatctgtgtgagccgatgcctgcccttccagaggggccactgtccccagccgcagccaactgtgtcccacaggaatgggagcctaggtttccaaatcttgtgattctttaggagaaacatgaaacctggatttcgtgtgaaatgtcccgattgttaaaaagttggctcaattatttttaaaacattttgtaagccaacaaaagtctgtggggctgccagtttattacttttgtcttaaaacatgatcattgttctctcacggtatccttctgtcttcccgttggcaaattcacttttctttcttcctgacattgccattgagggctttgttaccacaagctaagaaactgagtttaacagcccagttatctgcaacatgtcaattacctttgctcctctcctgtgattcccaccatgctgtgaccctcagctgtctccctttgctgggaattctgcaccaatgtctcccctcaacccattccctggttggtcctactcccgtgtggccagagacatcctagcaaatccttcctcctattatatctgacactaatttcttttcaacagcgctcatgtctcttggcccagtcaggtgctgccaggtttagataggaaagtacatgtcccattttcatgggtgcccttaatgtggtccacgtcctatatcttattatatttactcatggctcaatgggggcctccagagaccctctcaggctgctgagctagactaaggaatgcatccaccgtcatcacatgagacactgactctgtgacgacaaaagtacaaacagtctgaggctaagaaaggttcatctcacaacaggaaaaacaaatctcaacacacattagagataattgattcaggggttttctctcccagtctcccagcagggactgatttcatttctgacccactaggttttctttccagaaataggtagcaaggacaagaactaaacaatcccagccccacccagcaacacagaacacaggagtttgcttttggcttctcactctccaagtaaccctgaattaggcccagaatggctgaggcttggagcatctcctcagacagagcagaggcgacacctcttcaggggtgtgtggagtaaatagctcgaagagctgaagacagaaaaccagtttcacgccaggtgcgagagagagcgtaatggagggaagcccgctttctctctcctcttcttttctctttatttctttagagcacttgacttttttttctctctctctctagtattctaaactgaccccatgaccaactgagaatttatttttgtttcattggttgtttcacagaattagaacacacacgactttttattcctccattgcaaaatggaatcaagatactacacaagacctgtgctttcttcctttgcatgatttacacctccgcctgttttggtgctagctgtctagaacttctctcttggtttgaatctgattccttcacactacactagaagtttatttcatcttgttttgtctagactccagatacagagggacagctggactgaggacaagcaattccatctagcatagggtctctcagggttggtgcatccagccacatgggcagggccagtcacatctagtctatgtccccagagcccttggagttgcgcagcttagctgacttgactccaaggaaattagtacagaagtaaccactctattaagtgtgttctgctatgttcacatgcctgtagtacctgcaaaccatgccaggttcatctaaagacataggggaagattaaggactcttttggacagaccatgaattgaatttgctgccaggtgctgccagactgaatttggctgacagaactcccagcccaggaaagttccatgacaatgactgtcgcagaaggaaatttcccactaaagtcagtccattttcaagttttggtcttcagagacaaaagaacgtcccagccacctgattttgatggtgaggtaactctaagttgaattcaggctagtgttgcagtatagctttggcatgttcatgagtgagcacccagaatgtgttgaaccaacccccacccctaactactgactatgactgcagtgggtttttatggggaaaaaaagtgtgaaaagcaaaaagaaaggaacagagattttttatcacctttattgtaagacagtccatttatgaattgagtataaacacatacaaagtaacaagagattcctaagaaacgcaaatccttgagtttcacgcacttcatgttcaaccatttgctgtaatccagaggcagcctgtgaatcattctcatgccctgttttttttttttttttcctataatgttctgggtttaaaagccatcttttccacattttctgtaaataatggataatcattttaaaaaattttatttttagtgctgttttaacaatgtagatagatcataaatgtacttgctgaattcaatcatttttaacaagccaataaagtttgataattcat

SEQ ID NO: 312435 - DNA, 7453 bp, Homo sapiens
aagacggattctcagacaaggcttgcaaatgccccgcagccatcatttaactgcacccgcagaatagttacggtttgtcacccgaccctcccggatcgcctaatttgtccctagtgagaccccgaggctctgcccgcgcctggcttcttcgtagctggatgcatatcgtgctccgggcagcgcgggcgcagggcacgcgttcgcgcacaccctagcacacatgaacacgcgcaagagctgaaccaagcacggtttccatttcaaaaagggagacagcctctaccgcgattgtagaagagactgtggtgtgaattagggaccgggaggcgtcgaacggaggaacggttcatcttagagactaattttctggagtttctgcccctgctctgcgtcagccctcacgtcacttcgccagcagtagcagaggcggcggcggcggctcccggaattgggttggagcaggagcctcgctggctgcttcgctcgcgctctacgcgctcagtccccggcggtagcaggagcctggacccaggcgccgccggcgggcgtgaggcgccggagcccggcctcgaggtgcataccggacccccattcgcatctaacaaggaatctgcgccccagagagtcccgggagcgccgccggtcggtgcccggcgcgccgggccatgcagcgacggccgccgcggagctccgagcagcggtagcgcccccctgtaaagcggttcgctatgccggggccactgtgaaccctgccgcctgccggaacactcttcgctccggaccagctcagcctctgataagctggactcggcacgcccgcaacaagcaccgaggagttaagagagccgcaagcgcagggaaggcctccccgcacgggtgggggaaagcggccggtgcagcgcggggacaggcactcgggctggcactggctgctagggatgtcgtcctggataaggtggcatggacccgccatggcgcggctctggggcttctgctggctggttgtgggcttctggagggccgctttcgcctgtcccacgtcctgcaaatgcagtgcctctcggatctggtgcagcgacccttctcctggcatcgtggcatttccgagattggagcctaacagtgtagatcctgagaacatcaccgaaattttcatcgcaaaccagaaaaggttagaaatcatcaacgaagatgatgttgaagcttatgtgggactgagaaatctgacaattgtggattctggattaaaatttgtggctcataaagcatttctgaaaaacagcaacctgcagcacatcaattttacccgaaacaaactgacgagtttgtctaggaaacatttccgtcaccttgacttgtctgaactgatcctggtgggcaatccatttacatgctcctgtgacattatgtggatcaagactctccaagaggctaaatccagtccagacactcaggatttgtactgcctgaatgaaagcagcaagaatattcccctggcaaacctgcagatacccaattgtggtttgccatctgcaaatctggccgcacctaacctcactgtggaggaaggaaagtctatcacattatcctgtagtgtggcaggtgatccggttcctaatatgtattgggatgttggtaacctggtttccaaacatatgaatgaaacaagccacacacagggctccttaaggataactaacatttcatccgatgacagtgggaagcagatctcttgtgtggcggaaaatcttgtaggagaagatcaagattctgtcaacctcactgtgcattttgcaccaactatcacatttctcgaatctccaacctcagaccaccactggtgcattccattcactgtgaaaggcaaccccaaaccagcgcttcagtggttctataacggggcaatattgaatgagtccaaatacatctgtactaaaatacatgttaccaatcacacggagtaccacggctgcctccagctggataatcccactcacatgaacaatggggactacactctaatagccaagaatgagtatgggaaggatgaggtgcaaacccaaattatcctgatgtaatttatgaagattatggaactgcagcgaatgacatcggggacaccacgaacagaagtaatgaaatcccttccacagacgtcactgataaaaccggtcgggaacatctctcggtctatgctgtggtggtgattgcgtctgtggtgggattttgccttttggtaatgctgtttctgcttaagttggcaagacactccaagtttggcatgaaaggttttgttttgtttcataagatcccactggatgggtagctgaaataaaggaaaagacagagaaaggggctgtggtgcttgttggttgatgctgccatgtaagctggactcctgggactgctgttggcttatcccgggaagtgctgcttatctggggttttctggtagatgtgggcggtgtttggaggctgtactatatgaagcctgcatatactgtgagctgtgattggggaacaccaatgcagaggtaactctcaggcagctaagcagcacctcaagaaaacatgttaaattaatgcttctcttcttacagtagttcaaatacaaaactgaaatgaaatcccattggattgtacttctcttctgaaaagtgtgctttttgaccctactggacatttattgacttaattgcttctgtttattaaaattgacctgcaaagttaaaaaaaaattaaagttgagaacaggtataagtgcacactgaatagtctaatctacatgtaacacatattttagtgtgattttctatactctaatcagcactgaattcagagggtttgactttttcatctataacacagtgactaaaagagttaagggtatatataccatcactttgggacttggtagtattattaaaaggttatttccttcactgtcaataaaagtccaaatgtttagcttaggtctgagagtcaaacaatgttaaggattgtcttaaagttccttagccagcaaaacaaaacaaaacaaaacaaacaaatgaaaaacgtttaaaaagaagaagaagaaaaaaaacaagaacaagcagcaacagctgttttgttggggctatagatttaagttaggcatagtcaatttcagaataactaagagtggaatatatgcatatggtgaaattataaccttgcccttttttatttgccctctgcgatccacctgctttttagaagtctgccgagtgagaaggccacagtatctcatgctgtttgcattacagaactgcagcttttctactctgaaaaggcctgggagcagaatggctggcctgctgtgagcaggagaggagattctaagaaggatagtcccccctacaacatactgtcatactgctgggttttcatgggtaggaaagcttgtcctgaccccagcagcaaagaggtggcaggtcgctaatgaatatatgctttataatgtccttcttcattgctgagagggcagccttagagctgtggatttctgcatcccccctgagtctgacccatggacacctgtttcattcactttagcatcacagtgacctttgtatgctctgttcagtctgtgtcaggcagtatgcttgtcctgaagagaggtttggctatcccccaccccaccccacccaccctgttccttttttatcaggaggacttcagagccaggcctgcagcattttgtttgaaaacacaatcagctctgacagttagacatgcacacagacgccatagctggattggaaacattgatgttttaaaaatttatttttttttggaaatagttgcacaaatgctgcaatttagctttaaggttctatagatttttaactagtccaacacagtcagaaacattgttttgaatcctctgtaaaccaaggcattaatcttaataaaccaggatccatttaggtaccacttgatataaaaaggatatccataatgaatattttatactgcatcctttacattagccactaaatacgttattgcttgatgaagacctttcacagaatcctatggattgcagcatttcacttggctacttcatacccatgccttaaagaggggcagtttctcaaaagcagaaacatgccgccagttctcaagttttcctcctaactccatttgaatgtaagggcagctggcccccaatgtggggaggtccgaacattttctgaattcccattttcttgttcgcggctaaatgacagtttctgtcattacttagattccgatctttcccaaaggtgttgatttacaaagaggccagctaatagcagaaatcatgaccctgaaagagagatgaaattcaagctgtgagccaggcaggagctcagtatggcaaaggttcttgagaatcagccatttggtacaaaaaagatttttaaagcttttatgttataccatggagccatagaaaggctatggattgtttaagaactattttaaagtgttccagacccaaaaaggaaaaataaaaaaaaaggaatatttgtacccaacagctagaaggattgcaaggtagatttttgttttaaaatggagagaagtggacagataaggccatttaatatatcaaagatcagttgacatctcctagggaatgatgaaaacagcaggctattagaaaattatttcatatagttctcgtgttcttttcttttttttaatccctgaagggatgatcagtaacatagcttctcttttctgtactctagaccaccccttttcatcattttgctttttatgtctcccataagaaatgtgctttttagagcttcctaatgcatgtgttgcattattgcagcattagaaaaggagaggtagcatttttgctgaaatcgggcctgtcactctccaataaaggttctggcacttcaatgccaggcaggtctcctaaatgaacagaatgatctgtgtgagccgatgcctgcccttccagaggggccactgtccccagccgcagccaactgtgtcccacaggaatgggagcctaggtttccaaatcttgtgattctttaggagaaacatgaaacctggatttcgtgtgaaatgtcccgattgttaaaaagttggctcaattatttttaaaacattttgtaagccaacaaaagtctgtggggctgccagtttattacttttgtcttaaaacatgatcattgttctctcacggtatccttctgtcttcccgttggcaaattcacttttctttcttcctgacattgccattgagggctttgttaccacaagctaagaaactgagtttaacagcccagttatctgcaacatgtcaattacctttgctcctctcctgtgattcccaccatgctgtgaccctcagctgtctccctttgctgggaattctgcaccaatgtctcccctcaacccattccctggttggtcctactcccgtgtggccagagacatcctagcaaatccttcctcctattatatctgacactaatttcttttcaacagcgctcatgtctcttggcccagtcaggtgctgccaggtttagataggaaagtacatgtcccattttcatgggtgcccttaatgtggtccacgtcctatatcttattatatttactcatggctcaatgggggcctccagagaccctctcaggctgctgagctagactaaggaatgcatccaccgtcatcacatgagacactgactctgtgacgacaaaagtacaaacagtctgaggctaagaaaggttcatctcacaacaggaaaaacaaatctcaacacacattagagataattgattcaggggttttctctcccagtctcccagcagggactgatttcatttctgacccactaggttttctttccagaaataggtagcaaggacaagaactaaacaatcccagccccacccagcaacacagaacacaggagtttgcttttggcttctcactctccaagtaaccctgaattaggcccagaatggctgaggcttggagcatctcctcagacagagcagaggcgacacctcttcaggggtgtgtggagtaaatagctcgaagagctgaagacagaaaaccagtttcacgccaggtgcgagagagagcgtaatggagggaagcccgctttctctctcctcttcttttctctttatttctttagagcacttgacttttttttctctctctctctagtattctaaactgaccccatgaccaactgagaatttatttttgtttcattggttgtttcacagaattagaacacacacgactttttattcctccattgcaaaatggaatcaagatactacacaagacctgtgctttcttcctttgcatgatttacacctccgcctgttttggtgctagctgtctagaacttctctcttggtttgaatctgattccttcacactacactagaagtttatttcatcttgttttgtctagactccagatacagagggacagctggactgaggacaagcaattccatctagcatagggtctctcagggttggtgcatccagccacatgggcagggccagtcacatctagtctatgtccccagagcccttggagttgcgcagcttagctgacttgactccaaggaaattagtacagaagtaaccactctattaagtgtgttctgctatgttcacatgcctgtagtacctgcaaaccatgccaggttcatctaaagacataggggaagattaaggactcttttggacagaccatgaattgaatttgctgccaggtgctgccagactgaatttggctgacagaactcccagcccaggaaagttccatgacaatgactgtcgcagaaggaaatttcccactaaagtcagtccattttcaagttttggtcttcagagacaaaagaacgtcccagccacctgattttgatggtgaggtaactctaagttgaattcaggctagtgttgcagtatagctttggcatgttcatgagtgagcacccagaatgtgttgaaccaacccccacccctaactactgactatgactgcagtgggtttttatggggaaaaaaagtgtgaaaagcaaaaagaaaggaacagagattttttatcacctttattgtaagacagtccatttatgaattgagtataaacacatacaaagtaacaagagattcctaagaaacgcaaatccttgagtttcacgcacttcatgttcaaccatttgctgtaatccagaggcagcctgtgaatcattctcatgccctgttttttttttttttttcctataatgttctgggtttaaaagccatcttttccacattttctgtaaataatggataatcattttaaaaaattttatttttagtgctgttttaacaatgtagatagatcataaatgtacttgctgaattcaatcatttttaacaagccaataaagtttgataattcat

SEQ ID NO: 312436 - DNA, 1864 bp, Homo sapiens
aaggtgtgatggatgtcagatgtttcctatcaatggatccagattcaaatgcagtaactgtgatgactttgatttttgtgaaacgtgtttcaagaccgtttttacactataccaggcatacatttggcagaataaatgaacctaggcttcagctagtaagtaacacttcctataagtctcgcccaactaggaaaaacaaatctcaacacacattagagataattgattcaggggttttctctcccagtctcccagcagggactgatttcatttctgacccactaggttttctttccagaaataggtagcaaggacaagaactaaacaatcccagccccacccagcaacacagaacacaggagtttgcttttggcttctcactctccaagtaaccctgaattaggcccagaatggctgaggcttggagcatctcctcagacagagcagaggcgacacctcttcaggggtgtgtggagtaaatagctcgaagagctgaagacagaaaaccagtttcacgccaggtgcgagagagagcgtaatggagggaagcccgctttctctctcctcttcttttctctttatttctttagagcacttgacttttttttctctctctctctagtattctaaactgaccccatgaccaactgagaatttatttttgtttcattggttgtttcacagaattagaacacacacgactttttattcctccattgcaaaatggaatcaagatactacacaagacctgtgctttcttcctttgcatgatttacacctccgcctgttttggtgctagctgtctagaacttctctcttggtttgaatctgattccttcacactacactagaagtttatttcatcttgttttgtctagactccagatacagagggacagctggactgaggacaagcaattccatctagcatagggtctctcagggttggtgcatccagccacatgggcagggccagtcacatctagtctatgtccccagagcccttggagttgcgcagcttagctgacttgactccaaggaaattagtacagaagtaaccactctattaagtgtgttctgctatgttcacatgcctgtagtacctgcaaaccatgccaggttcatctaaagacataggggaagattaaggactcttttggacagaccatgaattgaatttgctgccaggtgctgccagactgaatttggctgacagaactcccagcccaggaaagttccatgacaatgactgtcgcagaaggaaatttcccactaaagtcagtccattttcaagttttggtcttcagagacaaaagaacgtcccagccacctgattttgatggtgaggtaactctaagttgaattcaggctagtgttgcagtatagctttggcatgttcatgagtgagcacccagaatgtgttgaaccaacccccacccctaactactgactatgactgcagtgggtttttatggggaaaaaaagtgtgaaaagcaaaaagaaaggaacagagattttttatcacctttattgtaagacagtccatttatgaattgagtataaacacatacaaagtaacaagagattcctaagaaacgcaaatccttgagtttcacgcacttcatgttcaaccatttgctgtaatccagaggcagcctgtgaatcattctcatgccctgttttttttttttttttcctataatgttctgggtttaaaagccatcttttccacattttctgtaaataatggataatcattttaaaaaattttatttttagtgctgttttaacaatgtagatagatcataaatgtacttgctgaattcaatcatttttaacaagccaataaagtttgataattcat

SEQ ID NO: 312437 - DNA, 2695 bp, Homo sapiens
aagacggattctcagacaaggcttgcaaatgccccgcagccatcatttaactgcacccgcagaatagttacggtttgtcacccgaccctcccggatcgcctaatttgtccctagtgagaccccgaggctctgcccgcgcctggcttcttcgtagctggatgcatatcgtgctccgggcagcgcgggcgcagggcacgcgttcgcgcacaccctagcacacatgaacacgcgcaagagctgaaccaagcacggtttccatttcaaaaagggagacagcctctaccgcgattgtagaagagactgtggtgtgaattagggaccgggaggcgtcgaacggaggaacggttcatcttagagactaattttctggagtttctgcccctgctctgcgtcagccctcacgtcacttcgccagcagtagcagaggcggcggcggcggctcccggaattgggttggagcaggagcctcgctggctgcttcgctcgcgctctacgcgctcagtccccggcggtagcaggagcctggacccaggcgccgccggcgggcgtgaggcgccggagcccggcctcgaggtgcataccggacccccattcgcatctaacaaggaatctgcgccccagagagtcccgggagcgccgccggtcggtgcccggcgcgccgggccatgcagcgacggccgccgcggagctccgagcagcggtagcgcccccctgtaaagcggttcgctatgccggggccactgtgaaccctgccgcctgccggaacactcttcgctccggaccagctcagcctctgataagctggactcggcacgcccgcaacaagcaccgaggagttaagagagccgcaagcgcagggaaggcctccccgcacgggtgggggaaagcggccggtgcagcgcggggacaggcactcgggctggcactggctgctagggatgtcgtcctggataaggtggcatggacccgccatggcgcggctctggggcttctgctggctggttgtgggcttctggagggccgctttcgcctgtcccacgtcctgcaaatgcagtgcctctcggatctggtgcagcgacccttctcctggcatcgtggcatttccgagattggagcctaacagtgtagatcctgagaacatcaccgaaattttcatcgcaaaccagaaaaggttagaaatcatcaacgaagatgatgttgaagcttatgtgggactgagaaatctgacaattgtggattctggattaaaatttgtggctcataaagcatttctgaaaaacagcaacctgcagcacatcaattttacccgaaacaaactgacgagtttgtctaggaaacatttccgtcaccttgacttgtctgaactgatcctggtgggcaatccatttacatgctcctgtgacattatgtggatcaagactctccaagaggctaaatccagtccagacactcaggatttgtactgcctgaatgaaagcagcaagaatattcccctggcaaacctgcagatacccaattgtggtttgccatctgcaaatctggccgcacctaacctcactgtggaggaaggaaagtctatcacattatcctgtagtgtggcaggtgatccggttcctaatatgtattgggatgttggtaacctggtttccaaacatatgaatgaaacaagccacacacagggctccttaaggataactaacatttcatccgatgacagtgggaagcagatctcttgtgtggcggaaaatcttgtaggagaagatcaagattctgtcaacctcactgtgcattttgcaccaactatcacatttctcgaatctccaacctcagaccaccactggtgcattccattcactgtgaaaggcaaccccaaaccagcgcttcagtggttctataacggggcaatattgaatgagtccaaatacatctgtactaaaatacatgttaccaatcacacggagtaccacggctgcctccagctggataatcccactcacatgaacaatggggactacactctaatagccaagaatgagtatgggaaggatgagaaacagatttctgctcacttcatgggctggcctggaattgacgatggtgcaaacccaaattatcctgatgtaatttatgaagattatggaactgcagcgaatgacatcggggacaccacgaacagaagtaatgaaatcccttccacagacgtcactgataaaaccggtcgggaacatctctcggtctatgctgtggtggtgattgcgtctgtggtgggattttgccttttggtaatgctgtttctgcttaagttggcaagacactccaagtttggcatgaaaggcccagcctccgttatcagcaatgatgatgactctgccagcccactccatcacatctccaatgggagtaacactccatcttcttcggaaggtggcccagatgctgtcattattggaatgaccaagatccctgtcattgaaaatccccagtactttggcatcaccaacagtcagctcaagccagacacatggcccagaggttcccccaagaccgcctgataataatttggtatttggaggctcctgtgtcactgcaggaactaaaggaggctaaatccatgcctgatggaggagaagagttctatggttatctgcaaattctggccagacaacatcttgacgtcactccttagcttccataa

SEQ ID NO: 312438 - DNA, 333 bp, Homo sapiens
cgttttggtgtttacaacatttatttatttttaggatagcttgccctcccttttaggcagggtgggaaaggagaacgcggggagggagaagggagggaggattcctataataagaatcagcgcatttttcagagctgaaccaagcacggtttccatttcaaaaagggagacagcctctaccgcgattgtagaagagactgtggtgtgaattagggaccgggaggcgtcgaacggaggaacggttcatcttagaggtacctggatgtaaatgcacacacacacacagacacacacacgcacgcgcgtgcatgtctacacggccaggatgtgtgc

SEQ ID NO: 312439 - DNA, 7499 bp, Homo sapiens
aagacggattctcagacaaggcttgcaaatgccccgcagccatcatttaactgcacccgcagaatagttacggtttgtcacccgaccctcccggatcgcctaatttgtccctagtgagaccccgaggctctgcccgcgcctggcttcttcgtagctggatgcatatcgtgctccgggcagcgcgggcgcagggcacgcgttcgcgcacaccctagcacacatgaacacgcgcaagagctgaaccaagcacggtttccatttcaaaaagggagacagcctctaccgcgattgtagaagagactgtggtgtgaattagggaccgggaggcgtcgaacggaggaacggttcatcttagagactaattttctggagtttctgcccctgctctgcgtcagccctcacgtcacttcgccagcagtagcagaggcggcggcggcggctcccggaattgggttggagcaggagcctcgctggctgcttcgctcgcgctctacgcgctcagtccccggcggtagcaggagcctggacccaggcgccgccggcgggcgtgaggcgccggagcccggcctcgaggtgcataccggacccccattcgcatctaacaaggaatctgcgccccagagagtcccgggagcgccgccggtcggtgcccggcgcgccgggccatgcagcgacggccgccgcggagctccgagcagcggtagcgcccccctgtaaagcggttcgctatgccggggccactgtgaaccctgccgcctgccggaacactcttcgctccggaccagctcagcctctgataagctggactcggcacgcccgcaacaagcaccgaggagttaagagagccgcaagcgcagggaaggcctccccgcacgggtgggggaaagcggccggtgcagcgcggggacaggcactcgggctggcactggctgctagggatgtcgtcctggataaggtggcatggacccgccatggcgcggctctggggcttctgctggctggttgtgggcttctggagggccgctttcgcctgtcccacgtcctgcaaatgcagtgcctctcggatctggtgcagcgacccttctcctggcatcgtggcatttccgagattggagcctaacagtgtagatcctgagaacatcaccgaaattttcatcgcaaaccagaaaaggttagaaatcatcaacgaagatgatgttgaagcttatgtgggactgagaaatctgacaattgtggattctggattaaaatttgtggctcataaagcatttctgaaaaacagcaacctgcagcacatcaattttacccgaaacaaactgacgagtttgtctaggaaacatttccgtcaccttgacttgtctgaactgatcctggtgggcaatccatttacatgctcctgtgacattatgtggatcaagactctccaagaggctaaatccagtccagacactcaggatttgtactgcctgaatgaaagcagcaagaatattcccctggcaaacctgcagatacccaattgtggtttgccatctgcaaatctggccgcacctaacctcactgtggaggaaggaaagtctatcacattatcctgtagtgtggcaggtgatccggttcctaatatgtattgggatgttggtaacctggtttccaaacatatgaatgaaacaagccacacacagggctccttaaggataactaacatttcatccgatgacagtgggaagcagatctcttgtgtggcggaaaatcttgtaggagaagatcaagattctgtcaacctcactgtgcattttgcaccaactatcacatttctcgaatctccaacctcagaccaccactggtgcattccattcactgtgaaaggcaaccccaaaccagcgcttcagtggttctataacggggcaatattgaatgagtccaaatacatctgtactaaaatacatgttaccaatcacacggagtaccacggctgcctccagctggataatcccactcacatgaacaatggggactacactctaatagccaagaatgagtatgggaaggatgagaaacagatttctgctcacttcatgggctggcctggaattgacgatggtgcaaacccaaattatcctgatgtaatttatgaagattatggaactgcagcgaatgacatcggggacaccacgaacagaagtaatgaaatcccttccacagacgtcactgataaaaccggtcgggaacatctctcggtctatgctgtggtggtgattgcgtctgtggtgggattttgccttttggtaatgctgtttctgcttaagttggcaagacactccaagtttggcatgaaaggttttgttttgtttcataagatcccactggatgggtagctgaaataaaggaaaagacagagaaaggggctgtggtgcttgttggttgatgctgccatgtaagctggactcctgggactgctgttggcttatcccgggaagtgctgcttatctggggttttctggtagatgtgggcggtgtttggaggctgtactatatgaagcctgcatatactgtgagctgtgattggggaacaccaatgcagaggtaactctcaggcagctaagcagcacctcaagaaaacatgttaaattaatgcttctcttcttacagtagttcaaatacaaaactgaaatgaaatcccattggattgtacttctcttctgaaaagtgtgctttttgaccctactggacatttattgacttaattgcttctgtttattaaaattgacctgcaaagttaaaaaaaaattaaagttgagaacaggtataagtgcacactgaatagtctaatctacatgtaacacatattttagtgtgattttctatactctaatcagcactgaattcagagggtttgactttttcatctataacacagtgactaaaagagttaagggtatatataccatcactttgggacttggtagtattattaaaaggttatttccttcactgtcaataaaagtccaaatgtttagcttaggtctgagagtcaaacaatgttaaggattgtcttaaagttccttagccagcaaaacaaaacaaaacaaaacaaacaaatgaaaaacgtttaaaaagaagaagaagaaaaaaaacaagaacaagcagcaacagctgttttgttggggctatagatttaagttaggcatagtcaatttcagaataactaagagtggaatatatgcatatggtgaaattataaccttgcccttttttatttgccctctgcgatccacctgctttttagaagtctgccgagtgagaaggccacagtatctcatgctgtttgcattacagaactgcagcttttctactctgaaaaggcctgggagcagaatggctggcctgctgtgagcaggagaggagattctaagaaggatagtcccccctacaacatactgtcatactgctgggttttcatgggtaggaaagcttgtcctgaccccagcagcaaagaggtggcaggtcgctaatgaatatatgctttataatgtccttcttcattgctgagagggcagccttagagctgtggatttctgcatcccccctgagtctgacccatggacacctgtttcattcactttagcatcacagtgacctttgtatgctctgttcagtctgtgtcaggcagtatgcttgtcctgaagagaggtttggctatcccccaccccaccccacccaccctgttccttttttatcaggaggacttcagagccaggcctgcagcattttgtttgaaaacacaatcagctctgacagttagacatgcacacagacgccatagctggattggaaacattgatgttttaaaaatttatttttttttggaaatagttgcacaaatgctgcaatttagctttaaggttctatagatttttaactagtccaacacagtcagaaacattgttttgaatcctctgtaaaccaaggcattaatcttaataaaccaggatccatttaggtaccacttgatataaaaaggatatccataatgaatattttatactgcatcctttacattagccactaaatacgttattgcttgatgaagacctttcacagaatcctatggattgcagcatttcacttggctacttcatacccatgccttaaagaggggcagtttctcaaaagcagaaacatgccgccagttctcaagttttcctcctaactccatttgaatgtaagggcagctggcccccaatgtggggaggtccgaacattttctgaattcccattttcttgttcgcggctaaatgacagtttctgtcattacttagattccgatctttcccaaaggtgttgatttacaaagaggccagctaatagcagaaatcatgaccctgaaagagagatgaaattcaagctgtgagccaggcaggagctcagtatggcaaaggttcttgagaatcagccatttggtacaaaaaagatttttaaagcttttatgttataccatggagccatagaaaggctatggattgtttaagaactattttaaagtgttccagacccaaaaaggaaaaataaaaaaaaaggaatatttgtacccaacagctagaaggattgcaaggtagatttttgttttaaaatggagagaagtggacagataaggccatttaatatatcaaagatcagttgacatctcctagggaatgatgaaaacagcaggctattagaaaattatttcatatagttctcgtgttcttttcttttttttaatccctgaagggatgatcagtaacatagcttctcttttctgtactctagaccaccccttttcatcattttgctttttatgtctcccataagaaatgtgctttttagagcttcctaatgcatgtgttgcattattgcagcattagaaaaggagaggtagcatttttgctgaaatcgggcctgtcactctccaataaaggttctggcacttcaatgccaggcaggtctcctaaatgaacagaatgatctgtgtgagccgatgcctgcccttccagaggggccactgtccccagccgcagccaactgtgtcccacaggaatgggagcctaggtttccaaatcttgtgattctttaggagaaacatgaaacctggatttcgtgtgaaatgtcccgattgttaaaaagttggctcaattatttttaaaacattttgtaagccaacaaaagtctgtggggctgccagtttattacttttgtcttaaaacatgatcattgttctctcacggtatccttctgtcttcccgttggcaaattcacttttctttcttcctgacattgccattgagggctttgttaccacaagctaagaaactgagtttaacagcccagttatctgcaacatgtcaattacctttgctcctctcctgtgattcccaccatgctgtgaccctcagctgtctccctttgctgggaattctgcaccaatgtctcccctcaacccattccctggttggtcctactcccgtgtggccagagacatcctagcaaatccttcctcctattatatctgacactaatttcttttcaacagcgctcatgtctcttggcccagtcaggtgctgccaggtttagataggaaagtacatgtcccattttcatgggtgcccttaatgtggtccacgtcctatatcttattatatttactcatggctcaatgggggcctccagagaccctctcaggctgctgagctagactaaggaatgcatccaccgtcatcacatgagacactgactctgtgacgacaaaagtacaaacagtctgaggctaagaaaggttcatctcacaacaggaaaaacaaatctcaacacacattagagataattgattcaggggttttctctcccagtctcccagcagggactgatttcatttctgacccactaggttttctttccagaaataggtagcaaggacaagaactaaacaatcccagccccacccagcaacacagaacacaggagtttgcttttggcttctcactctccaagtaaccctgaattaggcccagaatggctgaggcttggagcatctcctcagacagagcagaggcgacacctcttcaggggtgtgtggagtaaatagctcgaagagctgaagacagaaaaccagtttcacgccaggtgcgagagagagcgtaatggagggaagcccgctttctctctcctcttcttttctctttatttctttagagcacttgacttttttttctctctctctctagtattctaaactgaccccatgaccaactgagaatttatttttgtttcattggttgtttcacagaattagaacacacacgactttttattcctccattgcaaaatggaatcaagatactacacaagacctgtgctttcttcctttgcatgatttacacctccgcctgttttggtgctagctgtctagaacttctctcttggtttgaatctgattccttcacactacactagaagtttatttcatcttgttttgtctagactccagatacagagggacagctggactgaggacaagcaattccatctagcatagggtctctcagggttggtgcatccagccacatgggcagggccagtcacatctagtctatgtccccagagcccttggagttgcgcagcttagctgacttgactccaaggaaattagtacagaagtaaccactctattaagtgtgttctgctatgttcacatgcctgtagtacctgcaaaccatgccaggttcatctaaagacataggggaagattaaggactcttttggacagaccatgaattgaatttgctgccaggtgctgccagactgaatttggctgacagaactcccagcccaggaaagttccatgacaatgactgtcgcagaaggaaatttcccactaaagtcagtccattttcaagttttggtcttcagagacaaaagaacgtcccagccacctgattttgatggtgaggtaactctaagttgaattcaggctagtgttgcagtatagctttggcatgttcatgagtgagcacccagaatgtgttgaaccaacccccacccctaactactgactatgactgcagtgggtttttatggggaaaaaaagtgtgaaaagcaaaaagaaaggaacagagattttttatcacctttattgtaagacagtccatttatgaattgagtataaacacatacaaagtaacaagagattcctaagaaacgcaaatccttgagtttcacgcacttcatgttcaaccatttgctgtaatccagaggcagcctgtgaatcattctcatgccctgttttttttttttttttcctataatgttctgggtttaaaagccatcttttccacattttctgtaaataatggataatcattttaaaaaattttatttttagtgctgttttaacaatgtagatagatcataaatgtacttgctgaattcaatcatttttaacaagccaataaagtttgataattcat

SEQ ID NO: 312440 - DNA, 7445 bp, Homo sapiens
aagacggattctcagacaaggcttgcaaatgccccgcagccatcatttaactgcacccgcagaatagttacggtttgtcacccgaccctcccggatcgcctaatttgtccctagtgagaccccgaggctctgcccgcgcctggcttcttcgtagctggatgcatatcgtgctccgggcagcgcgggcgcagggcacgcgttcgcgcacaccctagcacacatgaacacgcgcaagagctgaaccaagcacggtttccatttcaaaaagggagacagcctctaccgcgattgtagaagagactgtggtgtgaattagggaccgggaggcgtcgaacggaggaacggttcatcttagagactaattttctggagtttctgcccctgctctgcgtcagccctcacgtcacttcgccagcagtagcagaggcggcggcggcggctcccggaattgggttggagcaggagcctcgctggctgcttcgctcgcgctctacgcgctcagtccccggcggtagcaggagcctggacccaggcgccgccggcgggcgtgaggcgccggagcccggcctcgaggtgcataccggacccccattcgcatctaacaaggaatctgcgccccagagagtcccgggagcgccgccggtcggtgcccggcgcgccgggccatgcagcgacggccgccgcggagctccgagcagcggtagcgcccccctgtaaagcggttcgctatgccggggccactgtgaaccctgccgcctgccggaacactcttcgctccggaccagctcagcctctgataagctggactcggcacgcccgcaacaagcaccgaggagttaagagagccgcaagcgcagggaaggcctccccgcacgggtgggggaaagcggccggtgcagcgcggggacaggcactcgggctggcactggctgctagggatgtcgtcctggataaggtggcatggacccgccatggcgcggctctggggcttctgctggctggttgtgggcttctggagggccgctttcgcctgtcccacgtcctgcaaatgcagtgcctctcggatctggtgcagcgacccttctcctggcatcgtggcatttccgagattggagcctaacagtgtagatcctgagaacatcaccgaaattttcatcgcaaaccagaaaaggttagaaatcatcaacgaagatgatgttgaagcttatgtgggactgagaaatctgacaattgtggattctggattaaaatttgtggctcataaagcatttctgaaaaacagcaacctgcagcacatcaattttacccgaaacaaactgacgagtttgtctaggaaacatttccgtcaccttgacttgtctgaactgatcctggtgggcaatccatttacatgctcctgtgacattatgtggatcaagactctccaagaggctaaatccagtccagacactcaggatttgtactgcctgaatgaaagcagcaagaatattcccctggcaaacctgcagatacccaattgtggtttgccatctgcaaatctggccgcacctaacctcactgtggaggaaggaaagtctatcacattatcctgtagtgtggcaggtgatccggttcctaatatgtattgggatgttggtaacctggtttccaaacatatgaatgaaacaagccacacacagggctccttaaggataactaacatttcatccgatgacagtgggaagcagatctcttgtgtggcggaaaatcttgtaggagaagatcaagattctgtcaacctcactgtgcattttgcaccaactatcacatttctcgaatctccaacctcagaccaccactggtgcattccattcactgtgaaaggcaaccccaaaccagcgcttcagtggttctataacggggcaatattgaatgagtccaaatacatctgtactaaaatacatgttaccaatcacacggagtaccacggctgcctccagctggataatcccactcacatgaacaatggggactacactctaatagccaagaatgagtatgggaaggatgagaaacagatttctgctcacttcatgggctggcctggaattgacgatggtgcaaacccaaattatcctgatgtaatttatgaagattatggaactgcagcgaatgacatcggggacaccacgaacagaagtaatgaaatcccttccacagacgtcactgataaaaccggtcgggaacatctctcggtctatgctgtggtggtgattgcgtctgtggtgggattttgccttttggtaatgctgtttctgcttaagttggcaagacactccaagtttggcatgaaaggttttgttttgtttcataagatcccactggatgggtagctgaaataaaggaaaagacagagaaaggggctgtggtgcttgttggttgatgctgccatgtaagctggactcctgggactgctgttggcttatcccgggaagtgctgcttatctggggttttctggtagatgtgggcggtgtttggaggctgtactatatgaagcctgcatatactgtgagctgtgattggggaacaccaatgcagaggtaactctcaggcagctaagcagcacctcaagaaaacatgttaaattaatgcttctcttcttacagtagttcaaatacaaaactgaaatgaaatcccattggattgtacttctcttctgaaaagtgtgctttttgaccctactggacatttattgacttaattgcttctgtttattaaaattgacctgcaaagttaaaaaaaaattaaagttgagaacaggtataagtgcacactgaatagtctaatctacatgtaacacatattttagtgtgattttctatactctaatcagcactgaattcagagggtttgactttttcatctataacacagtgactaaaagagttaagggtatatataccatcactttgggacttggtagtattattaaaaggttatttccttcactgtcaataaaagtccaaatgtttagcttaggtctgagagtcaaacaatgttaaggattgtcttaaagttccttagccagcaaaacaaaacaaaacaaaacaaacaaatgaaaaacgtttaaaaagaagaagaagaaaaaaaacaagaacaagcagcaacagctgttttgttggggctatagatttaagttaggcatagtcaatttcagaataactaagagtggaatatatgcatatggtgaaattataaccttgcccttttttatttgccctctgcgatccacctgctttttagaagtctgccgagtgagaaggccacagtatctcatgctgtttgcattacagaactgcagcttttctactctgaaaaggcctgggagcagaatggctggcctgctgtgagcaggagaggagattctaagaaggatagtcccccctacaacatactgtcatactgctgggttttcatgggtaggaaagcttgtcctgaccccagcagcaaagaggtggcaggtcgctaatgaatatatgctttataatgtccttcttcattgctgagagggcagccttagagctgtggatttctgcatcccccctgagtctgacccatggacacctgtttcattcactttagcatcacagtgacctttgtatgctctgttcagtctgtgtcaggcagtatgcttgtcctgaagagaggtttggctatcccccaccccaccccacccaccctgttccttttttatcaggaggacttcagagccaggcctgcagcattttgtttgaaaacacaatcagctctgacagttagacatgcacacagacgccatagctggattggaaacattgatgttttaaaaatttatttttttttggaaatagttgcacaaatgctgcaatttagctttaaggttctatagatttttaactagtccaacacagtcagaaacattgttttgaatcctctgtaaaccaaggcattaatcttaataaaccaggatccatttaggtaccacttgatataaaaaggatatccataatgaatattttatactgcatcctttacattagccactaaatacgttattgcttgatgaagacctttcacagaatcctatggattgcagcatttcacttggctacttcatacccatgccttaaagaggggcagtttctcaaaagcagaaacatgccgccagttctcaagttttcctcctaactccatttgaatgtaagggcagctggcccccaatgtggggaggtccgaacattttctgaattcccattttcttgttcgcggctaaatgacagtttctgtcattacttagattccgatctttcccaaaggtgttgatttacaaagaggccagctaatagcagaaatcatgaccctgaaagagagatgaaattcaagctgtgagccaggcaggagctcagtatggcaaaggttcttgagaatcagccatttggtacaaaaaagatttttaaagcttttatgttataccatggagccatagaaaggctatggattgtttaagaactattttaaagtgttccagacccaaaaaggaaaaataaaaaaaaaggaatatttgtacccaacagctagaaggattgcaaggtagatttttgttttaaaatggagagaagtggacagataaggccatttaatatatcaaagatcagttgacatctcctagggaatgatgaaaacagcaggctattagaaaattatttcatatagttctcgtgttcttttcttttttttaatccctgaagggatgatcagtaacatagcttctcttttctgtactctagaccaccccttttcatcattttgctttttatgtctcccataagaaatgtgctttttagagcttcctaatgcatgtgttgcattattgcagcattagaaaaggagaggtagcatttttgctgaaatcgggcctgtcactctccaataaaggttctggcacttcaatgccaggcaggtctcctaaatgaacagaatgatctgtgtgagccgatgcctgcccttccagaggggccactgtccccagccgcagccaactgtgtcccacaggaatgggagcctaggtttccaaatcttgtgattctttaggagaaacatgaaacctggatttcgtgtgaaatgtcccgattgttaaaaagttggctcaattatttttaaaacattttgtaagccaacaaaagtctgtggggctgccagtttattacttttgtcttaaaacatgatcattgttctctcacggtatccttctgtcttcccgttggcaaattcacttttctttcttcctgacattgccattgagggctttgttaccacaagctaagaaactgagtttaacagcccagttatctgcaacatgtcaattacctttgctcctctcctgtgattcccaccatgctgtgaccctcagctgtctccctttgctgggaattctgcaccaatgtctcccctcaacccattccctggttggtcctactcccgtgtggccagagacatcctagcaaatccttcctcctattatatctgacactaatttcttttcaacagcgctcatgtctcttggcccagtcaggtgctgccaggtttagataggaaagtacatgtcccattttcatgggtgcccttaatgtggtccacgtcctatatcttattatatttactcatggctcaatgggggcctccagagaccctctcaggctgctgagctagactaaggaatgcatccaccgtcatcacatgagacactgactctgtgacgacaaaagtacaaacagtctgaggctaagaaaggttcatctcacaacaggaaaaacaaatctcaacacacattagagataattgattcaggggttttctctcccagtctcccagcagggactgatttcatttctgacccactaggttttctttccagaaataggtagcaaggacaagaactaaacaatcccagccccacccagcaacacagaacacaggagtttgcttttggcttctcactctccaagtaaccctgaattaggcccagaatggctgaggcttggagcatctcctcagacagagcagaggcgacacctcttcaggggtgtgtggagtaaatagctcgaagagctgaagacagtctctctcctcttcttttctctttatttctttagagcacttgacttttttttctctctctctctagtattctaaactgaccccatgaccaactgagaatttatttttgtttcattggttgtttcacagaattagaacacacacgactttttattcctccattgcaaaatggaatcaagatactacacaagacctgtgctttcttcctttgcatgatttacacctccgcctgttttggtgctagctgtctagaacttctctcttggtttgaatctgattccttcacactacactagaagtttatttcatcttgttttgtctagactccagatacagagggacagctggactgaggacaagcaattccatctagcatagggtctctcagggttggtgcatccagccacatgggcagggccagtcacatctagtctatgtccccagagcccttggagttgcgcagcttagctgacttgactccaaggaaattagtacagaagtaaccactctattaagtgtgttctgctatgttcacatgcctgtagtacctgcaaaccatgccaggttcatctaaagacataggggaagattaaggactcttttggacagaccatgaattgaatttgctgccaggtgctgccagactgaatttggctgacagaactcccagcccaggaaagttccatgacaatgactgtcgcagaaggaaatttcccactaaagtcagtccattttcaagttttggtcttcagagacaaaagaacgtcccagccacctgattttgatggtgaggtaactctaagttgaattcaggctagtgttgcagtatagctttggcatgttcatgagtgagcacccagaatgtgttgaaccaacccccacccctaactactgactatgactgcagtgggtttttatggggaaaaaaagtgtgaaaagcaaaaagaaaggaacagagattttttatcacctttattgtaagacagtccatttatgaattgagtataaacacatacaaagtaacaagagattcctaagaaacgcaaatccttgagtttcacgcacttcatgttcaaccatttgctgtaatccagaggcagcctgtgaatcattctcatgccctgttttttttttttttttcctataatgttctgggtttaaaagccatcttttccacattttctgtaaataatggataatcattttaaaaaattttatttttagtgctgttttaacaatgtagatagatcataaatgtacttgctgaattcaatcatttttaacaagccaataaagtttgataattcat

SEQ ID NO: 312441 - DNA, 4582 bp, Homo sapiens
aagacggattctcagacaaggcttgcaaatgccccgcagccatcatttaactgcacccgcagaatagttacggtttgtcacccgaccctcccggatcgcctaatttgtccctagtgagaccccgaggctctgcccgcgcctggcttcttcgtagctggatgcatatcgtgctccgggcagcgcgggcgcagggcacgcgttcgcgcacaccctagcacacatgaacacgcgcaagagctgaaccaagcacggtttccatttcaaaaagggagacagcctctaccgcgattgtagaagagactgtggtgtgaattagggaccgggaggcgtcgaacggaggaacggttcatcttagagactaattttctggagtttctgcccctgctctgcgtcagccctcacgtcacttcgccagcagtagcagaggcggcggcggcggctcccggaattgggttggagcaggagcctcgctggctgcttcgctcgcgctctacgcgctcagtccccggcggtagcaggagcctggacccaggcgccgccggcgggcgtgaggcgccggagcccggcctcgaggtgcataccggacccccattcgcatctaacaaggaatctgcgccccagagagtcccgggagcgccgccggtcggtgcccggcgcgccgggccatgcagcgacggccgccgcggagctccgagcagcggtagcgcccccctgtaaagcggttcgctatgccggggccactgtgaaccctgccgcctgccggaacactcttcgctccggaccagctcagcctctgataagctggactcggcacgcccgcaacaagcaccgaggagttaagagagccgcaagcgcagggaaggcctccccgcacgggtgggggaaagcggccggtgcagcgcggggacaggcactcgggctggcactggctgctagggatgtcgtcctggataaggtggcatggacccgccatggcgcggctctggggcttctgctggctggttgtgggcttctggagggccgctttcgcctgtcccacgtcctgcaaatgcagtgcctctcggatctggtgcagcgacccttctcctggcatcgtggcatttccgagattggagcctaacagtgtagatcctgagaacatcaccgaaattttcatcgcaaaccagaaaaggttagaaatcatcaacgaagatgatgttgaagcttatgtgggactgagaaatctgacaattgtggattctggattaaaatttgtggctcataaagcatttctgaaaaacagcaacctgcagcacatcaattttacccgaaacaaactgacgagtttgtctaggaaacatttccgtcaccttgacttgtctgaactgatcctggtgggcaatccatttacatgctcctgtgacattatgtggatcaagactctccaagaggctaaatccagtccagacactcaggatttgtactgcctgaatgaaagcagcaagaatattcccctggcaaacctgcagatacccaattgtggtttgccatctgcaaatctggccgcacctaacctcactgtggaggaaggaaagtctatcacattatcctgtagtgtggcaggtgatccggttcctaatatgtattgggatgttggtaacctggtttccaaacatatgaatgaaacaagccacacacagggctccttaaggataactaacatttcatccgatgacagtgggaagcagatctcttgtgtggcggaaaatcttgtaggagaagatcaagattctgtcaacctcactgtgcattttgcaccaactatcacatttctcgaatctccaacctcagaccaccactggtgcattccattcactgtgaaaggcaaccccaaaccagcgcttcagtggttctataacggggcaatattgaatgagtccaaatacatctgtactaaaatacatgttaccaatcacacggagtaccacggctgcctccagctggataatcccactcacatgaacaatggggactacactctaatagccaagaatgagtatgggaaggatgagaaacagatttctgctcacttcatgggctggcctggaattgacgatggtgcaaacccaaattatcctgatgtaatttatgaagattatggaactgcagcgaatgacatcggggacaccacgaacagaagtaatgaaatcccttccacagacgtcactgataaaaccggtcgggaacatctctcggtctatgctgtggtggtgattgcgtctgtggtgggattttgccttttggtaatgctgtttctgcttaagttggcaagacactccaagtttggcatgaaaggcccagcctccgttatcagcaatgatgatgactctgccagcccactccatcacatctccaatgggagtaacactccatcttcttcggaaggtggcccagatgctgtcattattggaatgaccaagatccctgtcattgaaaatccccagtactttggcatcaccaacagtcagctcaagccagacacatttgttcagcacatcaagcgacataacattgttctgaaaagggagctaggcgaaggagcctttggaaaagtgttcctagctgaatgctataacctctgtcctgagcaggacaagatcttggtggcagtgaagaccctgaaggatgccagtgacaatgcacgcaaggacttccaccgtgaggccgagctcctgaccaacctccagcatgagcacatcgtcaagttctatggcgtctgcgtggagggcgaccccctcatcatggtctttgagtacatgaagcatggggacctcaacaagttcctcagggcacacggccctgatgccgtgctgatggctgagggcaacccgcccacggaactgacgcagtcgcagatgctgcatatagcccagcagatcgccgcgggcatggtctacctggcgtcccagcacttcgtgcaccgcgatttggccaccaggaactgcctggtcggggagaacttgctggtgaaaatcggggactttgggatgtcccgggacgtgtacagcactgactactacagggtcggtggccacacaatgctgcccattcgctggatgcctccagagagcatcatgtacaggaaattcacgacggaaagcgacgtctggagcctgggggtcgtgttgtgggagattttcacctatggcaaacagccctggtaccagctgtcaaacaatgaggtgatagagtgtatcactcagggccgagtcctgcagcgaccccgcacgtgcccccaggaggtgtatgagctgatgctggggtgctggcagcgagagccccacatgaggaagaacatcaagggcatccataccctccttcagaacttggccaaggcatctccggtctacctggacattctaggctagggcccttttccccagaccgatccttcccaacgtactcctcagacgggctgagaggatgaacatcttttaactgccgctggaggccaccaagctgctctccttcactctgacagtattaacatcaaagactccgagaagctctcgagggaagcagtgtgtacttcttcatccatagacacagtattgacttctttttggcattatctctttctctctttccatctcccttggttgttcctttttctttttttaaattttctttttcttcttttttttcgtcttccctgcttcacgattcttaccctttcttttgaatcaatctggcttctgcattactattaactctgcatagacaaaggccttaacaaacgtaatttgttatatcagcagacactccagtttgcccaccacaactaacaatgccttgttgtattcctgcctttgatgtggatgaaaaaaagggaaaacaaatatttcacttaaactttgtcacttctgctgtacagatatcgagagtttctatggattcacttctatttatttattattattactgttcttattgtttttggatggcttaagcctgtgtataaaaaagaaaacttgtgttcaatctgtgaagcctttatctatgggagattaaaaccagagagaaagaagatttattatgaaccgcaatatgggaggaacaaagacaaccactgggatcagctggtgtcagtccctacttaggaaatactcagcaactgttagctgggaagaatgtattcggcaccttcccctgaggacctttctgaggagtaaaaagactactggcctctgtgccatggatgattcttttcccatcaccagaaatgatagcgtgcagtagagagcaaagatggcttccgtgagacacaagatggcgcatagtgtgctcggacacagttttgtcttcgtaggttgtgatgatagcactggtttgtttctcaagcgctatccacagaacctttgtcaacttcagttgaaaagaggtggattcatgtccagagctcatttcggggtcaggtgggaaagccaagaacttggaaaagataagacaagctataaattcggaggcaagtttcttttacaatgaacttttcagatctcacttccctccgacccctaacttccatgcccacccgtccttttaa

SEQ ID NO: 312442 - DNA, 2360 bp, Homo sapiens
aagacggattctcagacaaggcttgcaaatgccccgcagccatcatttaactgcacccgcagaatagttacggtttgtcacccgaccctcccggatcgcctaatttgtccctagtgagaccccgaggctctgcccgcgcctggcttcttcgtagctggatgcatatcgtgctccgggcagcgcgggcgcagggcacgcgttcgcgcacaccctagcacacatgaacacgcgcaagagctgaaccaagcacggtttccatttcaaaaagggagacagcctctaccgcgattgtagaagagactgtggtgtgaattagggaccgggaggcgtcgaacggaggaacggttcatcttagagactaattttctggagtttctgcccctgctctgcgtcagccctcacgtcacttcgccagcagtagcagaggcggcggcggcggctcccggaattgggttggagcaggagcctcgctggctgcttcgctcgcgctctacgcgctcagtccccggcggtagcaggagcctggacccaggcgccgccggcgggcgtgaggcgccggagcccggcctcgaggtgcataccggacccccattcgcatctaacaaggaatctgcgccccagagagtcccgggagcgccgccggtcggtgcccggcgcgccgggccatgcagcgacggccgccgcggagctccgagcagcggtagcgcccccctgtaaagcggttcgctatgccggggccactgtgaaccctgccgcctgccggaacactcttcgctccggaccagctcagcctctgataagctggactcggcacgcccgcaacaagcaccgaggagttaagagagccgcaagcgcagggaaggcctccccgcacgggtgggggaaagcggccggtgcagcgcggggacaggcactcgggctggcactggctgctagggatgtcgtcctggataaggtggcatggacccgccatggcgcggctctggggcttctgctggctggttgtgggcttctggagggccgctttcgcctgtcccacgtcctgcaaatgcagtgcctctcggatctggtgcagcgacccttctcctggcatcgtggcatttccgagattggagcctaacagtgtagatcctgagaacatcaccgaaattttcatcgcaaaccagaaaaggttagaaatcatcaacgaagatgatgttgaagcttatgtgggactgagaaatctgacaattgtggattctggattaaaatttgtggctcataaagcatttctgaaaaacagcaacctgcagcacatcaattttacccgaaacaaactgacgagtttgtctaggaaacatttccgtcaccttgacttgtctgaactgatcctggtgggcaatccatttacatgctcctgtgacattatgtggatcaagactctccaagaggctaaatccagtccagacactcaggatttgtactgcctgaatgaaagcagcaagaatattcccctggcaaacctgcagatacccaattgtggtttgccatctgcaaatctggccgcacctaacctcactgtggaggaaggaaagtctatcacattatcctgtagtgtggcaggtgatccggttcctaatatgtattgggatgttggtaacctggtttccaaacatatgaatgaaacaagccacacacagggctccttaaggataactaacatttcatccgatgacagtgggaagcagatctcttgtgtggcggaaaatcttgtaggagaagatcaagattctgtcaacctcactgtgcattttgcaccaactatcacatttctcgaatctccaacctcagaccaccactggtgcattccattcactgtgaaaggcaaccccaaaccagcgcttcagtggttctataacggggcaatattgaatgagtccaaatacatctgtactaaaatacatgttaccaatcacacggagtaccacggctgcctccagctggataatcccactcacatgaacaatggggactacactctaatagccaagaatgagtatgggaaggatgagaaacagatttctgctcacttcatgggctggcctggaattgacgatggtgcaaacccaaattatcctgatgtaatttatgaagattatggaactgcagcgaatgacatcggggacaccacgaacagaagtaatgaaatcccttccacagacgtcactgataaaaccggtcgggaacatctctcggtctatgctgtggtggtgattgcgtctgtggtgggattttgccttttggtaatgctgtttctgcttaagttggcaagacactccaagtttggcatgaaagcgttgctggaagggatcctctaacat

SEQ ID NO: 312443 - DNA, 1867 bp, Homo sapiens
atcccctacactgttgtcctactgcagctatttcaaggcgcgcgcctcgtggtggactcaccgctagcccgcagcgctcggcttcctggtaattcttcacctcttttctcagctccctgcagcatgggtgctgggccctccttgctgctcgccgccctcctgctgcttctctccggcgacggcgccgtgcgctgcgacacacctgccaactgcacctatcttgacctgctgggcacctgggtcttccaggtgggctccagcggttcccagcgcgatgtcaactgctcggttatgggaccacaagaaaaaaaagtagtggtgtaccttcagaagctggatacagcatatgatgaccttggcaattctggccatttcaccatcatttacaaccaaggctttgagattgtgttgaatgactacaagtggtttgccttttttaagtataaagaagagggcagcaaggtgaccacttactgcaacgagacaatgactgggtgggtgcatgatgtgttgggccggaactgggcttgtttcaccggaaagaaggtattctaataggctctacaagtatgatcacaactttgtgaaagctatcaatgccattcagaagtcttggactgcaactacatacatggaatatgagactcttaccctgggagatatgattaggagaagtggtggccacagtcgaaaaatcccaaggcccaaacctgcaccactgactgctgaaatacagcaaaagattttgcatttgccaacatcttgggactggagaaatgttcatggtatcaattttgtcagtcctgttcgaaaccaagcatcctgtggcagctgctactcatttgcttctatgggtatgctagaagcgagaatccgtatactaaccaacaattctcagaccccaatcctaagccctcaggaggttgtgtcttgtagccagtatgctcaaggctgtgaaggcggcttcccataccttattgcaggaaagtacgcccaagattttgggctggtggaagaagcttgcttcccctacacaggcactgattctccatgcaaaatgaaggaagactgctttcgttattactcctctgagtaccactatgtaggaggtttctatggaggctgcaatgaagccctgatgaagcttgagttggtccatcatgggcccatggcagttgcttttgaagtatatgatgacttcctccactacaaaaaggggatctaccaccacactggtctaagagaccctttcaacccctttgagctgactaatcatgctgttctgcttgtgggctatggcactgactcagcctctgggatggattactggattgttaaaaacagctggggcaccggctggggtgagaatggctacttccggatccgcagaggaactgatgagtgtgcaattgagagcatagcagtggcagccacaccaattcctaaattgtagggtatgccttccagtatttcataatgatctgcatcagttgtaaaggggaattggtatattcacagactgtagactttcagcagcaatctcagaagcttacaaatagatttccatgaagatatttgtcttcagaattaaaactgcccttaattttaatatacctttcaatcggccactggccatttttttctaagtattcaattaagtgggaattttctggaagatggtcagctatgaagtaatagagtttgcttaatcatttgtaattcaaacatgctatattttttaaaatcaatgtgaaaacatagacttatttttaaattgtaccaatcacaagaaaataatggcaataattatcaaaacttttaaaatagatgctcatatttttaaaataaagttttaaaaataactgca

SEQ ID NO: 312444 - DNA, 2008 bp, Homo sapiens
tgcgtttcgtagtttgagtttgtaggcagatagtaatgaggatgtgagtccgtgggcgattatgagaatgacgcgccggtgaagcttcagaggggtatggatgagaatggctgttactacgagggctatgtggctgattgaagagtatgcaatgagcgattttaggtctgtttgtcgtaggcagatggagcttgttataattatgcctcatagggatagtacaaggaaggggtaggctatgtgttttgtcagggggttgagaatgagtgtgaggcgtattataccatagccgcctagttttaagagtactgcggcaagtactattgacccagcgaaaacggcatcttcatcggccgatgaagatgccgttttcggaccacaagaaaaaaaagtagtggtgtaccttcagaagctggatacagcatatgatgaccttggcaattctggccatttcaccatcatttacaaccaaggctttgagattgtgttgaatgactacaagtggtttgccttttttaagtataaagaagagggcagcaaggtgaccacttactgcaacgagacaatgactgggtgggtgcatgatgtgttgggccggaactgggcttgtttcaccggaaagaaggtgggaactgcctctgagaatgtgtatgtcaacacagcacaccttaagaattctcaggaaaagtattctaataggctctacaagtatgatcacaactttgtgaaagctatcaatgccattcagaagtcttggactgcaactacatacatggaatatgagactcttaccctgggagatatgattaggagaagtggtggccacagtcgaaaaatcccaaggcccaaacctgcaccactgactgctgaaatacagcaaaagattttgcatttgccaacatcttgggactggagaaatgttcatggtatcaattttgtcagtcctgttcgaaaccaagcatcctgtggcagctgctactcatttgcttctatgggtatgctagaagcgagaatccgtatactaaccaacaattctcagaccccaatcctaagccctcaggaggttgtgtcttgtagccagtatgctcaaggctgtgaaggcggcttcccataccttattgcaggaaagtacgcccaagattttgggctggtggaagaagcttgcttcccctacacaggcactgattctccatgcaaaatgaaggaagactgctttcgttattactcctctgagtaccactatgtaggaggtttctatggaggctgcaatgaagccctgatgaagcttgagttggtccatcatgggcccatggcagttgcttttgaagtatatgatgacttcctccactacaaaaaggggatctaccaccacactggtctaagagaccctttcaacccctttgagctgactaatcatgctgttctgcttgtgggctatggcactgactcagcctctgggatggattactggattgttaaaaacagctggggcaccggctggggtgagaatggctacttccggatccgcagaggaactgatgagtgtgcaattgagagcatagcagtggcagccacaccaattcctaaattgtagggtatgccttccagtatttcataatgatctgcatcagttgtaaaggggaattggtatattcacagactgtagactttcagcagcaatctcagaagcttacaaatagatttccatgaagatatttgtcttcagaattaaaactgcccttaattttaatatacctttcaatcggccactggccatttttttctaagtattcaattaagtgggaattttctggaagatggtcagctatgaagtaatagagtttgcttaatcatttgtaattcaaacatgctatattttttaaaatcaatgtgaaaacatagacttatttttaaattgtaccaatcacaagaaaataatggcaataattatcaaaacttttaaaatagatgctcatatttttaaaataaagttttaaaaataactgca

SEQ ID NO: 312445 - DNA, 2023 bp, Homo sapiens
gctcaaatagctgggactacaggcaatgcaccaccataaccagcgaatttttaaaaattatttttgtagagacagggtctcactatgttgcccaaactagtcttgaagttctgacctcagccccgcaaagtgctaggattacaggcgtgagccactgcttctgcttgcattatctcaaatttttagagcctaacttcacagtcttgcctcggagcaggaactgtttgaggcaacaagatggagcctctggtttcttcactaggcagactgtgctcaaactgggtagcatgaaaggaaagcagcacaattaaaattgaaattgggggattctttcccctattgaaatccaaataattttcctttattgtgctttttttttttttctttaggaccacaagaaaaaaaagtagtggtgtaccttcagaagctggatacagcatatgatgaccttggcaattctggccatttcaccatcatttacaaccaaggctttgagattgtgttgaatgactacaagtggtttgccttttttaagtataaagaagagggcagcaaggtgaccacttactgcaacgagacaatgactgggtgggtgcatgatgtgttgggccggaactgggcttgtttcaccggaaagaaggtgggaactgcctctgagaatgtgtatgtcaacacagcacaccttaagaattctcaggaaaagtattctaataggctctacaagtatgatcacaactttgtgaaagctatcaatgccattcagaagtcttggactgcaactacatacatggaatatgagactcttaccctgggagatatgattaggagaagtggtggccacagtcgaaaaatcccaaggcccaaacctgcaccactgactgctgaaatacagcaaaagattttgcatttgccaacatcttgggactggagaaatgttcatggtatcaattttgtcagtcctgttcgaaaccaagcatcctgtggcagctgctactcatttgcttctatgggtatgctagaagcgagaatccgtatactaaccaacaattctcagaccccaatcctaagccctcaggaggttgtgtcttgtagccagtatgctcaaggctgtgaaggcggcttcccataccttattgcaggaaagtacgcccaagattttgggctggtggaagaagcttgcttcccctacacaggcactgattctccatgcaaaatgaaggaagactgctttcgttattactcctctgagtaccactatgtaggaggtttctatggaggctgcaatgaagccctgatgaagcttgagttggtccatcatgggcccatggcagttgcttttgaagtatatgatgacttcctccactacaaaaaggggatctaccaccacactggtctaagagaccctttcaacccctttgagctgactaatcatgctgttctgcttgtgggctatggcactgactcagcctctgggatggattactggattgttaaaaacagctggggcaccggctggggtgagaatggctacttccggatccgcagaggaactgatgagtgtgcaattgagagcatagcagtggcagccacaccaattcctaaattgtagggtatgccttccagtatttcataatgatctgcatcagttgtaaaggggaattggtatattcacagactgtagactttcagcagcaatctcagaagcttacaaatagatttccatgaagatatttgtcttcagaattaaaactgcccttaattttaatatacctttcaatcggccactggccatttttttctaagtattcaattaagtgggaattttctggaagatggtcagctatgaagtaatagagtttgcttaatcatttgtaattcaaacatgctatattttttaaaatcaatgtgaaaacatagacttatttttaaattgtaccaatcacaagaaaataatggcaataattatcaaaacttttaaaatagatgctcatatttttaaaataaagttttaaaaataactgca

SEQ ID NO: 312446 - DNA, 1116 bp, Homo sapiens
ggtggccacagtcgaaaaatcccaaggcccaaacctgcaccactgactgctgaaattcgaaaccaagcatcctgtggcagctgctactcatttgcttctatgggtatgctagaagcgagaatccgtatactaaccaacaattctcagaccccaatcctaagccctcaggaggttgtgtcttgtagccagtatgctcaaggctgtgaaggcggcttcccataccttattgcaggaaagtacgcccaagattttgggctggtggaagaagcttgcttcccctacacaggcactgattctccatgcaaaatgaaggaagactgctttcgttattactcctctgagtaccactatgtaggaggtttctatggaggctgcaatgaagccctgatgaagcttgagttggtccatcatgggcccatggcagttgcttttgaagtatatgatgacttcctccactacaaaaaggggatctaccaccacactggtctaagagaccctttcaacccctttgagctgactaatcatgctgttctgcttgtgggctatggcactgactcagcctctgggatggattactggattgttaaaaacagctggggcaccggctggggtgagaatggctacttccggatccgcagaggaactgatgagtgtgcaattgagagcatagcagtggcagccacaccaattcctaaattgtagggtatgccttccagtatttcataatgatctgcatcagttgtaaaggggaattggtatattcacagactgtagactttcagcagcaatctcagaagcttacaaatagatttccatgaagatatttgtcttcagaattaaaactgcccttaattttaatatacctttcaatcggccactggccatttttttctaagtattcaattaagtgggaattttctggaagatggtcagctatgaagtaatagagtttgcttaatcatttgtaattcaaacatgctatattttttaaaatcaatgtgaaaacatagacttatttttaaattgtaccaatcacaagaaaataatggcaataattatcaaaacttttaaaatagatgctcatatttttaaaataaagttttaaaaataactgca

SEQ ID NO: 312447 - DNA, 979 bp, Homo sapiens
aggacccccatgcaataacctccgccctcattaggttgcgttttgtagcccgtatgctcaaggctgtgaaggcggcttcccataccttattgcaggaaagtacgcccaagattttgggctggtggaagaagcttgcttcccctacacaggcactgattctccatgcaaaatgaaggaagactgctttcgttattactcctctgagtaccactatgtaggaggtttctatggaggctgcaatgaagccctgatgaagcttgagttggtccatcatgggcccatggcagttgcttttgaagtatatgatgacttcctccactacaaaaaggggatctaccaccacactggtctaagagaccctttcaacccctttgagctgactaatcatgctgttctgcttgtgggctatggcactgactcagcctctgggatggattactggattgttaaaaacagctggggcaccggctggggtgagaatggctacttccggatccgcagaggaactgatgagtgtgcaattgagagcatagcagtggcagccacaccaattcctaaattgtagggtatgccttccagtatttcataatgatctgcatcagttgtaaaggggaattggtatattcacagactgtagactttcagcagcaatctcagaagcttacaaatagatttccatgaagatatttgtcttcagaattaaaactgcccttaattttaatatacctttcaatcggccactggccatttttttctaagtattcaattaagtgggaattttctggaagatggtcagctatgaagtaatagagtttgcttaatcatttgtaattcaaacatgctatattttttaaaatcaatgtgaaaacatagacttatttttaaattgtaccaatcacaagaaaataatggcaataattatcaaaacttttaaaatagatgctcatatttttaaaataaagttttaaaaataactgca

SEQ ID NO: 312448 - DNA, 929 bp, Homo sapiens
atcccctacactgttgtcctactgcagctatttcaaggcgcgcgcctcgtggtggactcaccgctagcccgcagcgctcggcttcctggtaattcttcacctcttttctcagctccctgcagcatgggtgctgggccctccttgctgctcgccgccctcctgctgcttctctccggcgacggcgccgtgcgctgcgacacacctgccaactgcacctatcttgacctgctgggcacctgggtcttccaggtgggctccagcggttcccagcgcgatgtcaactgctcggttatgggaccacaagaaaaaaaagtagtggtgtaccttcagaagctggatacagcatatgatgaccttggcaattctggccatttcaccatcatttacaaccaaggctttgagattgtgttgaatgactacaagtggtttgccttttttaaggatgtcactgattttatcagtcatttgttcatgcagctgggaactgtggggatatatgatttgccacatctgaggaacaaactggttattaaatagagcatctgttgagggactcttttaaaaccacagccatgaacagacgttggggctaagagacagagcagcctgcgacagtgtggacctacctgtagcagctagcaaaggcctctagcagctacagtcccttctggagtctttatttgcatgcaaaatgcaaaggagtcctggtgacctacctccaaggcagctgccctcctgaacactcccttggaaaacagtaaacatcattttggaatgtgaacaaccagagactacacaggagaaaggaaaaaaaaattctgaagatgcaaaatcttgggtggcttcaccgttcagttttttaataaaaggaacaatatacaacacgttgttctttttctcttttgaaatcccttctattacagtgattt

SEQ ID NO: 312449 - DNA, 1366 bp, Homo sapiens
atcccctacactgttgtcctactgcagctatttcaaggcgcgcgcctcgtggtggactcaccgctagcccgcagcgctcggcttcctggtaattcttcacctcttttctcagctccctgcagcatgggtgctgggccctccttgctgctcgccgccctcctgctgcttctctccggcgacggcgccgtgcgctgcgacacacctgccaactgcacctatcttgacctgctgggcacctgggtcttccaggtgggctccagcggttcccagcgcgatgtcaactgctcggttatgggaccacaagaaaaaaaagtagtggtgtaccttcagaagctggatacagcatatgatgaccttggcaattctggccatttcaccatcatttacaaccaaggctttgagattgtgttgaatgactacaagtggtttgccttttttaagtataaagaagagggcagcaaggtgaccacttactgcaacgagacaatgactgggtgggtgcatgatgtgttgggccggaactgggcttgtttcaccggaaagaaggtgggaactgcctctgagaatgtgtatgtcaacacagcacaccttaagaattctcaggaaaagtattctaataggctctacaagtatgatcacaactttgtgaaagctatcaatgccattcagaagtcttggactgcaactacatacatggaatatgagactcttaccctgggagatatgattaggagaagtggtggccacagtcgaaaaatcccaaggccctaacatataactgaactcctcacacccaattggaccaatctatcaccctatagaagaactaatgttagtataagtaacatgaaaacattctcctccgcataagcctgcgtcagattaaaacactgaactgacaattaacagcccaatatctacaatcaaccaacaagtcattattacccttactgtcaacccaacacaggcatgctcataaggaaaggttaaaaaaaagtaaaaggaactcggcaaatcttaccccgcctgtttaccaaaaacatcacctctagcatcaccagtattagaggcaccgcctgcccagtgacacatgtttaacggccgcggtaccctaaccgtgcaaaggtagcataatcacttgttccttaaatagggacctgtatgaatggctccacgagggttcagctgtctcttacttttaaccagtgaaattgacctgcccgtgaagagacgggcatgacacagcaagacgagaagaccctatggccgctttaatttattaatgcaaacagtacctaacaaacccacaggtcctaaactaccaaacctgcactaaaaatttcgtttgggtcgatcctcgagtatg

SEQ ID NO: 312450 - DNA, 935 bp, Homo sapiens
tgacattgtgccactgcatttcagcctgggtgacagagtgagactctgtctcaaaaacaaaacaaacagaaacaagaactctatgttgagaaatccatactagagggtttaatttctcactttgtgtgctagtgattaataaatttcaagcttatcacacagccagaaatgtcacctgtgtttctacaataaaagatttgggaatattgtgacattttttcactgagccttctgggttcattattaagatataacaattttagaagacttattgagataggtatactttttaaaatttggattcaatatatcaagctcagcattttgtcttttttttgttttggtttaaacaactttgggtttacttgtaagagtatttcagtggaggtcatgatgatgcttaatctcaacataatgactcagtttaccattgtaaactctttgtaggatgtcactgattttatcagtcatttgttcatgcagctgggaactgtggggatatatgatttgccacatctgaggaacaaactggttattaaatagagcatctgttgagggactcttttaaaaccacagccatgaacagacgttggggctaagagacagagcagcctgcgacagtgtggacctacctgtagcagctagcaaaggcctctagcagctacagtcccttctggagtctttatttgcatgcaaaatgcaaaggagtcctggtgacctacctccaaggcagctgccctcctgaacactcccttggaaaacagtaaacatcattttggaatgtgaacaaccagagactacacaggagaaaggaaaaaaaaattctgaagatgcaaaatcttgggtggcttcaccgttcagttttttaataaaaggaacaatatacaacacgttgttctttttctcttttgaaatcccttctattacagtgattt

SEQ ID NO: 312451 - DNA, 1017 bp, Homo sapiens
atcccctacactgttgtcctactgcagctatttcaaggcgcgcgcctcgtggtggactcaccgctagcccgcagcgctcggcttcctggtaattcttcacctcttttctcagctccctgcagcatgggtgctgggccctccttgctgctcgccgccctcctgctgcttctctccggcgacggcgccgtgcgctgcgacacacctgccaactgcacctatcttgacctgctgggcacctgggtcttccaggtgggctccagcggttcccagcgcgatgtcaactgctcggttatgggaccacaagaaaaaaaagtagtggtgtaccttcagaagctggatacagcatatgatgaccttggcaattctggccatttcaccatcatttacaaccaaggctttgagattgtgttgaatgactacaagtggtttgccttttttaaggatgtcactgattttatcagtcatttgttcatgcagctgggaactgtggggatatatgatttgccacatctgaggaacaaactggagggtgactggagagattatggttttcttatgaatttcttgcttgagcctgcttgtctgctgtttctaagttgtctgcactattttatttattaaatagagcatctgttgagggactcttttaaaaccacagccatgaacagacgttggggctaagagacagagcagcctgcgacagtgtggacctacctgtagcagctagcaaaggcctctagcagctacagtcccttctggagtctttatttgcatgcaaaatgcaaaggagtcctggtgacctacctccaaggcagctgccctcctgaacactcccttggaaaacagtaaacatcattttggaatgtgaacaaccagagactacacaggagaaaggaaaaaaaaattctgaagatgcaaaatcttgggtggcttcaccgttcagttttttaataaaaggaacaatatacaacacgttgttctttttctcttttgaaatcccttctattacagtgattt

SEQ ID NO: 312452 - DNA, 529 bp, Homo sapiens
  misc_feature (37)..(37): n is a, c, g, or t
gttagtattgatttggttttcaaataaaaaacaacanaaaggcttaggggaactgatctacctgcttggttcatccgctgggaactgtggggatatatgatttgccacatctgaggaacaaactggttattaaatagagcatctgttgagggactcttttaaaaccacagccatgaacagacgttggggctaagagacagagcagcctgcgacagtgtggacctacctgtagcagctagcaaaggcctctagcagctacagtcccttctggagtctttatttgcatgcaaaatgcaaaggagtcctggtgacctacctccaaggcagctgccctcctgaacactcccttggaaaacagtaaacatcattttggaatgtgaacaaccagagactacacaggagaaaggaaaaaaaaattctgaagatgcaaaatcttgggtggcttcaccgttcagttttttaataaaaggaacaatatacaacacgttgttctttttctcttttgaaatcccttctattacagtgattt

SEQ ID NO: 312453 - DNA, 651 bp, Homo sapiens
atcccctacactgttgtcctactgcagctatttcaaggcgcgcgcctcgtggtggactcaccgctagcccgcagcgctcggcttcctggtaattcttcacctcttttctcagctccctgcagcatgggtgctgggccctccttgctgctcgccgccctcctgctgcttctctccggcgacggcgccgtgcgctgcgacacacctgccaactgcacctatcttgacctgctgggcacctgggtcttccaggtgggctccagcggttcccagcgcgatgtcaactgctcggttatgggaccacaagaaaaaaaagtagtggtgtaccttcagaacttacaaatagatttccatgaagatatttgtcttcagaattaaaactgcccttaattttaatatacctttcaatcggccactggccatttttttctaagtattcaattaagtgggaattttctggaagatggtcagctatgaagtaatagagtttgcttaatcatttgtaattcaaacatgctatattttttaaaatcaatgtgaaaacatagacttatttttaaattgtaccaatcacaagaaaataatggcaataattatcaaaacttttaaaatagatgctcatatttttaaaataaagttttaaaaataactgca

SEQ ID NO: 312454 - DNA, 486 bp, Homo sapiens
acttaaagaaactgatatgattaaatattaagagacaatatgatccttgttggcttgtaaccctagtttttattgtcttgtagttattaaatagagcatctgttgagggactcttttaaaaccacagccatgaacagacgttggggctaagagacagagcagcctgcgacagtgtggacctacctgtagcagctagcaaaggcctctagcagctacagtcccttctggagtctttatttgcatgcaaaatgcaaaggagtcctggtgacctacctccaaggcagctgccctcctgaacactcccttggaaaacagtaaacatcattttggaatgtgaacaaccagagactacacaggagaaaggaaaaaaaaattctgaagatgcaaaatcttgggtggcttcaccgttcagttttttaataaaaggaacaatatacaacacgttgttctttttctcttttgaaatcccttctattacagtgattt

SEQ ID NO: 312455 - DNA, 891 bp, Homo sapiens
tgacattgtgccactgcatttcagcctgggtgacagagtgagactctgtctcaaaaacaaaacaaacagaaacaagaactctatgttgagaaatccatactagagggtttaatttctcactttgtgtgctagtgattaataaatttcaagcttatcacacagccagaaatgtcacctgtgtttctacaataaaagatttgggaatattgtgacattttttcactgagccttctgggttcattattaagatataacaattttagaagacttattgagataggtatactttttaaaatttggattcaatatatcaagctcagcattttgtcttttttttgttttggtttaaacaactttgggtttacttgtaagagtatttcagtggaggtcatgatgatgcttaatctcaacataatgactcagtttaccattgtaaactctttgtaggatgtcactgattttatcagtcatttgttcatgcagctgggaactgtggggatatatgatttgccacatctgaggaacaaactggccatgaacagacgttggggctaagagacagagcagcctgcgacagtgtggacctacctgtagcagctagcaaaggcctctagcagctacagtcccttctggagtctttatttgcatgcaaaatgcaaaggagtcctggtgacctacctccaaggcagctgccctcctgaacactcccttggaaaacagtaaacatcattttggaatgtgaacaaccagagactacacaggagaaaggaaaaaaaaattctgaagatgcaaaatcttgggtggcttcaccgttcagttttttaataaaaggaacaatatacaacacgttgttctttttctcttttgaaatcccttctattacagtgattt

SEQ ID NO: 312456 - DNA, 532 bp, Homo sapiens
gacattgtgccactgcatttcagcctgggtgacagagtgagactctgtctcaaaaacaaaacaaacagaaacaagaactctatgttgagaaatccatactagagggtttaatttctcactttgtgtgctagtgattaataaatttcaagcttatcacacagccagaaatgtcacctgtgtttctacaataaaagatttgggaatattgtgacattttttcactgagccttctgggttcattattaagatataacaattttagaagacttattgagataggtatactttttaaaatttggattcaatatatcaagctcagcattttgtcttttttttgttttggtttaaacaactttgggtttacttgtaagagtatttcagtggaggaaaagtatcagaagtttagcactgagtgcctgcctaactattttatgtcttctttcatgatgatgcttaatctcaacataatgactcagtttaccattgtaaactctttgtaggatgtcactgattttatcagtcatttgttcat

SEQ ID NO: 312457 - DNA, 480 bp, Homo sapiens
tatgtgtctttttttcatcgccagcatcctgtggcagctgctactcatttgcttctatgggtatgctagaagcgagaatccgtatactaaccaacaattctcagaccccaatcctaagccctcaggaggttgtgtcttgtagccagtatgctcaaggtaagtgttgcatttcagacaccatttatgagctatttacctgtgtgcagctggctgttgttggcaaaggcaaaaggatgatgcagtagagagagcgcagtgtctatagtcagaaaatctgagtgcaagtctggccctatcacttattaatggatgattgctcatggaatttactgtaccatccagcaaaatgtcaatagttactatatattgagtgagctctgcttgttacatatattgcctaacaatgctcaaaactctgagaagtagtaagtataatccctatttatgggcggggaacaggaactaagaaatttttctaat

SEQ ID NO: 312458 - DNA, 346 bp, Homo sapiens
ccattgaaaaatttctaactttcttattaaaagcaagcttcctcacttcctgatggcttatgcaaattaatgcctatttattcatcagagggtgactggagagattatggttttcttatgaatttcttgcttgagcctgcttgtctgctgtttctaagttgtctgcactattttatgtgagtaattttctactttattatgttctgttttcacatgtcaaatcagctctcccaagaatgctacttgtaacctaagtagacgtgaaccgaaaagggtaaagacccagctaaaaaaaaggttgactcaagttcagttcacattcgtaaagtagttaggctgccttagg

SEQ ID NO: 312459 - DNA, 1929 bp, Homo sapiens
atcccctacactgttgtcctactgcagctatttcaaggcgcgcgcctcgtggtggactcaccgctagcccgcagcgctcggcttcctggtaattcttcacctcttttctcagctccctgcagcatgggtgctgggccctccttgctgctcgccgccctcctgctgcttctctccggcgacggcgccgtgcgctgcgacacacctgccaactgcacctatcttgacctgctgggcacctgggtcttccaggtgggctccagcggttcccagcgcgatgtcaactgctcggttatgggaccacaagaaaaaaaagtagtggtgtaccttcagaagctggatacagcatatgatgaccttggcaattctggccatttcaccatcatttacaaccaaggctttgagattgtgttgaatgactacaagtggtttgccttttttaagtataaagaagagggcagcaaggtgaccacttactgcaacgagacaatgactgggtgggtgcatgatgtgttgggccggaactgggcttgtttcaccggaaagaaggtgggaactgcctctgagaatgtgtatgtcaacacagcacaccttaagaattctcaggaaaagtattctaataggctctacaagtatgatcacaactttgtgaaagctatcaatgccattcagaagtcttggactgcaactacatacatggaatatgagactcttaccctgggagatatgattaggagaagtggtggccacagtcgaaaaatcccaaggcccaaacctgcaccactgactgctgaaatacagcaaaagattttgcatttgccaacatcttgggactggagaaatgttcatggtatcaattttgtcagtcctgttcgaaaccaagcatcctgtggcagctgctactcatttgcttctatgggtatgctagaagcgagaatccgtatactaaccaacaattctcagaccccaatcctaagccctcaggaggttgtgtcttgtagccagtatgctcaaggctgtgaaggcggcttcccataccttattgcaggaaagtacgcccaagattttgggctggtggaagaagcttgcttcccctacacaggcactgattctccatgcaaaatgaaggaagactgctttcgttattactcctctgagtaccactatgtaggaggtttctatggaggctgcaatgaagccctgatgaagcttgagttggtccatcatgggcccatggcagttgcttttgaagtatatgatgacttcctccactacaaaaaggggatctaccaccacactggtctaagagaccctttcaacccctttgagctgactaatcatgctgttctgcttgtgggctatggcactgactcagcctctgggatggattactggattgttaaaaacagctggggcaccggctggggtgagaatggctacttccggatccgcagaggaactgatgagtgtgcaattgagagcatagcagtggcagccacaccaattcctaaattgtagggtatgccttccagtatttcataatgatctgcatcagttgtaaaggggaattggtatattcacagactgtagactttcagcagcaatctcagaagcttacaaatagatttccatgaagatatttgtcttcagaattaaaactgcccttaattttaatatacctttcaatcggccactggccatttttttctaagtattcaattaagtgggaattttctggaagatggtcagctatgaagtaatagagtttgcttaatcatttgtaattcaaacatgctatattttttaaaatcaatgtgaaaacatagacttatttttaaattgtaccaatcacaagaaaataatggcaataattatcaaaacttttaaaatagatgctcatatttttaaaataaagttttaaaaataactgca

SEQ ID NO: 312460 - DNA, 1722 bp, Homo sapiens
atcccctacactgttgtcctactgcagctatttcaaggcgcgcgcctcgtggtggactcaccgctagcccgcagcgctcggcttcctggaccacaagaaaaaaaagtagtggtgtaccttcagaagctggatacagcatatgatgaccttggcaattctggccatttcaccatcatttacaaccaaggctttgagattgtgttgaatgactacaagtggtttgccttttttaagtataaagaagagggcagcaaggtgaccacttactgcaacgagacaatgactgggtgggtgcatgatgtgttgggccggaactgggcttgtttcaccggaaagaaggtgggaactgcctctgagaatgtgtatgtcaacacagcacaccttaagaattctcaggaaaagtattctaataggctctacaagtatgatcacaactttgtgaaagctatcaatgccattcagaagtcttggactgcaactacatacatggaatatgagactcttaccctgggagatatgattaggagaagtggtggccacagtcgaaaaatcccaaggcccaaacctgcaccactgactgctgaaatacagcaaaagattttgcatttgccaacatcttgggactggagaaatgttcatggtatcaattttgtcagtcctgttcgaaaccaagcatcctgtggcagctgctactcatttgcttctatgggtatgctagaagcgagaatccgtatactaaccaacaattctcagaccccaatcctaagccctcaggaggttgtgtcttgtagccagtatgctcaaggctgtgaaggcggcttcccataccttattgcaggaaagtacgcccaagattttgggctggtggaagaagcttgcttcccctacacaggcactgattctccatgcaaaatgaaggaagactgctttcgttattactcctctgagtaccactatgtaggaggtttctatggaggctgcaatgaagccctgatgaagcttgagttggtccatcatgggcccatggcagttgcttttgaagtatatgatgacttcctccactacaaaaaggggatctaccaccacactggtctaagagaccctttcaacccctttgagctgactaatcatgctgttctgcttgtgggctatggcactgactcagcctctgggatggattactggattgttaaaaacagctggggcaccggctggggtgagaatggctacttccggatccgcagaggaactgatgagtgtgcaattgagagcatagcagtggcagccacaccaattcctaaattgtagggtatgccttccagtatttcataatgatctgcatcagttgtaaaggggaattggtatattcacagactgtagactttcagcagcaatctcagaagcttacaaatagatttccatgaagatatttgtcttcagaattaaaactgcccttaattttaatatacctttcaatcggccactggccatttttttctaagtattcaattaagtgggaattttctggaagatggtcagctatgaagtaatagagtttgcttaatcatttgtaattcaaacatgctatattttttaaaatcaatgtgaaaacatagacttatttttaaattgtaccaatcacaagaaaataatggcaataattatcaaaacttttaaaatagatgctcatatttttaaaataaagttttaaaaataactgca

SEQ ID NO: 312461 - DNA, 2393 bp, Homo sapiens
atcccctacactgttgtcctactgcagctatttcaaggcgcgcgcctcgtggtggactcaccgctagcccgcagcgctcggcttcctggtaattcttcacctcttttctcagctccctgcagcatgggtgctgggccctccttgctgctcgccgccctcctgctgcttctctccggcgacggcgccgtgcgctgcgacacacctgccaactgcacctatcttgacctgctgggcacctgggtcttccaggtgggctccagcggttcccagcgcgatgtcaactgctcggttatgggaccacaagaaaaaaaagtagtggtgtaccttcagaagctggatacagcatatgatgaccttggcaattctggccatttcaccatcatttacaaccaaggctttgagattgtgttgaatgactacaagtggtttgccttttttaagtataaagaagagggcagcaaggtgaccacttactgcaacgagacaatgactgggtgggtgcatgatgtgttgggccggaactgggcttgtttcaccggaaagaaggtgggaactgcctctgagaatgtgtatgtcaacacagcacaccttaagaattctcaggaaaagtattctaataggctctacaagtatgatcacaactttgtgaaagctatcaatgccattcagaagtcttggactgcaactacatacatggaatatgagactcttaccctgggagatatgattaggagaagtggtggccacagtcgaaaaatcccaaggcccaaacctgcaccactgactgctgaaatacagcaaaagattttgcatttgccaacatcttgggactggagaaatgttcatggtatcaattttgtcagtcctgttcgaaaccaagcatcctgtggcagctgctactcatttgcttctatgggtatgctagaagcgagaatccgtatactaaccaacaattctcagaccccaatcctaagccctcaggaggttgtgtcttgtagccagtatgctcaaggctgtgaaggcggcttcccataccttattgcaggaaagtacgcccaagattttgggctggtggaagaagcttgcttcccctacacaggcactgattctccatgcaaaatgaaggaagactgctttcgttattactcctctgagtaccactatgtaggaggtttctatggaggctgcaatgaagccctgatgaagcttgagttggtccatcatgggcccatggcagttgcttttgaagtatatgatgacttcctccactacaaaaaggggatctaccaccacactggtctaagagaccctttcaacccctttgagctgactaatcatgctgttctgcttgtgggctatggcactgactcagcctctgggatggattactggattgttaaaaacagctggggcaccggctggggtgagaatggctacttccggatccgcagaggaactgatgagtgtgcaattgagagcatagcagtggcagccacaccaattcctaaattgtagggtatgccttccagtatttcataatgatctgcatcagttgtaaaggggaattggtatattcacagactgtagactttcagcagcaatctcagaagcttacaaatagatttccatgaagatatttgtcttcagaattaaaactgcccttaattttaatatacctttcaatcggccactggccatttttttctaagtattcaattaagtgggaattttctggaagatggtcagctatgaagtaatagagtttgcttaatcatttgtaattcaaacatgctatattttttaaaatcaatgtgaaaacatagacttatttttaaattgtaccaatcacaagaaaataatggcaataattatcaaaacttttaaaatagatgctcatatttttaaaataaagttttaaaaataactgcaaaaaaaaaaaaaaaaaaaaaaaaaaaaaaaacaaaaaaataaaaaaaaaaaaaaaaaaaaaaaaaaaaaaaaaaaaaaaaaaaaaaaaataaaaaaaaaaggggaataaaaaaaaaaaaaaaaactaaaaaacttttgggcccctctggcccatcgattttttaaatttggacaattttttttgtggggcccaaatttgggcctctttgggcaattcccccttatgggggtgggtataaatataagtgcccgtttttaaaaccctggtttgggaaaaacctctgggttccccaattaaatcgctttgaaaaaaatcccttttccgcagtggggaatttcggaaagggcccccccagaggccttttcaaaatgtgcaacccttatgggaaatgaaaattttggggttaatttttgtaaaaatcccggttttttgtaacccttttttttaaccaagagcgcgttgt

SEQ ID NO: 312462 - DNA, 1827 bp, Homo sapiens
atcccctacactgttgtcctactgcagctatttcaaggcgcgcgcctcgtggtggactcaccgctagcccgcagcgctcggcttcctggtaattcttcacctcttttctcagctccctgcagcatgggtgctgggccctccttgctgctcgccgccctcctgctgcttctctccggcgacggcgccgtgcgctgcgacacacctgccaactgcacctatcttgacctgctgggcacctgggtcttccaggtgggctccagcggttcccagcgcgatgtcaactgctcggttatgggaccacaagaaaaaaaagtagtggtgtaccttcagaagctggatacagcatatgatgaccttggcaattctggccatttcaccatcatttacaaccaaggctttgagattgtgttgaatgactacaagtggtttgccttttttaagtataaagaagagggcagcaaggtgaccacttactgcaacgagacaatgactgggtgggtgcatgatgtgttgggccggaactgggcttgtttcaccggaaagaaggtgggaactgcctctgagaatgtgtatgtcaacacagcacaccttaagaattctcaggaaaagtattctaataggctctacaagtatgatcacaactttgtgaaagctatcaatgccattcagaagtcttggactgcaactacatacatggaatatgagactcttaccctgggagatatgattaggagaagtggtggccacagtcgaaaaatcccaaggcccaaacctgcaccactgactgctgaaatacagcaaaagattttgcatttgccaacatcttgggactggagaaatgttcatggtatcaattttgtcagtcctgttcgaaaccaagcatcctgtggcagctgctactcatttgcttctatgggtatgctagaagcgagaatccgtatactaaccaacaattctcagaccccaatcctaagccctcaggaggttgtgtcttgtagccagtatgctcaaggctgtgaaggcggcttcccataccttattgcaggaaagtacgcccaagattttgggctggtggaagaagcttgcttcccctacacaggcactgattctccatgcaaaatgaaggaagactgctttcgttattactcctctgagtaccactatgtaggaggtttctatggaggctgcaatgaagccctgatgaagcttgagttggtccatcatgggcccatggcagttgcttttgaagtatatgatgacttcctccactacaaaaaggggatctaccaccacactggtctaagagaccctttcaacccctttgagctgactaatcatgctgttctgcttgtgggctatggcactgactcagcctctgggatggattactggattgttaaaaacagctggggcaccggctggggtgagaatggctacttccggatccgcagaggaactgatgagtgtgcaattgagagcatagcagtggcagccacaccaattcctaaattgtagggtatgccttccagtatttcataatgatctgcatcagttgtaaaggggaattggtatattcacagactgtagactttcagcagcaatctcagaagcttacaaatagatttccatgaagatatttgtcttcagaattaaaactgcccttaattttaatatacctttcaatcggccactggccatttttttctaagtattcaattaagtgggaattttctggaagatggtcagctatgaagtaatagagtttgcttaatcatttgtaattcaaatgaaacttctaaactaggggtaccagctcgactctatcta

SEQ ID NO: 312463 - DNA, 1650 bp, Homo sapiens
  misc_feature (1638)..(1638): n is a, c, g, or t
atcccctacactgttgtcctactgcagctatttcaaggcgcgcgcctcgtggtggactcaccgctagcccgcagcgctcggcttcctggtaattcttcacctcttttctcagctccctgcagcatgggtgctgggccctccttgctgctcgccgccctcctgctgcttctctccggcgacggcgccgtgcgctgcgacacacctgccaactgcacctatcttgacctgctgggcacctgggtcttccaggtgggctccagcggttcccagcgcgatgtcaactgctcggttatgggaccacaagaaaaaaaagtagtggtgtaccttcagaagctggatacagcatatgatgaccttggcaattctggccatttcaccatcatttacaaccaaggctttgagattgtgttgaatgactacaagtggtttgccttttttaagtataaagaagagggcagcaaggtgaccacttactgcaacgagacaatgactgggtgggtgcatgatgtgttgggccggaactgggcttgtttcaccggaaagaaggtgggaactgcctctgagaatgtgtatgtcaacacagcacaccttaagaattctcaggaaaagtattctaataggctctacaagtatgatcacaactttgtgaaagctatcaatgccattcagaagtcttggactgcaactacatacatggaatatgagactcttaccctgggagatatgattaggagaagtggtggccacagtcgaaaaatcccaaggcccaaacctgcaccactgactgctgaaatacagcaaaagattttgcatttgccaacatcttgggactggagaaatgttcatggtatcaattttgtcagtcctgttcgaaaccaagcatcctgtggcagctgctactcatttgcttctatgggtatgctagaagcgagaatccgtatactaaccaacaattctcagaccccaatcctaagccctcaggaggttgtgtcttgtagccagtatgctcaaggctgtgaaggcggcttcccataccttattgcaggaaagtacgcccaagattttgggctggtggaagaagcttgcttcccctacacaggcactgattctccatgcaaaatgaaggaagactgctttcgttattactcctctgagtaccactatgtaggaggtttctatggaggctgcaatgaagccctgatgaagcttgagttggtccatcatgggcccatggcagttgcttttgaagtatatgatgacttcctccactacaaaaaggggatctaccaccacactggtctaagagaccctttcaacccctttgagctgactaatcatgctgttctgcttgtgggctatggcactgactcagcctctgggatggattactggattgttaaaaacagctggggcaccggctggtggtaatcgatcgagaagactgttagtgtgcatgaagctgcagtggcggccaccaatctaatggggtttctcagattcaaagatgctccggaagggatgggttccagagggattgggcttgaataaaaattgaagtttttaaaaaaggataaaaaaaaggagggttataaaagaggagaaggaaaaggtttatttaagaagtctcaataatttaangggcgtttattg

SEQ ID NO: 312464 - DNA, 870 bp, Homo sapiens
atcccctacactgttgtcctactgcagctatttcaaggcgcgcgcctcgtggtggactcaccgctagcccgcagcgctcggcttcctggtaattcttcacctcttttctcagctccctgcagcatgggtgctgggccctccttgctgctcgccgccctcctgctgcttctctccggcgacggcgccgtgcgctgcgacacacctgccaactgcacctatcttgacctgctgggcacctgggtcttccaggtgggctccagcggttcccagcgcgatgtcaactgctcggttatggcttggcaattctggccatttcaccatcatttacaaccaaggctttgagattgtgttgaatgactacaagtggtttgccttttttaaggatgtcactgattttatcagtcatttgttcatgcagctgggaactgtggggatatatgatttgccacatctgaggaacaaactggttattaaatagagcatctgttgagggactcttttaaaaccacagccatgaacagacgttggggctaagagacagagcagcctgcgacagtgtggacctacctgtagcagctagcaaaggcctctagcagctacagtcccttctggagtctttatttgcatgcaaaatgcaaaggagtcctggtgacctacctccaaggcagctgccctcctgaacactcccttggaaaacagtaaacatcattttggaatgtgaacaaccagagactacacaggagaaaggaaaaaaaaattctgaagatgcaaaatcttgggtggcttcaccgttcagttttttaataaaaggaacaatatacaacacgttgttctttttctcttttgaaatcccttctattacagtgattt

SEQ ID NO: 312465 - DNA, 844 bp, Homo sapiens
atcccctacactgttgtcctactgcagctatttcaaggcgcgcgcctcgtggtggactcaccgctagcccgcagcgctcggcttcctggtaattcttcacctcttttctcagctccctgcagcatgggtgctgggccctccttgctgctcgccgccctcctgctgcttctctccggcgacggcgccgtgcgctgcgacacacctgccaactgcacctatcttgacctgctgggcacctgggtcttccaggtgggctccagcggttcccagcgcgatgtcaactgctcggttatgggaccacaagaaaaaaaagtagtggtgtaccttcagaagctggatacagcatatgatgaccttggcaattctggccatttcaccatcatttacaaccaaggctttgagattgtgttgaatgactacaagtggtttgccttttttaagttattaaatagagcatctgttgagggactcttttaaaaccacagccatgaacagacgttggggctaagagacagagcagcctgcgacagtgtggacctacctgtagcagctagcaaaggcctctagcagctacagtcccttctggagtctttatttgcatgcaaaatgcaaaggagtcctggtgacctacctccaaggcagctgccctcctgaacactcccttggaaaacagtaaacatcattttggaatgtgaacaaccagagactacacaggagaaaggaaaaaaaaattctgaagatgcaaaatcttgggtggcttcaccgttcagttttttaataaaaggaacaatatacaacacgttgttctttttctcttttgaaatcccttctattacagtgattt

SEQ ID NO: 312466 - DNA, 323 bp, Homo sapiens
atcccctacactgttgtcctactgcagctatttcaaggcgcgcgcctcgtggtggactcaccgctagcccgcagcgctcggcttcctggtaattcttcacctcttttctcagctccctgcagcatgggtgctgggccctccttgctgctcgccgccctcctgctgcttctctccggcgacggcgccgtgcgctgcgacacacctgccaactgcacctatcttgacctgctgggcacctgggtcttccaggtgggctccagcggttcccagcgcgatgtcaactgctcggttatgggtaagccgccggctcggcagtcctccgg

SEQ ID NO: 312467 - DNA, 860 bp, Homo sapiens
gtccgagccggctggcgcaggtgacccgcagttacccgggctcggttcccacgtaatgctgggaaaccccggctgacgcgcccctcccccgcccgcagtgcggctcggcggagtacatggccccggaggtagtggaggccttcagcgaggaggctagcatctacgacaagcgctgcgacctgtggagcctgggcgtcatcttgtatatcctactcagcggctacccgcccttcgtgggccgctgtggcagcgactgcggctgggaccgcggcgaggcctgccctgcctgccagaacatgctgtttgagagcatccaggagggcaagtacgagttccccgacaaggactgggcccacatctcctgcgctgccaaagacctcatctccaagctgctggtccgtgacgccaagcagaggctgagtgccgcccaagtcctgcagcacccctgggttcaggggtgcgccccggagaacaccttgcccactcccatggtcctgcagaggtgggacagtcacttcctcctccctccccacccctgtcgcatccacgtgcgacctggaggactggtcagaaccgttactgtgaatgagtgaagatcctggaggaccctgggccccaggccagctcccatcgctgggggacggtgaacggccatgtgttaatgttacgatgtttttaaaagacaaaaaaaaaaaaaaacctcaaaagtttttttaaagtgggggaaaaacatccaagcactttaattccaatgtaccaggtgaactgacggagctcagaagttttcctttacaccaactgtcaatgccggaattttgtattctgttttgtaaagatttaataaaagtcaaaaaacttgc

SEQ ID NO: 312468 - DNA, 3743 bp, Homo sapiens
cggccgcccgccctcgggcctccccccgggccctcggtcccctcccccgctggcggggcccggacagaagatggtgcagaagaaaccagccgaacttcagggtttccaccgttcgttcaaggggcagaaccccttcgagctggccttctccctagaccagcccgaccacggagactctgactttggcctgcagtgctcagcccgccctggtgaggggcccgagggggaggagggcacagggcagctgctgtcgctgccatggcagtggccagcccctgcaggggggtgggggccggccggccagggccatgtcctgagccccctgggcgtgcctcctggaacagacatgcccgccagccagcccattgacatcccggacgccaagaagaggggcaagaagaagaagcgcggccgggccaccgacagcttctcgggcaggtttgaagacgtctaccagctgcaggaagatgtgctgggggagggcgctcatgcccgagtgcagacctgcatcaacctgatcaccagccaggagtacgccgtcaagatcattgagaagcagccaggccacattcggagcagggttttcagggaggtggagatgctgtaccagtgccagggacacaggaacgtcctagagctgattgagttcttcgaggaggaggaccgcttctacctggtgtttgagaagatgcggggaggctccatcctgagccacatccacaagcgccggcacttcaacgagctggaggccagcgtggtggtgcaggacgtggccagcgccttggactttctgcataacaaaggcatcgcccacagggacctaaagccggaaaacatcctctgtgagcaccccaaccaggtctcccccgtgaagatctgtgacttcgacctgggcagcggcatcaaactcaacggggactgctcccctatctccaccccggagctgctcactccgtgcggctcggcggagtacatggccccggaggtagtggaggccttcagcgaggaggctagcatctacgacaagcgctgcgacctgtggagcctgggcgtcatcttgtatatcctactcagcggctacccgcccttcgtgggccgctgtggcagcgactgcggctgggaccgcggcgaggcctgccctgcctgccagaacatgctgtttgagagcatccaggagggcaagtacgagttccccgacaaggactgggcccacatctcctgcgctgccaaagacctcatctccaagctgctggtccgtgacgccaagcagaggctgagtgccgcccaagtcctgcagcacccctgggttcaggggtgcgccccggagaacaccttgcccactcccatggtcctgcagaggaacagctgtgccaaagacctcacgtccttcgcggctgaggccattgccatgaaccggcagctggcccagcacgacgaggacctggctgaggaggaggccgcggggcagggccagcccgtcctggtccgagctacctcacgctgcctgcagctgtctccaccctcccagtccaagctggcgcagcggcggcaaagggccagtctgtcctcggccccagtggtcctggtgggagaccacgcctgaccctcccatctcccctctgtacataggtcacccgtcccccaatcaaatctaaaggttttttaagctatcgccagccggtgtccagcgggctgcccctcctctgcctggattcccaggcactaagctcagctgaggggggtgttttatagaaggtttttgcttttgggtttttttttcctgtttccacccctccccgttattttttcctttggatggttaaaagcattgcaggcacccgggaaggtgagcagagggtaggtgggtgggcttgtcccctccccggtcccccgccctgctcacctctactatgaaggtgcccccaggtcacctgtgctgcccgccatctgcccacgtggcttgcagtgactcaggagagcaggcccacagcgtttgccatcttgcagagctggggaggggcacaggaccctgccctcgtgttccctcccagcccgcagtatttcagggacaggctcttcccctctatccctcaccctgagagcacccctggtggcttggttggggaagggaggggctgcctgtctctggaggtgtcaggcaggcaggtggcaggcagctcacccacccaccccatgggatcccccagcccttcacccgcgcctgccttgtccccatgatagttgacaatcggggcttcctgcaaggcccgtctgtctgtccaggactcctggtggccagattcggcctccgaccttgaccttaaactgcagctgaccccaggggctcgccgctgcccctcccctccacaccaaggcctgagacagcaggagccccgcctggcccgaagccgtttccaccgcagcaggcagaggggctggacaggcactgtcagccaatgtggggggtcctgaagacacccccttggggcacccgagtgccccttctcagggctcagtctgaccgtagccacgtcctgcctcgcgccgcccctcgggcctgacctggaagctccgtcagctccgtccttgtccttagagctgagcccagaccccggggtctggccgaatcctcacccccagggcagtgtttttggtctgccaccttcaggaaaacggctgcggcctcggcctcccttcgggcacccaggaatgcgggggtctgctcagtccccccaccctccatgctccaacccccgggggctgcggagcctgctgccccctccccgcgggtggggacgttctatgcaatacagggttccactttagaagtgcgcgcggctagggtcaccgcccgcccttcccggcgcagcccccgagctccacagctggggcagcccctctggcttctaaatccgcggtcgggattcttcctcctgtttagttttttagtttttccttaaaaaaaaacaacacatcgatggactttgcttccctgttcttgaagaatacttgaatgtcggggggcctgggggtgggggcctcggagaccgtctgcctggccctgctgcccctcctgaatctcgtatgatggtcacagtccggtggccgtgggggtgctctgccttccctggtccccactgcccatatctgtggactgccccttccaaagacccctggggggggtggggcattccgcccacccctttcccccatcacttctcgcctgtcagtgattccatgtttcgtaacgggggattctctgcctttttgtatcaaagaacaagcaaatggacccccgcccgctgcaggcgcccatagccatcgggtctctaaagctgagtggctagcagcgtttgtttgtttgtttgtttttttttttctgaaggtgggacagtcacttcctcctccctccccacccctgtcgcatccacgtgcgacctggaggactggtcagaaccgttactgtgaatgagtgaagatcctggaggaccctgggccccaggccagctcccatcgctgggggacggtgaacggccatgtgttaatgttacgatgtttttaaaagacaaaaaaaaaaaaaaacctcaaaagtttttttaaagtgggggaaaaacatccaagcactttaattccaatgtaccaggtgaactgacggagctcagaagttttcctttacaccaactgtcaatgccggaattttgtattctgttttgtaaagatttaataaaagtcaaaaaacttgc

SEQ ID NO: 312469 - DNA, 3629 bp, Homo sapiens
cggccgcccgccctcgggcctccccccgggccctcggtcccctcccccgctggcggggcccggacagaagatggtgcagaagaaaccagccgaacttcagggtttccaccgttcgttcaaggggcagaaccccttcgagctggccttctccctagaccagcccgaccacggagactctgactttggcctgcagtgctcagcccgccctggtgaggggcccgagggggaggagggcacagggcagctgctgtcgctgccatggcagtggccagcccctgcaggggggtgggggccggccggccagggccatgtcctgagccccctgggcgtgcctcctggaacagacatgcccgccagccagcccattgacatcccggacgccaagaagaggggcaagaagaagaagcgcggccgggccaccgacagcttctcgggcaggtttgaagacgtctaccagctgcaggaagatgtgctgggggagggcgctcatgcccgagtgcagacctgcatcaacctgatcaccagccaggagtacgccgtcaagatcattgagaagcagccaggccacattcggagcagggttttcagggaggtggagatgctgtaccagtgccagggacacaggaacgtcctagagctgattgagttcttcgaggaggaggaccgcttctacctggtgtttgagaagatgcggggaggctccatcctgagccacatccacaagcgccggcacttcaacgagctggaggccagcgtggtggtgcaggacgtggccagcgccttggactttctgcataacaaaggcatcgcccacagggacctaaagccggaaaacatcctctgtgagcaccccaaccaggtctcccccgtgaagatctgtgacttcgacctgggcagcggcatcaaactcaacggggactgctcccctatctccaccccggagctgctcactccgtgcggctcggcggagtacatggccccggaggtagtggaggccttcagcgaggaggctagcatctacgacaagcgctgcgacaacatgctgtttgagagcatccaggagggcaagtacgagttccccgacaaggactgggcccacatctcctgcgctgccaaagacctcatctccaagctgctggtccgtgacgccaagcagaggctgagtgccgcccaagtcctgcagcacccctgggttcaggggtgcgccccggagaacaccttgcccactcccatggtcctgcagaggaacagctgtgccaaagacctcacgtccttcgcggctgaggccattgccatgaaccggcagctggcccagcacgacgaggacctggctgaggaggaggccgcggggcagggccagcccgtcctggtccgagctacctcacgctgcctgcagctgtctccaccctcccagtccaagctggcgcagcggcggcaaagggccagtctgtcctcggccccagtggtcctggtgggagaccacgcctgaccctcccatctcccctctgtacataggtcacccgtcccccaatcaaatctaaaggttttttaagctatcgccagccggtgtccagcgggctgcccctcctctgcctggattcccaggcactaagctcagctgaggggggtgttttatagaaggtttttgcttttgggtttttttttcctgtttccacccctccccgttattttttcctttggatggttaaaagcattgcaggcacccgggaaggtgagcagagggtaggtgggtgggcttgtcccctccccggtcccccgccctgctcacctctactatgaaggtgcccccaggtcacctgtgctgcccgccatctgcccacgtggcttgcagtgactcaggagagcaggcccacagcgtttgccatcttgcagagctggggaggggcacaggaccctgccctcgtgttccctcccagcccgcagtatttcagggacaggctcttcccctctatccctcaccctgagagcacccctggtggcttggttggggaagggaggggctgcctgtctctggaggtgtcaggcaggcaggtggcaggcagctcacccacccaccccatgggatcccccagcccttcacccgcgcctgccttgtccccatgatagttgacaatcggggcttcctgcaaggcccgtctgtctgtccaggactcctggtggccagattcggcctccgaccttgaccttaaactgcagctgaccccaggggctcgccgctgcccctcccctccacaccaaggcctgagacagcaggagccccgcctggcccgaagccgtttccaccgcagcaggcagaggggctggacaggcactgtcagccaatgtggggggtcctgaagacacccccttggggcacccgagtgccccttctcagggctcagtctgaccgtagccacgtcctgcctcgcgccgcccctcgggcctgacctggaagctccgtcagctccgtccttgtccttagagctgagcccagaccccggggtctggccgaatcctcacccccagggcagtgtttttggtctgccaccttcaggaaaacggctgcggcctcggcctcccttcgggcacccaggaatgcgggggtctgctcagtccccccaccctccatgctccaacccccgggggctgcggagcctgctgccccctccccgcgggtggggacgttctatgcaatacagggttccactttagaagtgcgcgcggctagggtcaccgcccgcccttcccggcgcagcccccgagctccacagctggggcagcccctctggcttctaaatccgcggtcgggattcttcctcctgtttagttttttagtttttccttaaaaaaaaacaacacatcgatggactttgcttccctgttcttgaagaatacttgaatgtcggggggcctgggggtgggggcctcggagaccgtctgcctggccctgctgcccctcctgaatctcgtatgatggtcacagtccggtggccgtgggggtgctctgccttccctggtccccactgcccatatctgtggactgccccttccaaagacccctggggggggtggggcattccgcccacccctttcccccatcacttctcgcctgtcagtgattccatgtttcgtaacgggggattctctgcctttttgtatcaaagaacaagcaaatggacccccgcccgctgcaggcgcccatagccatcgggtctctaaagctgagtggctagcagcgtttgtttgtttgtttgtttttttttttctgaaggtgggacagtcacttcctcctccctccccacccctgtcgcatccacgtgcgacctggaggactggtcagaaccgttactgtgaatgagtgaagatcctggaggaccctgggccccaggccagctcccatcgctgggggacggtgaacggccatgtgttaatgttacgatgtttttaaaagacaaaaaaaaaaaaaaacctcaaaagtttttttaaagtgggggaaaaacatccaagcactttaattccaatgtaccaggtgaactgacggagctcagaagttttcctttacaccaactgtcaatgccggaattttgtattctgttttgtaaagatttaataaaagtcaaaaaacttgc

SEQ ID NO: 312470 - DNA, 3711 bp, Homo sapiens
cggccgcccgccctcgggcctccccccgggccctcggtcccctcccccgctggcggggcccggacagaagatggtgcagaagaaaccagccgaacttcagggtttccaccgttcgttcaaggggcagaaccccttcgagctggccttctccctagaccagcccgaccacggagactctgactttggcctgcagtgctcagcccgccctgacatgcccgccagccagcccattgacatcccggacgccaagaagaggggcaagaagaagaagcgcggccgggccaccgacagcttctcgggcaggtttgaagacgtctaccagctgcaggaagatgtgctgggggagggcgctcatgcccgagtgcagacctgcatcaacctgatcaccagccaggagtacgccgtcaagatcattgagaagcagccaggccacattcggagcagggttttcagggaggtggagatgctgtaccagtgccagggacacaggaacgtcctagagctgattgagttcttcgaggaggaggaccgcttctacctggtgtttgagaagatgcggggaggctccatcctgagccacatccacaagcgccggcacttcaacgagctggaggccagcgtggtggtgcaggacgtggccagcgccttggactttctgcataacaaaggtaggtggtgaccccgcccggagtctcctagggccgcctgccaaggactcctggaagacctccagaccctcaccccgtcgtggttctgtggcttctcccccaggcatcgcccacagggacctaaagccggaaaacatcctctgtgagcaccccaaccaggtctcccccgtgaagatctgtgacttcgacctgggcagcggcatcaaactcaacggggactgctcccctatctccaccccggagctgctcactccgtgcggctcggcggagtacatggccccggaggtagtggaggccttcagcgaggaggctagcatctacgacaagcgctgcgacctgtggagcctgggcgtcatcttgtatatcctactcagcggctacccgcccttcgtgggccgctgtggcagcgactgcggctgggaccgcggcgaggcctgccctgcctgccagaacatgctgtttgagagcatccaggagggcaagtacgagttccccgacaaggactgggcccacatctcctgcgctgccaaagacctcatctccaagctgctggtccgtgacgccaagcagaggctgagtgccgcccaagtcctgcagcacccctgggttcaggggtgcgccccggagaacaccttgcccactcccatggtcctgcagaggaacagctgtgccaaagacctcacgtccttcgcggctgaggccattgccatgaaccggcagctggcccagcacgacgaggacctggctgaggaggaggccgcggggcagggccagcccgtcctggtccgagctacctcacgctgcctgcagctgtctccaccctcccagtccaagctggcgcagcggcggcaaagggccagtctgtcctcggccccagtggtcctggtgggagaccacgcctgaccctcccatctcccctctgtacataggtcacccgtcccccaatcaaatctaaaggttttttaagctatcgccagccggtgtccagcgggctgcccctcctctgcctggattcccaggcactaagctcagctgaggggggtgttttatagaaggtttttgcttttgggtttttttttcctgtttccacccctccccgttattttttcctttggatggttaaaagcattgcaggcacccgggaaggtgagcagagggtaggtgggtgggcttgtcccctccccggtcccccgccctgctcacctctactatgaaggtgcccccaggtcacctgtgctgcccgccatctgcccacgtggcttgcagtgactcaggagagcaggcccacagcgtttgccatcttgcagagctggggaggggcacaggaccctgccctcgtgttccctcccagcccgcagtatttcagggacaggctcttcccctctatccctcaccctgagagcacccctggtggcttggttggggaagggaggggctgcctgtctctggaggtgtcaggcaggcaggtggcaggcagctcacccacccaccccatgggatcccccagcccttcacccgcgcctgccttgtccccatgatagttgacaatcggggcttcctgcaaggcccgtctgtctgtccaggactcctggtggccagattcggcctccgaccttgaccttaaactgcagctgaccccaggggctcgccgctgcccctcccctccacaccaaggcctgagacagcaggagccccgcctggcccgaagccgtttccaccgcagcaggcagaggggctggacaggcactgtcagccaatgtggggggtcctgaagacacccccttggggcacccgagtgccccttctcagggctcagtctgaccgtagccacgtcctgcctcgcgccgcccctcgggcctgacctggaagctccgtcagctccgtccttgtccttagagctgagcccagaccccggggtctggccgaatcctcacccccagggcagtgtttttggtctgccaccttcaggaaaacggctgcggcctcggcctcccttcgggcacccaggaatgcgggggtctgctcagtccccccaccctccatgctccaacccccgggggctgcggagcctgctgccccctccccgcgggtggggacgttctatgcaatacagggttccactttagaagtgcgcgcggctagggtcaccgcccgcccttcccggcgcagcccccgagctccacagctggggcagcccctctggcttctaaatccgcggtcgggattcttcctcctgtttagttttttagtttttccttaaaaaaaaacaacacatcgatggactttgcttccctgttcttgaagaatacttgaatgtcggggggcctgggggtgggggcctcggagaccgtctgcctggccctgctgcccctcctgaatctcgtatgatggtcacagtccggtggccgtgggggtgctctgccttccctggtccccactgcccatatctgtggactgccccttccaaagacccctggggggggtggggcattccgcccacccctttcccccatcacttctcgcctgtcagtgattccatgtttcgtaacgggggattctctgcctttttgtatcaaagaacaagcaaatggacccccgcccgctgcaggcgcccatagccatcgggtctctaaagctgagtggctagcagcgtttgtttgtttgtttgtttttttttttctgaaggtgggacagtcacttcctcctccctccccacccctgtcgcatccacgtgcgacctggaggactggtcagaaccgttactgtgaatgagtgaagatcctggaggaccctgggccccaggccagctcccatcgctgggggacggtgaacggccatgtgttaatgttacgatgtttttaaaagacaaaaaaaaaaaaaaacctcaaaagtttttttaaagtgggggaaaaacatccaagcactttaattccaatgtaccaggtgaactgacggagctcagaagttttcctttacaccaactgtcaatgccggaattttgtattctgttttgtaaagatttaataaaagtcaaaaaacttgc

SEQ ID NO: 312471 - DNA, 3554 bp, Homo sapiens
cggccgcccgccctcgggcctccccccgggccctcggtcccctcccccgctggcggggcccggacagaagatggtgcagaagaaaccagccgaacttcagggtttccaccgttcgttcaaggggcagaaccccttcgagctggccttctccctagaccagcccgaccacggagactctgactttggcctgcagtgctcagcccgccctgacatgcccgccagccagcccattgacatcccggacgccaagaagaggggcaagaagaagaagcgcggccgggccaccgacagcttctcgggcaggtttgaagacgtctaccagctgcaggaagatgtgctgggggagggcgctcatgcccgagtgcagacctgcatcaacctgatcaccagccaggagtacgccgtcaagatcattgagaagcagccaggccacattcggagcagggttttcagggaggtggagatgctgtaccagtgccagggacacaggaacgtcctagagctgattgagttcttcgaggaggaggaccgcttctacctggtgtttgagaagatgcggggaggctccatcctgagccacatccacaagcgccggcacttcaacgagctggaggccagcgtggtggtgcaggacgtggccagcgccttggactttctgcataacaaaggcatcgcccacagggacctaaagccgttcgacctgggcagcggcatcaaactcaacggggactgctcccctatctccaccccggagctgctcactccgtgcggctcggcggagtacatggccccggaggtagtggaggccttcagcgaggaggctagcatctacgacaagcgctgcgacctgtggagcctgggcgtcatcttgtatatcctactcagcggctacccgcccttcgtgggccgctgtggcagcgactgcggctgggaccgcggcgaggcctgccctgcctgccagaacatgctgtttgagagcatccaggagggcaagtacgagttccccgacaaggactgggcccacatctcctgcgctgccaaagacctcatctccaagctgctggtccgtgacgccaagcagaggctgagtgccgcccaagtcctgcagcacccctgggttcaggggtgcgccccggagaacaccttgcccactcccatggtcctgcagaggaacagctgtgccaaagacctcacgtccttcgcggctgaggccattgccatgaaccggcagctggcccagcacgacgaggacctggctgaggaggaggccgcggggcagggccagcccgtcctggtccgagctacctcacgctgcctgcagctgtctccaccctcccagtccaagctggcgcagcggcggcaaagggccagtctgtcctcggccccagtggtcctggtgggagaccacgcctgaccctcccatctcccctctgtacataggtcacccgtcccccaatcaaatctaaaggttttttaagctatcgccagccggtgtccagcgggctgcccctcctctgcctggattcccaggcactaagctcagctgaggggggtgttttatagaaggtttttgcttttgggtttttttttcctgtttccacccctccccgttattttttcctttggatggttaaaagcattgcaggcacccgggaaggtgagcagagggtaggtgggtgggcttgtcccctccccggtcccccgccctgctcacctctactatgaaggtgcccccaggtcacctgtgctgcccgccatctgcccacgtggcttgcagtgactcaggagagcaggcccacagcgtttgccatcttgcagagctggggaggggcacaggaccctgccctcgtgttccctcccagcccgcagtatttcagggacaggctcttcccctctatccctcaccctgagagcacccctggtggcttggttggggaagggaggggctgcctgtctctggaggtgtcaggcaggcaggtggcaggcagctcacccacccaccccatgggatcccccagcccttcacccgcgcctgccttgtccccatgatagttgacaatcggggcttcctgcaaggcccgtctgtctgtccaggactcctggtggccagattcggcctccgaccttgaccttaaactgcagctgaccccaggggctcgccgctgcccctcccctccacaccaaggcctgagacagcaggagccccgcctggcccgaagccgtttccaccgcagcaggcagaggggctggacaggcactgtcagccaatgtggggggtcctgaagacacccccttggggcacccgagtgccccttctcagggctcagtctgaccgtagccacgtcctgcctcgcgccgcccctcgggcctgacctggaagctccgtcagctccgtccttgtccttagagctgagcccagaccccggggtctggccgaatcctcacccccagggcagtgtttttggtctgccaccttcaggaaaacggctgcggcctcggcctcccttcgggcacccaggaatgcgggggtctgctcagtccccccaccctccatgctccaacccccgggggctgcggagcctgctgccccctccccgcgggtggggacgttctatgcaatacagggttccactttagaagtgcgcgcggctagggtcaccgcccgcccttcccggcgcagcccccgagctccacagctggggcagcccctctggcttctaaatccgcggtcgggattcttcctcctgtttagttttttagtttttccttaaaaaaaaacaacacatcgatggactttgcttccctgttcttgaagaatacttgaatgtcggggggcctgggggtgggggcctcggagaccgtctgcctggccctgctgcccctcctgaatctcgtatgatggtcacagtccggtggccgtgggggtgctctgccttccctggtccccactgcccatatctgtggactgccccttccaaagacccctggggggggtggggcattccgcccacccctttcccccatcacttctcgcctgtcagtgattccatgtttcgtaacgggggattctctgcctttttgtatcaaagaacaagcaaatggacccccgcccgctgcaggcgcccatagccatcgggtctctaaagctgagtggctagcagcgtttgtttgtttgtttgtttttttttttctgaaggtgggacagtcacttcctcctccctccccacccctgtcgcatccacgtgcgacctggaggactggtcagaaccgttactgtgaatgagtgaagatcctggaggaccctgggccccaggccagctcccatcgctgggggacggtgaacggccatgtgttaatgttacgatgtttttaaaagacaaaaaaaaaaaaaaacctcaaaagtttttttaaagtgggggaaaaacatccaagcactttaattccaatgtaccaggtgaactgacggagctcagaagttttcctttacaccaactgtcaatgccggaattttgtattctgttttgtaaagatttaataaaagtcaaaaaacttgc

SEQ ID NO: 312472 - DNA, 847 bp, Homo sapiens
  misc_feature (10)..(11): n is a, c, g, or t
ctaaaattgnnacgatacagagaagattagcatggcccctgcgcaaggatgacacgcaaattcgtgaagcgttccatatcgatggactttgcttccctgttcttgaagaatacttgaatgtcggggggcctgggggtgggggcctcggagaccgtctgcctggccctgctgcccctcctgaatctcgtatgatggtcacagtccggtggccgtgggggtgctctgccttccctggtccccactgcccatatctgtggactgccccttccaaagacccctggggggggtggggcattccgcccacccctttcccccatcacttctcgcctgtcagtgattccatgtttcgtaacgggggattctctgcctttttgtatcaaagaacaagcaaatggacccccgcccgctgcaggcgcccatagccatcgggtctctaaagctgagtggctagcagcgtttgtttgtttgtttgtttttttttttctgaaggtgggacagtcacttcctcctccctccccacccctgtcgcatccacgtgcgacctggaggactggtcagaaccgttactgtgaatgagtgaagatcctggaggaccctgggccccaggccagctcccatcgctgggggacggtgaacggccatgtgttaatgttacgatgtttttaaaagacaaaaaaaaaaaaaaacctcaaaagtttttttaaagtgggggaaaaacatccaagcactttaattccaatgtaccaggtgaactgacggagctcagaagttttcctttacaccaactgtcaatgccggaattttgtattctgttttgtaaagatttaataaaagtcaaaaaacttgc

SEQ ID NO: 312473 - DNA, 1748 bp, Homo sapiens
cggccgcccgccctcgggcctccccccgggccctcggtcccctcccccgctggcggggcccggacagaagatggtgcagaagaaaccagccgaacttcagggtttccaccgttcgttcaaggggcagaaccccttcgagctggccttctccctagaccagcccgaccacggagactctgactttggcctgcagtgctcagcccgccctggtgaggggcccgagggggaggagggcacagggcagctgctgtcgctgccatggcagtggccagcccctgcaggggggtgggggccggccggccagggccatgtcctgagccccctgggcgtgcctcctggaacagacatgcccgccagccagcccattgacatcccggacgccaagaagaggggcaagaagaagaagcgcggccgggccaccgacagcttctcgggcaggtttgaagacgtctaccagctgcaggaagatgtgctgggggagggcgctcatgcccgagtgcagacctgcatcaacctgatcaccagccaggagtacgccgtcaagatcattgagaagcagccaggccacattcggagcagggttttcagggaggtggagatgctgtaccagtgccagggacacaggaacgtcctagagctgattgagttcttcgaggaggaggaccgcttctacctggtgtttgagaagatgcggggaggctccatcctgagccacatccacaagcgccggcacttcaacgagctggaggccagcgtggtggtgcaggacgtggccagcgccttggactttctgcataacaaaggcatcgcccacagggacctaaagccggaaaacatcctctgtgagcaccccaaccaggtctcccccgtgaagatctgtgacttcgacctgggcagcggcatcaaactcaacggggactgctcccctatctccaccccggagctgctcactccgtgcggctcggcggagtacatggccccggaggtagtggaggccttcagcgaggaggctagcatctacgacaagcgctgcgacctgtggagcctgggcgtcatcttgtatatcctactcagcggctacccgcccttcgtgggccgctgtggcagcgactgcggctgggaccgcggcgaggcctgccctgcctgccagaacatgctgtttgagagcatccaggagggcaagtacgagttccccgacaaggactgggcccacatctcctgcgctgccaaagacctcatctccaagctgctggtccgtgacgccaagcagaggctgagtgccgcccaagtcctgcagcacccctgggttcagggggtgagtaccagccgcacgggcggcaggagggtgcgccccggagaacaccttgcccactcccatggtcctgcagaggtgggacagtcacttcctcctccctccccacccctgtcgcatccacgtgcgacctggaggactggtcagaaccgttactgtgaatgagtgaagatcctggaggaccctgggccccaggccagctcccatcgctgggggacggtgaacggccatgtgttaatgttacgatgtttttaaaagacaaaaaaaaaaaaaaacctcaaaagtttttttaaagtgggggaaaaacatccaagcactttaattccaatgtaccaggtgaactgacggagctcagaagttttcctttacaccaactgtcaatgccggaattttgtattctgttttgtaaagatttaataaaagtcaaaaaacttgc

SEQ ID NO: 312474 - DNA, 1205 bp, Homo sapiens
cggccgcccgccctcgggcctccccccgggccctcggtcccctcccccgctggcggggcccggacagaagatggtgcagaagaaaccagccgaacttcagggtttccaccgttcgttcaaggggcagaaccccttcgagctggccttctccctagaccagcccgaccacggagactctgactttggcctgcagtgctcagcccgccctggtgaggggcccgagggggaggagggcacagggcagctgctgtcgctgccatggcagtggccagcccctgcaggggggtgggggccggccggccagggccatgtcctgagccccctgggcgtgcctcctggaacagacatgcccgccagccagcccattgacatcccggacgccaagaagaggggcaagaagaagaagcgcggccgggccaccgacagcttctcgggcaggtttgaagacgtctaccagctgcaggaagatgtgctgggggagggcgctcatgcccgagtgcagacctgcatcaacctgatcaccagccaggagtacgccgtcaagatcattgagaagcagccaggccacattcggagcagggttttcagggaggtggagatgctgtaccagtgccagggacacaggaacgtcctagagctgattgagttcttcgaggaggaggaccgcttctacctggtgtttgagaagatgcggggaggctccatcctgagccacatccacaagcgccggcacttcaacgagctggaggccagcgtggtggtgcaggacgtggccagcgccttggactttctgcataacaaaggcatcgcccacagggacctaaagccggaaaacatcctctgtgagcaccccaaccaggtctcccccgtgaagatctgtgacttcgacctgggcagcggcatcaaactcaacggggactgctcccctatctccaccccggagctgctcactccgtgcggctcggcggagtacatggccccggaggtagtggaggccttcagcgaggaggctagcatctacgacaagcgctgcgacctgtggagcctgggcgtcatcttgtatatcctactcagcggctacccgcccttcgtgggccgctgtggcagcgactgcggctgggaccgcggcgaggcctgccctgcctgccagagcactagtgtcctgccaagcactagtgtcctgccaagcactagtgtcctgccaa

SEQ ID NO: 312475 - DNA, 840 bp, Homo sapiens
cggccgcccgccctcgggcctccccccgggccctcggtcccctcccccgctggcggggcccggacagaagatggtgcagaagaaaccagccgaacttcagggtttccaccgttcgttcaaggggcagaaccccttcgagctggccttctccctagaccagcccgaccacggagactctgactttggcctgcagtgctcagcccgccctgacatgcccgccagccagcccattgacatcccggacgccaagaagaggggcaagaagaagaagcgcggccgggccaccgacagcttctcgggcaggtttgaagacgtctaccagctgcaggaagatgtgctgggggagggcgctcatgcccgagtgcagacctgcatcaacctgatcaccagccaggagtacgccgtcaagatcattgagaagcagccaggccacattcggagcagggttttcagggaggtggagatgctgtaccagtgccagggacacaggaacgtcctagagctgattgagttcttcgaggaggaggaccgcttctacctggtgtttgagaagatgcggggaggctccatcctgagccacatccacaagcgccggcacttcaacgagctggaggccagcgtggtggtgcaggacgtggccagcgccttggactttctgcataacaaaggtaggtggtgaccccgcccggagtctcctagggccgcctgccaaggactcctggaagacctccagaccctcaccccgtcgtggttctgtggcttctcccccaggcttcccgcatctgctcatacagcaggtagaagtggtcttcgtcgctcgaactcctcgctcgtatctta

SEQ ID NO: 312476 - DNA, 474 bp, Homo sapiens
tgaggcgaagtctcactctgtcaccaggatgctggagtgcaatggcgcgatctcagctccctgcaacctccacctcccgggttcaagtgattctcctgcctcagcctcacaagtagttgggattacaggcgtgtaccaccacacccagctaatttttatattttcagtagagacagggttttgccatgttggccaggatggtctcaatctcctgacctcatgatccacccgccttggcctcccaaagtgctgggatgacaggcgtgagccctgctttctagagttgcagggcgttaagtgtggtgaattccagccgtggcagtggagtttctggccccttctcgactatgagcgtcccaccaacccaggtgctgtgtcctttcgcctgtttcagatcattgagaagcagccaggccacattcggagcagggttttcagggaggtggagatgctgtaccagtgccagggacacag

SEQ ID NO: 312477 - DNA, 1582 bp, Homo sapiens
cggccgcccgccctcgggcctccccccgggccctcggtcccctcccccgctggcggggcccggacagaagatggtgcagaagaaaccagccgaacttcagggtttccaccgttcgttcaaggggcagaaccccttcgagctggccttctccctagaccagcccgaccacggagactctgactttggcctgcagtgctcagcccgccctgacatgcccgccagccagcccattgacatcccggacgccaagaagaggggcaagaagaagaagcgcggccgggccaccgacagcttctcgggcaggtttgaagacgtctaccagctgcaggaagatgtgctgggggagggcgctcatgcccgagtgcagacctgcatcaacctgatcaccagccaggagtacgccgtcaagatcattgagaagcagccaggccacattcggagcagggttttcagggaggtggagatgctgtaccagtgccagggacacaggaacgtcctagagctgattgagttcttcgaggaggaggaccgcttctacctggtgtttgagaagatgcggggaggctccatcctgagccacatccacaagcgccggcacttcaacgagctggaggccagcgtggtggtgcaggacgtggccagcgccttggactttctgcataacaaaggcatcgcccacagggacctaaagccggaaaacatcctctgtgagcaccccaaccaggtctcccccgtgaagatctgtgacttcgacctgggcagcggcatcaaactcaacggggactgctcccctatctccaccccggagctgctcactccgtgcggctcggcggagtacatggccccggaggtagtggaggccttcagcgaggaggctagcatctacgacaagcgctgcgacctgtggagcctgggcgtcatcttgtatatcctactcagcggctacccgcccttcgtgggccgctgtggcagcgactgcggctgggaccgcggcgaggcctgccctgcctgccagaacatgctgtttgagagcatccaggagggcaagtacgagttccccgacaaggactgggcccacatctcctgcgctgccaaagacctcatctccaagctgctggtccgtgacgccaagcagaggctgagtgccgcccaagtcctgcagcacccctgggttcaggggtgcgccccggagaacaccttgcccactcccatggtcctgcagaggtgggacagtcacttcctcctccctccccacccctgtcgcatccacgtgcgacctggaggactggtcagaaccgttactgtgaatgagtgaagatcctggaggaccctgggccccaggccagctcccatcgctgggggacggtgaacggccatgtgttaatgttacgatgtttttaaaagacaaaaaaaaaaaaaaacctcaaaagtttttttaaagtgggggaaaaacatccaagcactttaattccaatgtaccaggtgaactgacggagctcagaagttttcctttacaccaactgtcaatgccggaattttgtattctgttttgtaaagatttaataaaagtcaaaaaacttgc

SEQ ID NO: 312478 - DNA, 3608 bp, Homo sapiens
cggccgcccgccctcgggcctccccccgggccctcggtcccctcccccgctggcggggcccggacagaagatggtgcagaagaaaccagccgaacttcagggtttccaccgttcgttcaaggggcagaaccccttcgagctggccttctccctagaccagcccgaccacggagactctgactttggcctgcagtgctcagcccgccctgacatgcccgccagccagcccattgacatcccggacgccaagaagaggggcaagaagaagaagcgcggccgggccaccgacagcttctcgggcaggtttgaagacgtctaccagctgcaggaagatgtgctgggggagggcgctcatgcccgagtgcagacctgcatcaacctgatcaccagccaggagtacgccgtcaagatcattgagaagcagccaggccacattcggagcagggttttcagggaggtggagatgctgtaccagtgccagggacacaggaacgtcctagagctgattgagttcttcgaggaggaggaccgcttctacctggtgtttgagaagatgcggggaggctccatcctgagccacatccacaagcgccggcacttcaacgagctggaggccagcgtggtggtgcaggacgtggccagcgccttggactttctgcataacaaaggcatcgcccacagggacctaaagccggaaaacatcctctgtgagcaccccaaccaggtctcccccgtgaagatctgtgacttcgacctgggcagcggcatcaaactcaacggggactgctcccctatctccaccccggagctgctcactccgtgcggctcggcggagtacatggccccggaggtagtggaggccttcagcgaggaggctagcatctacgacaagcgctgcgacctgtggagcctgggcgtcatcttgtatatcctactcagcggctacccgcccttcgtgggccgctgtggcagcgactgcggctgggaccgcggcgaggcctgccctgcctgccagaacatgctgtttgagagcatccaggagggcaagtacgagttccccgacaaggactgggcccacatctcctgcgctgccaaagacctcatctccaagctgctggtccgtgacgccaagcagaggctgagtgccgcccaagtcctgcagcacccctgggttcaggggtgcgccccggagaacaccttgcccactcccatggtcctgcagaggaacagctgtgccaaagacctcacgtccttcgcggctgaggccattgccatgaaccggcagctggcccagcacgacgaggacctggctgaggaggaggccgcggggcagggccagcccgtcctggtccgagctacctcacgctgcctgcagctgtctccaccctcccagtccaagctggcgcagcggcggcaaagggccagtctgtcctcggccccagtggtcctggtgggagaccacgcctgaccctcccatctcccctctgtacataggtcacccgtcccccaatcaaatctaaaggttttttaagctatcgccagccggtgtccagcgggctgcccctcctctgcctggattcccaggcactaagctcagctgaggggggtgttttatagaaggtttttgcttttgggtttttttttcctgtttccacccctccccgttattttttcctttggatggttaaaagcattgcaggcacccgggaaggtgagcagagggtaggtgggtgggcttgtcccctccccggtcccccgccctgctcacctctactatgaaggtgcccccaggtcacctgtgctgcccgccatctgcccacgtggcttgcagtgactcaggagagcaggcccacagcgtttgccatcttgcagagctggggaggggcacaggaccctgccctcgtgttccctcccagcccgcagtatttcagggacaggctcttcccctctatccctcaccctgagagcacccctggtggcttggttggggaagggaggggctgcctgtctctggaggtgtcaggcaggcaggtggcaggcagctcacccacccaccccatgggatcccccagcccttcacccgcgcctgccttgtccccatgatagttgacaatcggggcttcctgcaaggcccgtctgtctgtccaggactcctggtggccagattcggcctccgaccttgaccttaaactgcagctgaccccaggggctcgccgctgcccctcccctccacaccaaggcctgagacagcaggagccccgcctggcccgaagccgtttccaccgcagcaggcagaggggctggacaggcactgtcagccaatgtggggggtcctgaagacacccccttggggcacccgagtgccccttctcagggctcagtctgaccgtagccacgtcctgcctcgcgccgcccctcgggcctgacctggaagctccgtcagctccgtccttgtccttagagctgagcccagaccccggggtctggccgaatcctcacccccagggcagtgtttttggtctgccaccttcaggaaaacggctgcggcctcggcctcccttcgggcacccaggaatgcgggggtctgctcagtccccccaccctccatgctccaacccccgggggctgcggagcctgctgccccctccccgcgggtggggacgttctatgcaatacagggttccactttagaagtgcgcgcggctagggtcaccgcccgcccttcccggcgcagcccccgagctccacagctggggcagcccctctggcttctaaatccgcggtcgggattcttcctcctgtttagttttttagtttttccttaaaaaaaaacaacacatcgatggactttgcttccctgttcttgaagaatacttgaatgtcggggggcctgggggtgggggcctcggagaccgtctgcctggccctgctgcccctcctgaatctcgtatgatggtcacagtccggtggccgtgggggtgctctgccttccctggtccccactgcccatatctgtggactgccccttccaaagacccctggggggggtggggcattccgcccacccctttcccccatcacttctcgcctgtcagtgattccatgtttcgtaacgggggattctctgcctttttgtatcaaagaacaagcaaatggacccccgcccgctgcaggcgcccatagccatcgggtctctaaagctgagtggctagcagcgtttgtttgtttgtttgtttttttttttctgaaggtgggacagtcacttcctcctccctccccacccctgtcgcatccacgtgcgacctggaggactggtcagaaccgttactgtgaatgagtgaagatcctggaggaccctgggccccaggccagctcccatcgctgggggacggtgaacggccatgtgttaatgttacgatgtttttaaaagacaaaaaaaaaaaaaaacctcaaaagtttttttaaagtgggggaaaaacatccaagcactttaattccaatgtaccaggtgaactgacggagctcagaagttttcctttacaccaactgtcaatgccggaattttgtattctgttttgtaaagatttaataaaagtcaaaaaacttgc

SEQ ID NO: 312479 - DNA, 3598 bp, Homo sapiens
  misc_feature (36)..(36): n is a, c, g, or t
  misc_feature (102)..(102): n is a, c, g, or t
aggcaattttttggcgacactattaatgaaaaccgnttggtgttaaaagcggtcgcgatcggatttgattgctgcagtgtcagcgcctgtgagtgctgaggngagaggcaaggcagtgtgtgtgcatgcagtggcagcctcaggtggtgggcggacgcaggccatgtcctgagccccctgggcgtgcctcctggaacagacatgcccgccagccagcccattgacatcccggacgccaagaagaggggcaagaagaagaagcgcggccgggccaccgacagcttctcgggcaggtttgaagacgtctaccagctgcaggaagatgtgctgggggagggcgctcatgcccgagtgcagacctgcatcaacctgatcaccagccaggagtacgccgtcaagatcattgagaagcagccaggccacattcggagcagggttttcagggaggtggagatgctgtaccagtgccagggacacaggaacgtcctagagctgattgagttcttcgaggaggaggaccgcttctacctggtgtttgagaagatgcggggaggctccatcctgagccacatccacaagcgccggcacttcaacgagctggaggccagcgtggtggtgcaggacgtggccagcgccttggactttctgcataacaaaggcatcgcccacagggacctaaagccggaaaacatcctctgtgagcaccccaaccaggtctcccccgtgaagatctgtgacttcgacctgggcagcggcatcaaactcaacggggactgctcccctatctccaccccggagctgctcactccgtgcggctcggcggagtacatggccccggaggtagtggaggccttcagcgaggaggctagcatctacgacaagcgctgcgacctgtggagcctgggcgtcatcttgtatatcctactcagcggctacccgcccttcgtgggccgctgtggcagcgactgcggctgggaccgcggcgaggcctgccctgcctgccagaacatgctgtttgagagcatccaggagggcaagtacgagttccccgacaaggactgggcccacatctcctgcgctgccaaagacctcatctccaagctgctggtccgtgacgccaagcagaggctgagtgccgcccaagtcctgcagcacccctgggttcaggggtgcgccccggagaacaccttgcccactcccatggtcctgcagaggaacagctgtgccaaagacctcacgtccttcgcggctgaggccattgccatgaaccggcagctggcccagcacgacgaggacctggctgaggaggaggccgcggggcagggccagcccgtcctggtccgagctacctcacgctgcctgcagctgtctccaccctcccagtccaagctggcgcagcggcggcaaagggccagtctgtcctcggccccagtggtcctggtgggagaccacgcctgaccctcccatctcccctctgtacataggtcacccgtcccccaatcaaatctaaaggttttttaagctatcgccagccggtgtccagcgggctgcccctcctctgcctggattcccaggcactaagctcagctgaggggggtgttttatagaaggtttttgcttttgggtttttttttcctgtttccacccctccccgttattttttcctttggatggttaaaagcattgcaggcacccgggaaggtgagcagagggtaggtgggtgggcttgtcccctccccggtcccccgccctgctcacctctactatgaaggtgcccccaggtcacctgtgctgcccgccatctgcccacgtggcttgcagtgactcaggagagcaggcccacagcgtttgccatcttgcagagctggggaggggcacaggaccctgccctcgtgttccctcccagcccgcagtatttcagggacaggctcttcccctctatccctcaccctgagagcacccctggtggcttggttggggaagggaggggctgcctgtctctggaggtgtcaggcaggcaggtggcaggcagctcacccacccaccccatgggatcccccagcccttcacccgcgcctgccttgtccccatgatagttgacaatcggggcttcctgcaaggcccgtctgtctgtccaggactcctggtggccagattcggcctccgaccttgaccttaaactgcagctgaccccaggggctcgccgctgcccctcccctccacaccaaggcctgagacagcaggagccccgcctggcccgaagccgtttccaccgcagcaggcagaggggctggacaggcactgtcagccaatgtggggggtcctgaagacacccccttggggcacccgagtgccccttctcagggctcagtctgaccgtagccacgtcctgcctcgcgccgcccctcgggcctgacctggaagctccgtcagctccgtccttgtccttagagctgagcccagaccccggggtctggccgaatcctcacccccagggcagtgtttttggtctgccaccttcaggaaaacggctgcggcctcggcctcccttcgggcacccaggaatgcgggggtctgctcagtccccccaccctccatgctccaacccccgggggctgcggagcctgctgccccctccccgcgggtggggacgttctatgcaatacagggttccactttagaagtgcgcgcggctagggtcaccgcccgcccttcccggcgcagcccccgagctccacagctggggcagcccctctggcttctaaatccgcggtcgggattcttcctcctgtttagttttttagtttttccttaaaaaaaaacaacacatcgatggactttgcttccctgttcttgaagaatacttgaatgtcggggggcctgggggtgggggcctcggagaccgtctgcctggccctgctgcccctcctgaatctcgtatgatggtcacagtccggtggccgtgggggtgctctgccttccctggtccccactgcccatatctgtggactgccccttccaaagacccctggggggggtggggcattccgcccacccctttcccccatcacttctcgcctgtcagtgattccatgtttcgtaacgggggattctctgcctttttgtatcaaagaacaagcaaatggacccccgcccgctgcaggcgcccatagccatcgggtctctaaagctgagtggctagcagcgtttgtttgtttgtttgtttttttttttctgaaggtgggacagtcacttcctcctccctccccacccctgtcgcatccacgtgcgacctggaggactggtcagaaccgttactgtgaatgagtgaagatcctggaggaccctgggccccaggccagctcccatcgctgggggacggtgaacggccatgtgttaatgttacgatgtttttaaaagacaaaaaaaaaaaaaaacctcaaaagtttttttaaagtgggggaaaaacatccaagcactttaattccaatgtaccaggtgaactgacggagctcagaagttttcctttacaccaactgtcaatgccggaattttgtattctgttttgtaaagatttaataaaagtcaaaaaacttgc

SEQ ID NO: 312480 - DNA, 3187 bp, Homo sapiens
gctctagtggatcccccaagccaagcattcagggaggtggagatgctgtaccagtgccagggacacaggaacgtcctagagctgattgagttcttcgaggaggaggaccgcttctacctggtgtttgagaagatgcggggaggctccatcctgagccacatccacaagcgccggcacttcaacgagctggaggccagcgtggtggtgcaggacgtggccagcgccttggactttctgcataacaaaggcatcgcccacagggacctaaagccggaaaacatcctctgtgagcaccccaaccaggtctcccccgtgaagatctgtgacttcgacctgggcagcggcatcaaactcaacggggactgctcccctatctccaccccggagctgctcactccgtgcggctcggcggagtacatggccccggaggtagtggaggccttcagcgaggaggctagcatctacgacaagcgctgcgacctgtggagcctgggcgtcatcttgtatatcctactcagcggctacccgcccttcgtgggccgctgtggcagcgactgcggctgggaccgcggcgaggcctgccctgcctgccagaacatgctgtttgagagcatccaggagggcaagtacgagttccccgacaaggactgggcccacatctcctgcgctgccaaagacctcatctccaagctgctggtccgtgacgccaagcagaggctgagtgccgcccaagtcctgcagcacccctgggttcaggggtgcgccccggagaacaccttgcccactcccatggtcctgcagaggaacagctgtgccaaagacctcacgtccttcgcggctgaggccattgccatgaaccggcagctggcccagcacgacgaggacctggctgaggaggaggccgcggggcagggccagcccgtcctggtccgagctacctcacgctgcctgcagctgtctccaccctcccagtccaagctggcgcagcggcggcaaagggccagtctgtcctcggccccagtggtcctggtgggagaccacgcctgaccctcccatctcccctctgtacataggtcacccgtcccccaatcaaatctaaaggttttttaagctatcgccagccggtgtccagcgggctgcccctcctctgcctggattcccaggcactaagctcagctgaggggggtgttttatagaaggtttttgcttttgggtttttttttcctgtttccacccctccccgttattttttcctttggatggttaaaagcattgcaggcacccgggaaggtgagcagagggtaggtgggtgggcttgtcccctccccggtcccccgccctgctcacctctactatgaaggtgcccccaggtcacctgtgctgcccgccatctgcccacgtggcttgcagtgactcaggagagcaggcccacagcgtttgccatcttgcagagctggggaggggcacaggaccctgccctcgtgttccctcccagcccgcagtatttcagggacaggctcttcccctctatccctcaccctgagagcacccctggtggcttggttggggaagggaggggctgcctgtctctggaggtgtcaggcaggcaggtggcaggcagctcacccacccaccccatgggatcccccagcccttcacccgcgcctgccttgtccccatgatagttgacaatcggggcttcctgcaaggcccgtctgtctgtccaggactcctggtggccagattcggcctccgaccttgaccttaaactgcagctgaccccaggggctcgccgctgcccctcccctccacaccaaggcctgagacagcaggagccccgcctggcccgaagccgtttccaccgcagcaggcagaggggctggacaggcactgtcagccaatgtggggggtcctgaagacacccccttggggcacccgagtgccccttctcagggctcagtctgaccgtagccacgtcctgcctcgcgccgcccctcgggcctgacctggaagctccgtcagctccgtccttgtccttagagctgagcccagaccccggggtctggccgaatcctcacccccagggcagtgtttttggtctgccaccttcaggaaaacggctgcggcctcggcctcccttcgggcacccaggaatgcgggggtctgctcagtccccccaccctccatgctccaacccccgggggctgcggagcctgctgccccctccccgcgggtggggacgttctatgcaatacagggttccactttagaagtgcgcgcggctagggtcaccgcccgcccttcccggcgcagcccccgagctccacagctggggcagcccctctggcttctaaatccgcggtcgggattcttcctcctgtttagttttttagtttttccttaaaaaaaaacaacacatcgatggactttgcttccctgttcttgaagaatacttgaatgtcggggggcctgggggtgggggcctcggagaccgtctgcctggccctgctgcccctcctgaatctcgtatgatggtcacagtccggtggccgtgggggtgctctgccttccctggtccccactgcccatatctgtggactgccccttccaaagacccctggggggggtggggcattccgcccacccctttcccccatcacttctcgcctgtcagtgattccatgtttcgtaacgggggattctctgcctttttgtatcaaagaacaagcaaatggacccccgcccgctgcaggcgcccatagccatcgggtctctaaagctgagtggctagcagcgtttgtttgtttgtttgtttttttttttctgaaggtgggacagtcacttcctcctccctccccacccctgtcgcatccacgtgcgacctggaggactggtcagaaccgttactgtgaatgagtgaagatcctggaggaccctgggccccaggccagctcccatcgctgggggacggtgaacggccatgtgttaatgttacgatgtttttaaaagacaaaaaaaaaaaaaaacctcaaaagtttttttaaagtgggggaaaaacatccaagcactttaattccaatgtaccaggtgaactgacggagctcagaagttttcctttacaccaactgtcaatgccggaattttgtattctgttttgtaaagatttaataaaagtcaaaaaacttgc

SEQ ID NO: 312481 - DNA, 3213 bp, Homo sapiens
ggacgcgtgggtcgacccacgcgtccggggaggtggagatgctgtaccagtgccaggacacaggaacgtcctagagctgattgagttcttcgaggaggaggaccgcttctacctggtgtttgagaagatgcggggaggctccatcctgagccacatccacaagcgccggcacttcaacgagctggaggccagcgtggtggtgcaggacgtggccagcgccttggactttctgcataacaaaggcatcgcccacagggacctaaagccggaaaacatcctctgtgagcaccccaaccaggtctcccccgtgaagatctgtgacttcgacctgggcagcggcatcaaactcaacggggactgctcccctatctccaccccggagctgctcactccgtgcggctcggcggagtacatggccccggaggtagtggaggccttcagcgaggaggctagcatctacgacaagcgctgcgacctgtggagcctgggcgtcatcttgtatatcctactcagcggctacccgcccttcgtgggccgctgtggcagcgactgcggctgggaccgcggcgaggcctgccctgcctgccagaacatgctgtttgagagcatccaggagggcaagtacgagttccccgacaaggactgggcccacatctcctgcgctgccaaagacctcatctccaagctgctggtccgtgacgccaagcagaggctgagtgccgcccaagtcctgcagcacccctgggttcagggggtgagtaccagccgcacgggcggcaggagggtgcgccccggagaacaccttgcccactcccatggtcctgcagaggaacagctgtgccaaagacctcacgtccttcgcggctgaggccattgccatgaaccggcagctggcccagcacgacgaggacctggctgaggaggaggccgcggggcagggccagcccgtcctggtccgagctacctcacgctgcctgcagctgtctccaccctcccagtccaagctggcgcagcggcggcaaagggccagtctgtcctcggccccagtggtcctggtgggagaccacgcctgaccctcccatctcccctctgtacataggtcacccgtcccccaatcaaatctaaaggttttttaagctatcgccagccggtgtccagcgggctgcccctcctctgcctggattcccaggcactaagctcagctgaggggggtgttttatagaaggtttttgcttttgggtttttttttcctgtttccacccctccccgttattttttcctttggatggttaaaagcattgcaggcacccgggaaggtgagcagagggtaggtgggtgggcttgtcccctccccggtcccccgccctgctcacctctactatgaaggtgcccccaggtcacctgtgctgcccgccatctgcccacgtggcttgcagtgactcaggagagcaggcccacagcgtttgccatcttgcagagctggggaggggcacaggaccctgccctcgtgttccctcccagcccgcagtatttcagggacaggctcttcccctctatccctcaccctgagagcacccctggtggcttggttggggaagggaggggctgcctgtctctggaggtgtcaggcaggcaggtggcaggcagctcacccacccaccccatgggatcccccagcccttcacccgcgcctgccttgtccccatgatagttgacaatcggggcttcctgcaaggcccgtctgtctgtccaggactcctggtggccagattcggcctccgaccttgaccttaaactgcagctgaccccaggggctcgccgctgcccctcccctccacaccaaggcctgagacagcaggagccccgcctggcccgaagccgtttccaccgcagcaggcagaggggctggacaggcactgtcagccaatgtggggggtcctgaagacacccccttggggcacccgagtgccccttctcagggctcagtctgaccgtagccacgtcctgcctcgcgccgcccctcgggcctgacctggaagctccgtcagctccgtccttgtccttagagctgagcccagaccccggggtctggccgaatcctcacccccagggcagtgtttttggtctgccaccttcaggaaaacggctgcggcctcggcctcccttcgggcacccaggaatgcgggggtctgctcagtccccccaccctccatgctccaacccccgggggctgcggagcctgctgccccctccccgcgggtggggacgttctatgcaatacagggttccactttagaagtgcgcgcggctagggtcaccgcccgcccttcccggcgcagcccccgagctccacagctggggcagcccctctggcttctaaatccgcggtcgggattcttcctcctgtttagttttttagtttttccttaaaaaaaaacaacacatcgatggactttgcttccctgttcttgaagaatacttgaatgtcggggggcctgggggtgggggcctcggagaccgtctgcctggccctgctgcccctcctgaatctcgtatgatggtcacagtccggtggccgtgggggtgctctgccttccctggtccccactgcccatatctgtggactgccccttccaaagacccctggggggggtggggcattccgcccacccctttcccccatcacttctcgcctgtcagtgattccatgtttcgtaacgggggattctctgcctttttgtatcaaagaacaagcaaatggacccccgcccgctgcaggcgcccatagccatcgggtctctaaagctgagtggctagcagcgtttgtttgtttgtttgtttttttttttctgaaggtgggacagtcacttcctcctccctccccacccctgtcgcatccacgtgcgacctggaggactggtcagaaccgttactgtgaatgagtgaagatcctggaggaccctgggccccaggccagctcccatcgctgggggacggtgaacggccatgtgttaatgttacgatgtttttaaaagacaaaaaaaaaaaaaaacctcaaaagtttttttaaagtgggggaaaaacatccaagcactttaattccaatgtaccaggtgaactgacggagctcagaagttttcctttacaccaactgtcaatgccggaattttgtattctgttttgtaaagatttaataaaagtcaaaaaacttgc

SEQ ID NO: 312482 - DNA, 2660 bp, Homo sapiens
cggccgcccgccctcgggcctccccccgggccctcggtcccctcccccgctggcggggcccggacagaagatggtgcagaagaaaccagccgaacttcagggtttccaccgttcgttcaaggggcagaaccccttcgagctggccttctccctagaccagcccgaccacggagactctgactttggcctgcagtgctcagcccgccctgacatgcccgccagccagcccattgacatcccggacgccaagaagaggggcaagaagaagaagcgcggccgggccaccgacagcttctcgggcaggtttgaagacgtctaccagctgcaggaagatgtgctgggggagggcgctcatgcccgagtgcagacctgcatcaacctgatcaccagccaggagtacgccgtcaagatcattgagaagcagccaggccacattcggagcagggttttcagggaggtggagatgctgtaccagtgccagggacacaggaacgtcctagagctgattgagttcttcgaggaggaggaccgcttctacctggtgtttgagaagatgcggggaggctccatcctgagccacatccacaagcgccggcacttcaacgagctggaggccagcgtggtggtgcaggacgtggccagcgccttggactttctgcataacaaaggcatcgcccacagggacctaaagccggaaaacatcctctgtgagcaccccaaccaggtctcccccgtgaagatctgtgacttcgacctgggcagcggcatcaaactcaacggggactgctcccctatctccaccccggagctgctcactccgtgcggctcggcggagtacatggccccggaggtagtggaggccttcagcgaggaggctagcatctacgacaagcgctgcgacctgtggagcctgggcgtcatcttgtatatcctactcagcggctacccgcccttcgtgggccgctgtggcagcgactgcggctgggaccgcggcgaggcctgccctgcctgccagaacatgctgtttgagagcatccaggagggcaagtacgagttccccgacaaggactgggcccacatctcctgcgctgccaaagacctcatctccaagctgctggtccgtgacgccaagcagaggctgagtgccgcccaagtcctgcagcacccctgggttcaggggtgcgccccggagaacaccttgcccactcccatggtcctgcagaggaacagctgtgccaaagacctcacgtccttcgcggctgaggccattgccatgaaccggcagctggcccagcacgacgaggacctggctgaggaggaggccgcggggcagggccagcccgtcctggtccgagctacctcacgctgcctgcagctgtctccaccctcccagtccaagctggcgcagcggcggcaaagggccagtctgtcctcggccccagtggtcctggtgggagaccacgcctgaccctcccatctcccctctgtacataggtcacccgtcccccaatcaaatctaaaggttttttaagctatcgccagccggtgtccagcgggctgcccctcctctgcctggattcccaggcactaagctcagctgaggggggtgttttatagaaggtttttgcttttgggtttttttttcctgtttccacccctccccgttattttttcctttggatggttaaaagcattgcaggcacccgggaaggtgagcagagggtaggtgggtgggcttgtcccctccccggtcccccgccctgctcacctctactatgaaggtgcccccaggtcacctgtgctgcccgccatctgcccacgtggcttgcagtgactcaggagagcaggcccacagcgtttgccatcttgcagagctggggaggggcacaggaccctgccctcgtgttccctcccagcccgcagtatttcagggacaggctcttcccctctatccctcaccctgagagcacccctggtggcttggttggggaagggaggggctgcctgtctctggaggtgtcaggcaggcaggtggcaggcagctcacccacccaccccatgggatcccccagcccttcacccgcgcctgccttgtccccatgatagttgacaatcggggcttcctgcaaggcccgtctgtctgtccaggactcctggtggccagattcggcctccgaccttgaccttaaactgcagctgaccccaggggctcgccgctgcccctcccctccacaccaaggcctgagacagcaggagccccgcctggcccgaagccgtttccaccgcagcaggcagaggggctggacaggcactgtcagccaatgtggggggtcctgaagacacccccttggggcacccgagtgccccttctcagggctcagtctgaccgtagccacgtcctgcctcgcgccgcccctcgggcctgacctggaagctccgtcagctccacggccatgtgttaatgttacgatgtttttaaaagacaaaaaaaaaaaaaaacctcaaaagtttttttaaagtgggggaaaaacatccaagcactttaattccaatgtaccaggtgaactgacggagctcagaagttttcctttacaccaactgtcaatgccggaattttgtattctgttttgtaaagatttaataaaagtcaaaaaacttgc

SEQ ID NO: 312483 - DNA, 1707 bp, Homo sapiens
cggccgcccgccctcgggcctccccccgggccctcggtcccctcccccgctggcggggcccggacagaagatggtgcagaagaaaccagccgaacttcagggtttccaccgttcgttcaaggggcagaaccccttcgagctggccttctccctagaccagcccgaccacggagactctgactttggcctgcagtgctcagcccgccctgacatgcccgccagccagcccattgacatcccggacgccaagaagaggggcaagaagaagaagcgcggccgggccaccgacagcttctcgggcaggtttgaagacgtctaccagctgcaggaagatgtgctgggggagggcgctcatgcccgagtgcagacctgcatcaacctgatcaccagccaggagtacgccgtcaagatcattgagaagcagccaggccacattcggagcagggttttcagggaggtggagatgctgtaccagtgccagggacacaggaacgtcctagagctgattgagttcttcgaggaggaggaccgcttctacctggtgtttgagaagatgcggggaggctccatcctgagccacatccacaagcgccggcacttcaacgagctggaggccagcgtggtggtgcaggacgtggccagcgccttggactttctgcataacaaaggcatcgcccacagggacctaaagccggaaaacatcctctgtgagcaccccaaccaggtctcccccgtgaagatctgtgacttcgacctgggcagcggcatcaaactcaacggggactgctcccctatctccaccccggagctgctcactccgtgcggctcggcggagtacatggccccggaggtagtggaggccttcagcgaggaggctagcatctacgacaagcgctgcgacctgtggagcctgggcgtcatcttgtatatcctactcagcggctacccgcccttcgtgggccgctgtggcagcgactgcggctgggaccgcggcgaggcctgccctgcctgccagaacatgctgtttgagagcatccaggagggcaagtacgagttccccgacaaggactgggcccacatctcctgcgctgccaaagacctcatctccaagctgctggtccgtgacgccaagcagaggctgagtgccgcccaagtcctgcagcacccctgggttcaggggtgcgccccggagaacaccttgcccactcccatggtcctgcagaggaacagctgtgccaaagacctcacgtccttcgcggctgaggccattgccatgaaccggcagctggcccagcacgacgaggacctggctgaggaggaggccgcggggcagggccagcccgtcctggtccgagctacctcacgctgcctgcagctgtctccaccctcccagtccaagctggcgcagcggcggcaaagggccagtctgtcctcggccccagtggtcctggtgggagaccacgcctgaccctcccatctcccctctgtacatagacggccatgtgttaatgttacgatgtttttaaaagacaaaaaaaaaaaaaaacctcaaaagtttttttaaagtgggggaaaaacatccaagcactttaattccaatgtaccaggtgaactgacggagctcagaagttttcctttacaccaactgtcaatgccggaattttgtattctgttttgtaaagatttaataaaagtcaaaaaacttgc

SEQ ID NO: 312484 - DNA, 460 bp, Homo sapiens
ccggccgcccgccctcgggcctccccccgggccctcggtcccctcccccgctggcggggcccggacagaagatggtgcagaagaaaccagccgaacttcagggtttccaccgttcgttcaaggtgaggcccggggtcggtttgggggcgctccgggctggaccaccggaatggccggcgtggggggcgcggggcccgcccctaagatcggctcccggggctcgtgcctggcccccgccctacacccggggctgcccgggccggccgtgcgctgaagcggggtcggtgtgcgaggatgggggttcagcaggccacagtcctctctccagccatggccgccgggtccttcctccaggacccccaagtgaggctgggagcaggagccccctccgggtcagggcaccaggctgtgtgtcccctgcaagcccccgccgggtatgttctggggggtcagcaggctg

SEQ ID NO: 312485 - DNA, 2312 bp, Homo sapiens
cgcgctggagaggcgcggggtcaagacgtccggcctcgggggcccgggctgggccgccgagtcccctgggcggcgctgagcgggcgggaggcgggggcccgcggctcggggcaaccgaggccgggtcgcgggatcggccgccatcgccgccgccgctgcactgggagcccgcggggatggagcgggaggcgttgccgtggggcctcgagccccaggatgtgcagagttctgacgaaatgaggagccccgaagggtacctcagaggcaacatgagtgagaatgaggaagaggaaatttctcagcaagaaggcagtggggactatgaagtcgaagagataccatttgggcttgaaccccagagccctgggtttgagccacaaagcccagagtttgaaccccaaagccccagatttgagcctgaaagcccggggtttgagtcccgaagccctgggcttgtgcccccaagccctgagtttgcacccagaagccctgaatcagattctcagagccctgagtttgaatcccagagccctaggtatgaaccccaaagccctggctatgaacctcggagccccgggtatgaaccccggagccctggctatgaatctgagagctctagatatgaatcccagaacactgagctcaaaacccaaagcccagaatttgaagctcaaagttccaaattccaggaaggtgcggagatgcttctgaaccccgacgaaaagagtcctttgaatatctccgtaggagttcaccccctggactccttcactcaggggtttggggagcagcccacaggggacctgcccatagggccaccttttgagatgcccacaggggccctgctgtctacaccgcagtttgagatgcttcagaatcccctgggtctcacaggagcccttcgaggtccaggtcggcggggtggccgggccaggggtgggcagggccctcggcctaacatctgcggcatctgcgggaagagcttcgggcggggctccaccctgatccagcaccagcgcatccacaccggtgagaagccctacaaatgtgaggtctgcagcaaggccttctcccagagctctgacctcatcaaacaccagcgcacccacactggcgagcggccctacaaatgtccccgttgcggcaaggccttcgccgacagctcttacctgcttcgccaccagcgcactcactctggccagaagccctacaagtgcccacattgtggcaaggccttcggcgacagctcctacctcctgcgacaccagcgcacccacagccacgagcggccctacagctgcaccgagtgcggcaagtgctatagccagaactcgtccctgcgcagccatcagagggtgcacaccggtcagaggcccttcagctgtggcatctgcggcaagagcttctcccagcggtcggcccttatcccccatgcccgcagccacgcccgggagaagcccttcaagtgccctgagtgcggcaagcgctttggccagagctcggtgctggccatccacgcccgcacccacctgccaggccgcacctacagctgccccgactgcggcaagaccttcaatcgctcctccactctcatccagcaccagcgctcccacacgggcgagcggccctacaggtgcgccgtgtgcggcaagggcttctgccgctcctccacgcttctgcagcatcaccgggtccacagtggcgagcggccttacaagtgcgatgactgcggaaaggccttctcccagagctccgacctcatccgccaccagcggacccacgcggcgggccggcgctgacctggggccccagcaggggtgggaggtgtgggcagaagataaggggccagggagctagaggaacctttagggaggatagtggagaagccgcaggagaatggaggagctgaggatgctggaagaagagaaccagggtggaggaagtgacatgccctggagacttgtgggaagtgggttggagggaggccaggccggcagcgggaggccctgggagaaatggagagaggtcagcggagggctggcctcagccgcggctccttggtgggtgcctggcttggcaactgctagagcagggaggggggagggcaggggattacctaattagagtgggttagcttagattggtagctgctgaaactctcgttgagtcaggagcgggtaaaaggtaggtggggtggggagtggggccccggggtggggcctgggcctctgcgtgcaaaccccagcctccctcttcttcctcaggctttggagcccctgagtttgagttcaataaaaactttatgtggtaaa

SEQ ID NO: 312486 - DNA, 2236 bp, Homo sapiens
cgcgctggagaggcgcggggtcaagacgtccggcctcgggggcccgggctgggccgccgagtcccctgggcggcgctgagcgggcgggaggcgggggcccgcggctcggggcaaccgaggccgggtcgcgggatcggccgccatcgccgccgccgctgcactgggagcccgcggggatggagcgggaggcgttgccgtggggcctcgagccccaggatgtgcagagttctgacgaaatgaggagccccgaagggtacctcagaggcaacatgagtgagaatgaggaagaggaaatttctcagcaagaaggcagtggggactatgaagtcgaagagataccatttgggcttgaaccccagagccctgggtttgagccacaaagcccagagtttgaaccccaaagccccagatttgagcctgaaagcccggggtttgagtcccgaagccctgggcttgtgcccccaagccctgagtttgcacccagaagccctgaatcagattctcagagccctgagtttgaatcccagagccctaggtatgaaccccaaagccctggctatgaacctcggagccccgggtatgaaccccggagccctggctatgaatctgagagctctagatatgaatcccagaacactgagctcaaaacccaaagcccagaatttgaagctcaaagttccaaattccaggaaggtgcggagatgcttctgaaccccgacgaaaagagtcctttgaatatctccgtaggagttcaccccctggactccttcactcaggggtttggggagcagcccacaggggacctgcccatagggccaccttttgagatgcccacaggggccctgctgtctacaccgcagtttgagatgcttcagaatcccctgggtctcacaggagcccttcgaggtccaggtcggcggggtggccgggccaggggtgggcagggccctcggcctaacatctgcggcatctgcgggaagagcttcgggcggggctccaccctgatccagcaccagcgcatccacaccggtgagaagccctacaaatgtgaggtctgcagcaaggccttctcccagagctctgacctcatcaaacaccagcgcacccacactggcgagcggccctacaaatgtccccgttgcggcaaggccttcgccgacagctcttacctgcttcgccaccagcgcactcactctggccagaagccctacaagtgcccacattgtggcaaggccttcggcgacagctcctacctcctgcgacaccagcgcacccacagccacgagcggccctacagctgcaccgagtgcggcaagtgctatagccagaactcgtccctgcgcagccatcagagggtgcacaccggtcagaggcccttcagctgtggcatctgcggcaagagcttctcccagcggtcggcccttatcccccatgcccgcagccacgcccgggagaagcccttcaagtgccctgagtgcggcaagcgctttggccagagctcggtgctggccatccacgcccgcacccacctgccaggccgcacctacagctgccccgactgcggcaagaccttcaatcgctcctccactctcatccagcaccagcgctcccacacgggcgagcggccctacaggtgcgccgtgtgcggcaagggcttctgccgctcctccacgcttctgcagcatcaccgggtccacagtggcgagcggccttacaagtgcgatgactgcggaaaggccttctcccagagctccgacctcatccgccaccagcggacccacgcggcgggccggcgctgacctggggccccagcaggggtgggaggtgtgggcagaagataaggggccagggagctagaggaacctttagggaggatagtggagaagccgcaggagaatggaggagctgaggatgctggaagaagagaaccagggtggaggaagtgacatgccctggagacttgtgggaagtgggttggagggaggccaggccggcagcgggaggccctgggagaaatggagagaggtcagcggagggctggcctcagccgcggctccttggtgggtgcctggcttggcaactgctagagcagggaggggggagggcaggggattacctaattagatggggccccggggtggggcctgggcctctgcgtgcaaaccccagcctccctcttcttcctcaggctttggagcccctgagtttgagttcaataaaaactttatgtggtaaa

SEQ ID NO: 312487 - DNA, 1455 bp, Homo sapiens
cgcgctggagaggcgcggggtcaagacgtccggcctcgggggcccgggctgggccgccgagtcccctgggcggcgctgagcgggcgggaggcgggggcccgcggctcggggcaaccgaggccgggtcgcgggatcggccgccatcgccgccgccgctgcactgggagcccgcggggatggagcgggaggcgttgccgtggggcctcgagccccaggatgtgcagagttctgacgaaatgaggagccccgaagggtacctcagaggcaacatgagtgagaatgaggaagaggaaatttctcagcaagaaggcagtggggactatgaagtcgaagagataccatttgggcttgaaccccagagccctgggtttgagccacaaagcccagagtttgaaccccaaagccccagatttgagcctgaaagcccggggtttgagtcccgaagccctgggcttgtgcccccaagccctgagtttgcacccagaagccctgaatcagattctcagagccctgagtttgaatcccagagccctaggtatgaaccccaaagccctggctatgaacctcggagccccgggtatgaaccccggagccctggctatgaatctgagagctctagatatgaatcccagaacactgagctcaaaacccaaagcccagaatttgaagctcaaagttccaaattccaggaaggtgcggagatgcttctgaaccccgacgaaaagagtcctttgaatatctccgtaggagttcaccccctggactccttcactcaggggtttggggagcagcccacaggggacctgcccatagggccaccttttgagatgcccacaggggccctgctgtctacaccgcagtttgagatgcttcagaatcccctgggtctcacaggagcccttcgaggtccaggtcggcggggtggccgggccaggggtgggcagggccctcggcctaacatctgcggcatctgcgggaagagcttcgggcggggctccaccctgatccagcaccagcgcatccacaccggtgagaagccctacaaatgtgaggtctgcagcaaggccttctcccagagctctgacctcatcaaacaccagcgcacccacactggcgagcggccctacaaatgtccccgttgcggcaaggccttcgccgacagctcttacctgcttcgccaccagcgcactcactctggccagaagccctacaagtgcccacattgtggcaaggccttcggcgacagctcctacctcctgcgacaccagcgcacccacagccacgagcggccctacagctgcaccgagtgcggcaagtgctatagccagaactcgtccctgcgcagccatcagagggtgcacaccggtcagaggcccttcagctgtggcatctgcggcctggcaagtgggtacgggcatggatggccagcaccgagctctggccaaagccgcttgg

SEQ ID NO: 312488 - DNA, 1397 bp, Homo sapiens
cgcgctggagaggcgcggggtcaagacgtccggcctcgggggcccgggctgggccgccgagtcccctgggcggcgctgagcgggcgggaggcgggggcccgcggctcggggcaaccgaggccgggtcgcgggatcggccgccatcgccgccgccgctgcactgggagcccgcggggatggagcgggaggcgttgccgtggggcctcgagccccaggatgtgcagagttctgacgaaatgaggagccccgaagggtacctcagaggcaacatgagtgagaatgaggaagaggaaatttctcagcaagaaggcagtggggactatgaagtcgaagagataccatttgggcttgaaccccagagccctgggtttgagccacaaagcccagagtttgaaccccaaagccccagatttgagcctgaaagcccggggtttgagtcccgaagccctgggcttgtgcccccaagccctgagtttgcacccagaagccctgaatcagattctcagagccctgagtttgaatcccagagccctaggtatgaaccccaaagccctggctatgaacctcggagccccgggtatgaaccccggagccctggctatgaatctgagagctctagatatgaatcccagaacactgagctcaaaacccaaagcccagaatttgaagctcaaagttccaaattccaggaaggtgcggagatgcttctgaaccccgacgaaaagagtcctttgaatatctccgtaggagttcaccccctggactccttcactcaggggtttggggagcagcccacaggggacctgcccatagggccaccttttgagatgcccacaggggccctgctgtctacaccgcagtttgagatgcttcagaatcccctgggtctcacaggagcccttcgaggtccaggtcggcggggtggccgggccaggggtgggcagggccctcggcctaacatctgcggcatctgcgggaagagcttcgggcggggctccacctctcatccagcaccagcgctcccacacgggcgagcggccctacaggtgcgccgtgtgcggcaagggcttctgccgctcctccacgcttctgcagcatcaccgggtccacagtggcgagcggccttacaagtgcgatgactgcggaaaggccttctcccagagctccgacctcatccgccaccagcggacccacgcggcgggccggcgctgacctggggccccagcaggggtgggaggtgtgggcagaagataaggggccagggagctagaggaacctttagggagtggggccccggggtggggcctgggcctctgcgtgcaaaccccagcctccctcttcttcctcaggctttggagcccctgagtttgagttcaataaaaactttatgtggtaaa

SEQ ID NO: 312489 - DNA, 2507 bp, Homo sapiens
cgcgctggagaggcgcggggtcaagacgtccggcctcgggggcccgggctgggccgccgagtcccctgggcggcgctgagcgggcgggaggcgggggcccgcggctcggggcaaccgaggccgggtcgcgggatcggccgccatcgccgccgccgctgcactgggagcccgcggggatggagcgggaggcgttgccgtggggcctcgagccccaggatgtgcagagttctgacgaaatgaggagccccgaagggtacctcagaggcaacatgagtgagaatgaggaagaggaaatttctcagcaagaaggcagtggggactatgaagtcgaagagataccatttgggcttgaaccccagagccctgggtttgagccacaaagcccagagtttgaaccccaaagccccagatttgagcctgaaagcccggggtttgagtcccgaagccctgggcttgtgcccccaagccctgagtttgcacccagaagccctgaatcagattctcagagccctgagtttgaatcccagagccctaggtatgaaccccaaagccctggctatgaacctcggagccccgggtatgaaccccggagccctggctatgaatctgagagctctagatatgaatcccagaacactgagctcaaaacccaaagcccagaatttgaagctcaaagttccaaattccaggaaggtgcggagatgcttctgaaccccgacgaaaagagtcctttgaatatctccgtaggagttcaccccctggactccttcactcaggggtttggggagcagcccacaggggacctgcccatagggccaccttttgagatgcccacaggggccctgctgtctacaccgcagtttgagatgcttcagaatcccctgggtctcacaggagcccttcgaggtccaggtcggcggggtggccgggccaggggtgggcagggccctcggcctaacatctgcggcatctgcgggaagagcttcgggcggggctccaccctgatccagcaccagcgcatccacaccggtgagaagccctacaaatgtgaggtctgcagcaaggccttctcccagagctctgacctcatcaaacaccagcgcacccacactggcgagcggccctacaaatgtccccgttgcggcaaggccttcgccgacagctcttacctgcttcgccaccagcgcactcactctggccagaagccctacaagtgcccacattgtggcaaggccttcggcgacagctcctacctcctgcgacaccagcgcacccacagccacgagcggccctacagctgcaccgagtgcggcaagtgctatagccagaactcgtccctgcgcagccatcagagggtgcacaccggtcagaggcccttcagctgtggcatctgcggcaagagcttctcccagcggtcggcccttatcccccatgcccgcagccacgcccgggagaagcccttcaagtgccctgagtgcggcaagcgctttggccagagctcggtgctggccatccacgcccgcacccacctgccaggccgcacctacagctgccccgactgcggcaagaccttcaatcgctcctccactctcatccagcaccagcgctcccacacgggcgagcggccctacaggtgcgccgtgtgcggcaagggcttctgccgctcctccacgcttctgcagcatcaccgggtccacagtggcgagcggccttacaagtgcgatgactgcggaaaggccttctcccagagctccgacctcatccgccaccagcggacccacgcggcgggccggcgctgacctggggccccagcaggggtgggaggtgtgggcagaagataaggggccagggagctagaggaacctttagggaggatagtggagaagccgcaggagaatggaggagctgaggatgctggaagaagagaaccagggtggaggaagtgacatgccctggagacttgtgggaagtgggttggagggaggccaggccggcagcgggaggccctgggagaaatggagagaggtcagcggagggctggcctcagccgcggctccttggtgggtgcctggcttggcaactgctagagcagggaggggggagggcaggggattacctaattagagtgggttagcttagattggtagctgctgaaactctcgttgagtcaggagcgggtaaaaggtaggtggggtggggagtggggccccggggtggggcctgggcctctgcgtgcaaaccccagcctccctcttcttcctcaggctttggagcccctgagtttgagttcaataaaaactttatgtggtaaaaaaaaaaataactaataaaaaaaaccaacacaaaaaaacaatcccgagagaacacaagcgggcacggaacacaacgcggccaaacacgggccacaggccacagaagggaccagagcaccagacattcgccacaagggcaaaacagcagcccccacaaggacacacaaacacgaaaccccggtacaccgcgcagac

SEQ ID NO: 312490 - DNA, 1725 bp, Homo sapiens
cgcgctggagaggcgcggggtcaagacgtccggcctcgggggcccgggctgggccgccgagtcccctgggcggcgctgagcgggcgggaggcgggggcccgcggctcggggcaaccgaggccgggtcgcgggatcggccgccatcgccgccgccgctgcactgggagcccgcggggatggagcgggaggcgttgccgtggggcctcgagccccaggatgtgcagagttctgacgaaatgaggagccccgaagggtacctcagaggcaacatgagtgagaatgaggaagaggaaatttctcagcaagaaggcagtggggactatgaagtcgaagagataccatttgggcttgaaccccagagccctgggtttgagccacaaagcccagagtttgaaccccaaagccccagatttgagcctgaaagcccggggtttgagtcccgaagccctgggcttgtgcccccaagccctgagtttgcacccagaagccctgaatcagattctcagagccctgagtttgaatcccagagccctaggtatgaaccccaaagccctggctatgaacctcggagccccgggtatgaaccccggagccctggctatgaatctgagagctctagatatgaatcccagaacactgagctcaaaacccaaagcccagaatttgaagctcaaagttccaaattccaggaaggtgcggagatgcttctgaaccccgacgaaaagagtcctttgaatatctccgtaggagttcaccccctggactccttcactcaggggtttggggagcagcccacaggggacctgcccatagggccaccttttgagatgcccacaggggccctgctgtctacaccgcagtttgagatgcttcagaatcccctgggtctcacaggagcccttcgaggtccaggtcggcggggtggccgggccaggggtgggcagggccctcggcctaacatctgcggcatctgcgggaagagcttcgggcggggctccacctctcatccagcaccagcgctcccacacgggcgagcggccctacaggtgcgccgtgtgcggcaagggcttctgccgctcctccacgcttctgcagcatcaccgggtccacagtggcgagcggccttacaagtgcgatgactgcggaaaggccttctcccagagctccgacctcatccgccaccagcggacccacgcggcgggccggcgctgacctggggccccagcaggggtgggaggtgtgggcagaagataaggggccagggagctagaggaacctttagggaggatagtggagaagccgcaggagaatggaggagctgaggatgctggaagaagagaaccagggtggaggaagtgacatgccctggagacttgtgggaagtgggttggagggaggccaggccggcagcgggaggccctgggagaaatggagagaggtcagcggagggctggcctcagccgcggctccttggtgggtgcctggcttggcaactgctagagcagggaggggggagggcaggggattacctaattagagtgggttagcttagattggtagctgctgaaactctcgttgagtcaggagcgggtaaaaggtaggtggggtggggagtggggccccggggtggggcctgggcctctgcgtgcaaaccccagcctccctcttcttcctcaggctttggagcccctgagtttgagttcaataaaaactttatgtggtaaa

SEQ ID NO: 312491 - DNA, 297 bp, Homo sapiens
ctccctggttcaagcatttctcctgcctcagcctcccgagtagctgggattactggttaatttttgtatttttagtagagatggggtttcaccttgttggccaggttggtctcaaactcctgacctcaagtgatccacccacctcggcctcccaaagtgctgggattacaggtgtgagccaccatgcctggtgaagattttttttttctttacctttgattttctacagtttgaatatgatactctttggtgtagtttttttctggcatttatttggcttggcattctctgagcttc

SEQ ID NO: 312492 - DNA, 561 bp, Homo sapiens
atccctcccttcctctaaaaagtaatcactattcctggcttttatagttatcattttcttgagcttttaaacttgttttatcatccaagtatgcatctgtagtcgtcttgctactaatatgactgaatacaaatggcaaaccttgcttttttgcagaattactgttttaaaaaaacttcctacaataaaaacaccagaatctttaaaaaatgtttaatctgaattaatcaaatcatcagacaaatctacaaagtgcctttataaagtacatgaaatggtctgacctattcaaatcaaagtcaatgtcatgaaaaccaaaaaaacacactgtagaggcaaaacaatcaattttaatgtgttgtccttgactggattccgaatttaaacaatagacccattaaccttgaagaaatctgaatatggactgtactgtatatatatttagatgtatatatgtgaatgtatctgtgtcttagtatctgtatacacacacacacacacagaaagagagtgaaagctaagcactcacatatatgcttcatattgcagagttcaaagatc

SEQ ID NO: 312493 - DNA, 3334 bp, Homo sapiens
gcggccgctgcgactccggagccggcggggggctccggtccttccctgcgccaccgcacaggacatctctctggctggggagcggcggtgagacccgccgagggcgtctgtgtccctcctcccccgcggtcctcggtgcgtccgcacgcccctcctcctcggctccctccttcttctctccgcgcctctccgccccctccccgtctccgcaggccgagtggtgcggcccgcctccagctgaccggcctggaatcccggctccgagccccggactcgcgcccgcccgcgcgcccgctccttccccctccccccgccccgagccccccgacgccgccgccaccgcctcctcagagcggggcccgggcccagccgccgccaccgctgccgccgccgagctccgccgccgccgagcaccatgggagacgctgggagcgagcgcagcaaagcgcccagcctgccgcctcgctgtccctgcggcttctgggggtccagcaagactatgaatctctgttccaaatgctttgctgattttcaaaagaaacagccagacgatgattccgctccaagtacaagtaacagccaatcagatttgttttccgaagagaccaccagtgacaacaacaatacctcgataaccacgccaactcttagtcccagccagcagccgcttccgacagaactgaatgtaacttcaccgagtaaagaggagtgtgggccatgcacagacacagctcatgtctcattaatcacaccaacaaaaagatcctgtggtacagattcacagtctgagaatgaggcttcaccagtaaaacggccacgactacttgagaatacggaacggtccgaggaaaccagtcgatctaaacagaagagtcgacgtcggtgcttccagtgccaaaccaaactggagctggtgcagcaggaattgggatcgtgtcgctgcggttatgtgttctgtatgttacatcgcctccccgagcagcacgactgcacattcgaccacatgggccgtggccgggaggaagccatcatgaaaatggtgaagctggaccggaaagtggggcgctcctgccagcgcatcggggaggggtgctcctgaaggccaggcatggccaccacgtgacgctgttcttagttcactaatgttagccttatttaggacaaagtcagccagacaccttgtactgggcacgcgtcagactgcagccagtccgtttcctttctttagccagccatcctggtactgtagtttaggggttgatggtggttgaaattgatttctggctggttactaaggtgcctgctagccattgtataaaattaaaacatgaagaatattttttttttgagcatggctagtggatttaaaacaacacatacctgtcactgctggagtcaaacttataaaaagccttaagtggaaagtgttccagacggagactctgagttaatagaggagtagaagctggtgttaaagttcccacgacgcacatggctttgccagaaactctgtttaatgatcggcctttcacctcttcacttatccttagtcccagtagccaggatacctgatggccacgtgtgccttggccacgggaggctgctgagattggccacgtggctgggctgggtggtggcctcactctcccacagagctggaaatggggggtgggggacagattcttacggaaatttttttacctgacttgctatgaaaaaactcatcacacaagaagagaaacagtaacctcactttgaaaattagctccactcaagactagtccacgaacgagacccgccttttctacacaggatccaaggtcacgagaagcagccagagtgccccgcctccgccggctctggtctgccattcgccagtgcagggatctggcacggaccagatgtggcgaatggcagcacagcgcggtggctgggtctgcacactggcctctgcagccagatttctatattgggagttttttaaaaagacatttcatagccaacaagaatcagtagaagtgctgggagcagcagctggggaagctgccgcccacgggctctgccccttccagctggagccgcccgtgcctccaggggccaagaggatgatgtcgtggcctccattctcgtttctatgcagccccatagtccaaggacacccagtccacatctaccatatagcaagtttagtaagggaaggcagcatacgtcccagggacagtgggtttggatctgtctagaacagcggtttgtggctgtggcccagctccgagagtgatatttgctctggtaggtgagggcctgagggtacatttctccacctgtgccccctcatgttcacagaggatttcagcagctgcaactgcgcacgccaggtggggaagggtgggggtgggcctggttgccccatgttaggaaatcactaccagtcaggtggggctggggctgggtggacaggatcaggattcccttgaaagcccaggcagggtgagcagtcccagtggtcctagtgccgcatcagatccaggtgggtgagggcaggaggcccctgcggaggcagcgtggatctgcccacacataggctactggaatagtttaacccagcaactttcctttttataaaacaacaaatggttcaactctgtctgcaaattaacagctgaacacctgcaactgcaaatgttttttgatccgacgtactgaaataggaagtcatgctcttcccaccctccacccaccagagtggaacccgctgcaaaatccccagccttaattcttgcttcaggacccagaccggtgtcttgctctagggcaacccagggcagaggggccaggtctgcccagcgtttaccactgctgtcaagccacagcccttggccaccatacgggccatcctcagtgaggcagccccccataggcttccgccaagctctggtcccgaagaggctgtgcgagcccttcccggccctccccagggccccccgccccctcctctgcctgctgcgtggaggcagccatgggaaggagcccaggggagctggcctgggggagcgaagcccatgttcgcttcctgacttagagctggggggggtggggggtggggcttgttcccctgcagtatctgttctgtgaagtttgttaaatgtaaggaaagcttaaattcttgtatctttaaaagagaaaatcttatttaacccttttgtgttctagatttacttacacacatagcctagagctcagttttagttttaacattgtgaaaatattaaaagaatcttgtaactttattcttttttctcctgctgaaaaaaaaaattaaaccaatcgtatgaaa

SEQ ID NO: 312494 - DNA, 3268 bp, Homo sapiens
gcggccgctgcgactccggagccggcggggggctccggtccttccctgcgccaccgcacaggacatctctctggctggggagcggcggtgagacccgccgagggcgtctgtgtccctcctcccccgcggtcctcggtgcgtccgcacgcccctcctcctcggctccctccttcttctctccgcgcctctccgccccctccccgtctccgcaggccgagtggtgcggcccgcctccagctgaccggcctggaatcccggctccgagccccggactcgcgcccgcccgcgcgcccgctccttccccctccccccgccccgagccccccgacgccgccgccaccgcctcctcagagcggggcccgggcccagccgccgccaccgctgccgccgccgagctccgccgccgccgagcaccatgggagacgctgggagcgagcgcagcaaagcgcccagcctgccgcctcgctgtccctgcggcttctgggggtccagcaagactatgaatctctgttccaaatgctttgctgattttcaaaagaaacagccagacgatgattccgctccaagtacaagtaacagccaatcagatttgttttccgaagagaccaccagtgacaacaacaatacctcgataaccacgccaactcttagtcccagccagcagccgcttccgacagaactgaatgtaacttcaccgagtaaagaggagtattcacagtctgagaatgaggcttcaccagtaaaacggccacgactacttgagaatacggaacggtccgaggaaaccagtcgatctaaacagaagagtcgacgtcggtgcttccagtgccaaaccaaactggagctggtgcagcaggaattgggatcgtgtcgctgcggttatgtgttctgtatgttacatcgcctccccgagcagcacgactgcacattcgaccacatgggccgtggccgggaggaagccatcatgaaaatggtgaagctggaccggaaagtggggcgctcctgccagcgcatcggggaggggtgctcctgaaggccaggcatggccaccacgtgacgctgttcttagttcactaatgttagccttatttaggacaaagtcagccagacaccttgtactgggcacgcgtcagactgcagccagtccgtttcctttctttagccagccatcctggtactgtagtttaggggttgatggtggttgaaattgatttctggctggttactaaggtgcctgctagccattgtataaaattaaaacatgaagaatattttttttttgagcatggctagtggatttaaaacaacacatacctgtcactgctggagtcaaacttataaaaagccttaagtggaaagtgttccagacggagactctgagttaatagaggagtagaagctggtgttaaagttcccacgacgcacatggctttgccagaaactctgtttaatgatcggcctttcacctcttcacttatccttagtcccagtagccaggatacctgatggccacgtgtgccttggccacgggaggctgctgagattggccacgtggctgggctgggtggtggcctcactctcccacagagctggaaatggggggtgggggacagattcttacggaaatttttttacctgacttgctatgaaaaaactcatcacacaagaagagaaacagtaacctcactttgaaaattagctccactcaagactagtccacgaacgagacccgccttttctacacaggatccaaggtcacgagaagcagccagagtgccccgcctccgccggctctggtctgccattcgccagtgcagggatctggcacggaccagatgtggcgaatggcagcacagcgcggtggctgggtctgcacactggcctctgcagccagatttctatattgggagttttttaaaaagacatttcatagccaacaagaatcagtagaagtgctgggagcagcagctggggaagctgccgcccacgggctctgccccttccagctggagccgcccgtgcctccaggggccaagaggatgatgtcgtggcctccattctcgtttctatgcagccccatagtccaaggacacccagtccacatctaccatatagcaagtttagtaagggaaggcagcatacgtcccagggacagtgggtttggatctgtctagaacagcggtttgtggctgtggcccagctccgagagtgatatttgctctggtaggtgagggcctgagggtacatttctccacctgtgccccctcatgttcacagaggatttcagcagctgcaactgcgcacgccaggtggggaagggtgggggtgggcctggttgccccatgttaggaaatcactaccagtcaggtggggctggggctgggtggacaggatcaggattcccttgaaagcccaggcagggtgagcagtcccagtggtcctagtgccgcatcagatccaggtgggtgagggcaggaggcccctgcggaggcagcgtggatctgcccacacataggctactggaatagtttaacccagcaactttcctttttataaaacaacaaatggttcaactctgtctgcaaattaacagctgaacacctgcaactgcaaatgttttttgatccgacgtactgaaataggaagtcatgctcttcccaccctccacccaccagagtggaacccgctgcaaaatccccagccttaattcttgcttcaggacccagaccggtgtcttgctctagggcaacccagggcagaggggccaggtctgcccagcgtttaccactgctgtcaagccacagcccttggccaccatacgggccatcctcagtgaggcagccccccataggcttccgccaagctctggtcccgaagaggctgtgcgagcccttcccggccctccccagggccccccgccccctcctctgcctgctgcgtggaggcagccatgggaaggagcccaggggagctggcctgggggagcgaagcccatgttcgcttcctgacttagagctggggggggtggggggtggggcttgttcccctgcagtatctgttctgtgaagtttgttaaatgtaaggaaagcttaaattcttgtatctttaaaagagaaaatcttatttaacccttttgtgttctagatttacttacacacatagcctagagctcagttttagttttaacattgtgaaaatattaaaagaatcttgtaactttattcttttttctcctgctgaaaaaaaaaattaaaccaatcgtatgaaa

SEQ ID NO: 312495 - DNA, 3305 bp, Homo sapiens
gcggccgctgcgactccggagccggcggggggctccggtccttccctgcgccaccgcacaggacatctctctggctggggagcggcggtgagacccgccgagggcgtctgtgtccctcctcccccgcggtcctcggtgcgtccgcacgcccctcctcctcggctccctccttcttctctccgcgcctctccgccccctccccgtctccgcaggccgagtggtgcggcccgcctccagctgaccggcctggaatcccggctccgagccccggactcgcgcccgcccgcgcgcccgctccttccccctccccccgccccgagccccccgacgccgccgccaccgcctcctcagagcggggcccgggcccagccgccgccaccgctgccgccgccgagctccgccgccgccgagcaccatgggagacgctgggagcgagcgcagcaaagcgcccagcctgccgcctcgctgtccctgcggcttctgggggtccagcaagactatgaatctctgttccaaatgctttgctgattttcaaaagaaacagccagacgatgattccgctccaagtacaagtaacagccaatcagatttgttttccgaagagaccaccagtgacaacaacaatacctcgataaccacgccaactcttagtcccagccagcagccgcttccgacagaactgaatgtaacttcaccgagtaaagaggagtgtgggccatgcacagacacagctcatgtctcattaatcacaccaacaaaaagatcctgtggtacagattcacagtctgagaatgaggcttcaccagtaaaacggccacgactacttgagaatacggaacggtccgaggaaaccagtcgatctaaacagaagagtcgacgtcggtgcttccagtgccaaaccaaactggagctggtgcagcaggaattgggatcgtgtcgctgcggttatgtgttctgtatgttacatcgcctccccgagcagcacgactgcacattcgaccacatgggccgtggccgggaggaagccatcatgaaaatggtgaagctggaccggaaagtggggcgctcctgccagcgcatcggggaggggtgctcctgaaggccaggcatggccaccacgtgacgctgttcttagttcactaatgttagccttatttaggacaaagtcagccagacaccttgtactgggcacgcgtcagactgcagccagtccgtttcctttctttagccagccatcctggtactgtagtttaggggttgatggtggttgaaattgatttctggctggttactaaggtgcctgctagccattgtataaaattaaaacatgaagaatattttttttttgagcatggctagtggatttaaaacaacacatacctgtcactgctggagtcaaacttataaaaagccttaagtggaaagtgttccagacggagactctgagttaatagaggagtagaagctggtgttaaagttcccacgacgcacatggctttgccagaaactctgtttaatgatcggcctttcacctcttcacttatccttagtcccagtagccaggatacctgatggccacgtgtgccttggccacgggaggctgctgagattggccacgtggctgggctgggtggtggcctcactctcccacagagctggaaatggggggtgggggacagattcttacggaaatttttttacctgacttgctatgaaaaaactcatcacacaagaagagaaacagtaacctcactttgaaaattagctccactcaagactagtccacgaacgagacccgccttttctacacaggatccaaggtcacgagaagcagccagagtgccccgcctccgccggctctggtctgccattcgccagtgcagggatctggcacggaccagatgtggcgaatggcagcacagcgcggtggctgggtctgcacactggcctctgcagccagatttctatattgggagttttttaaaaagacatttcatagccaacaagaatcagtagaagtgctgggagcagcagctggggaagctgccgcccacgggctctgccccttccagctggagccgcccgtgcctccaggggccaagaggatgatgtcgtggcctccattctcgtttctatgcagccccatagtccaaggacacccagtccacatctaccatatagcaagtttagtaagggaaggcagcatacgtcccagggacagtgggtttggatctgtctagaacagcggtttgtggctgtggcccagctccgagagtgatatttgctctggtaggtgagggcctgagggtacatttctccacctgtgccccctcatgttcacagaggatttcagcagctgcaactgcgcacgccaggtggggaagggtgggggtgggcctggttgccccatgttaggaaatcactaccagtcaggtggggctggggctgggtggacaggatcaggattcccttgaaagcccaggcagggtgagcagtcccagtggtcctagtgccgcatcagatccaggtgggtgagggcaggaggcccctgcggaggcagcgtggatctgcccacacataggctactggaatagtttaacccagcaactttcctttttataaaacaacaaatggttcaactctgtctgcaaattaacagctgaacacctgcaactgcaaatgttttttgatccgacgtactgaaataggaagtcatgctcttcccaccctccacccaccagagtggaacccgctgcaaaatccccagccttaattcttgcttcaggacccagaccggtgtcttgctctagggcaacccagggcagaggggccaggtctgcccagcgtttaccactgctgtcaagccacagcccttggccaccatacgggcttccgccaagctctggtcccgaagaggctgtgcgagcccttcccggccctccccagggccccccgccccctcctctgcctgctgcgtggaggcagccatgggaaggagcccaggggagctggcctgggggagcgaagcccatgttcgcttcctgacttagagctggggggggtggggggtggggcttgttcccctgcagtatctgttctgtgaagtttgttaaatgtaaggaaagcttaaattcttgtatctttaaaagagaaaatcttatttaacccttttgtgttctagatttacttacacacatagcctagagctcagttttagttttaacattgtgaaaatattaaaagaatcttgtaactttattcttttttctcctgctgaaaaaaaaaattaaaccaatcgtatgaaa

SEQ ID NO: 312496 - DNA, 2495 bp, Homo sapiens
gcggccgctgcgactccggagccggcggggggctccggtccttccctgcgccaccgcacaggacatctctctggctggggagcggcggtgagacccgccgagggcgtctgtgtccctcctcccccgcggtcctcggtgcgtccgcacgcccctcctcctcggctccctccttcttctctccgcgcctctccgccccctccccgtctccgcaggccgagtggtgcggcccgcctccagctgaccggcctggaatcccggctccgagccccggactcgcgcccgcccgcgcgcccgctccttccccctccccccgccccgagccccccgacgccgccgccaccgcctcctcagagcggggcccgggcccagccgccgccaccgctgccgccgccgagctccgccgccgccgagcaccatgggagacgctgggagcgagcgcagcaaagcgcccagcctgccgcctcgctgtccctgcggcttctgggggtccagcaagactatgaatctctgttccaaatgctttgctgattttcaaaagaaacagccagacgatgattccgctccaagtacaagtaacagccaatcagatttgttttccgaagagaccaccagtgacaacaacaatacctcgataaccacgccaactcttagtcccagccagcagccgcttccgacagaactgaatgtaacttcaccgagtaaagaggagtgtgggccatgcacagacacagctcatgtctcattaatcacaccaacaaaaagatcctgtggtacagattcacagtctgagaatgaggcttcaccagtaaaacggccacgactacttgagaatacggaacggtccgaggaaaccagtcgatctaaacagaagagtcgacgtcggtgcttccagtgccaaaccaaactggagctggtgcagcaggaattgggatcgtgtcgctgcggttatgtgttctgtatgttacatcgcctccccgagcagcacgactgcacattcgaccacatgggccgtggccgggaggaagccatcatgaaaatggtgaagctggaccggaaagtggggcgctcctgccagcgcatcggggaggggtgctcctgaaggccaggcatggccaccacgtgacgctgttcttagttcactaatgttagccttatttaggacaaagtcagccagacaccttgtactgggcacgcgtcagactgcagccagtccgtttcctttctttagccagccatcctggtactgtagtttaggggttgatggtggttgaaattgatttctggctggttactaaggtgcctgctagccattgtataaaattaaaacatgaagaatattttttttttgagcatggctagtggatttaaaacaacacatacctgtcactgctggagtcaaacttataaaaagccttaagtggaaagtgttccagacggagactctgagttaatagaggagtagaagctggtgttaaagttcccacgacgcacatggctttgccagaaactctgtttaatgatcggcctttcacctcttcacttatccttagtcccagtagccaggatacctgatggccacgtgtgccttggccacgggaggctgctgagattggccacgtggctgggctgggtggtggcctcactctcccacagagctggaaatggggggtgggggacagattcttacggaaatttttttacctgacttgctatgaaaaaactcatcacacaagaagagaaacagtaacctcactttgaaaattagctccactcaagactagtccacgaacgagacccgccttttctacacaggatccaaggtcacgagaagcagccagagtgccccgcctccgccggctctggtctgccattcgccagtgcagggatctggcacggaccagatgtggcgaatggcagcacagcgcggtggctgggtctgcacactggcctctgcagccagatttctatattgggagttttttaaaaagacatttcatagccaacaagaatcagtagaagtgctgggagcagcagctggggaagctgccgcccacgggctctgccccttccagctggagccgcccgtgcctccaggggccaagaggatgatgtcgtggcctccattctcgtttctatgcagccccatagtccaaggacacccagtccacatctaccatatagcaagtttagtaagggaaggcagcatacgtcccagggacagtgggtttggatctgtctagaacagcggtttgtggctgtggcccagctccgagagtgatatttgctctggtaggtgagggcctgagggtacatttctccacctgtgccccctcatgttcacagaggatttcagcagctgcaactgcgcacgccaggtggggaagggtggggggttatatatttttatttcttactataacttttttttcgtttgtactgttattatattggaatttctaaatgttattcttttcctcattttcattcttttgttt

SEQ ID NO: 312497 - DNA, 1777 bp, Homo sapiens
gcggccgctgcgactccggagccggcggggggctccggtccttccctgcgccaccgcacaggacatctctctggctggggagcggcggtgagacccgccgagggcgtctgtgtccctcctcccccgcggtcctcggtgcgtccgcacgcccctcctcctcggctccctccttcttctctccgcgcctctccgccccctccccgtctccgcaggccgagtggtgcggcccgcctccagctgaccggcctggaatcccggctccgagccccggactcgcgcccgcccgcgcgcccgctccttccccctccccccgccccgagccccccgacgccgccgccaccgcctcctcagagcggggcccgggcccagccgccgccaccgctgccgccgccgagctccgccgccgccgagcaccatgggagacgctgggagcgagcgcagcaaagcgcccagcctgccgcctcgctgtccctgcggcttctgggggtccagcaagactatgaatctctgttccaaatgctttgctgattttcaaaagaaacagccagacgatgattccgctccaagtacaagtaacagccaatcagatttgttttccgaagagaccaccagtgacaacaacaatacctcgataaccacgccaactcttagtcccagccagcagccgcttccgacagaactgaatgtaacttcaccgagtaaagaggagtgtgggccatgcacagacacagctcatgtctcattaatcacaccaacaaaaagatcctgtggtacagattcacagtctgagaatgaggcttcaccagtaaaacggccacgactacttgagaatacggaacggtccgaggaaaccagtcgatctaaacagaagagtcgacgtcggtgcttccagtgccaaaccaaactggagctggtgcagcaggaattgggatcgtgtcgctgcggttatgtgttctgtatgttacatcgcctccccgagcagcacgactgcacattcgaccacatgggccgtggccgggaggaagccatcatgaaaatggtgaagctggaccggaaagtggggcgctcctgccagcgcatcggggaggggtgctcctgaaggccaggcatggccaccacgtgacgctgttcttagttcactaatgttagccttatttaggacaaagtcagccagacaccttgtactgggcacgcgtcagactgcagccagtccgtttcctttctttagccagccatcctggtactgtagtttaggggttgatggtggttgaaattgatttctggctggttactaaggtgcctgctagccattgtataaaattaaaacatgaagaatattttttttttgagcatggctagtggatttaaaacaacacatacctgtcactgctggagtcaaacttataaaaagccttaagtggaaagtgttccagacggagactctgagttaatagaggagtagaagctggtgttaaagttcccacgacgcacatggctttgccagaaactctgtttaatgatcggcctttcacctcttcacttatccttagtcccagtagccaggatacctgatggccacgtgtgccttggccacgggaggctgctgagattggccacgtggctgggctgggtggtggcctcactctcccgctattgaaacttctaaaactaggagttttagaagtttcaatagcacattgctgtcctgggggggtgtgctcggcgctcgaggtcttctttgtgctattgatctttcttgtgatttgggggtatcgag

SEQ ID NO: 312498 - DNA, 990 bp, Homo sapiens
gcggccgctgcgactccggagccggcggggggctccggtccttccctgcgccaccgcacaggacatctctctggctggggagcggcggtgagacccgccgagggcgtctgtgtccctcctcccccgcggtcctcggtgcgtccgcacgcccctcctcctcggctccctccttcttctctccgcgcctctccgccccctccccgtctccgcaggccgagtggtgcggcccgcctccagctgaccggcctggaatcccggctccgagccccggactcgcgcccgcccgcgcgcccgctccttccccctccccccgccccgagccccccgacgccgccgccaccgcctcctcagagcggggcccgggcccagccgccgccaccgctgccgccgccgagctccgccgccgccgagcaccatgggagacgctgggagcgagcgcagcaaagcgcccagcctgccgcctcgctgtccctgcggcttctgggggtccagcaagactatgaatctctgttccaaatgctttgctgattttcaaaagaaacagccagacgatgattccgctccaagtacaagtaacagccaatcagatttgttttccgaagagaccaccagtgacaacaacaatacctcgataaccacgccaactcttagtcccagccagcagccgcttccgacagaactgaatgtaacttcaccgagtaaagaggagtgtgggccatgcacagacacagctcatgtctcattaatcacaccaacaaaaagatcctgtggtacagattcacagtctgagaatgaggcttcaccagtaaaacggccacgactacttgagaatacggaacggtccgaggaaaccagtcgatctaaacagaagagtcgacgtcggtgcttccagtgccaaaccaaactggagctggtgcagcaggaattgggatcgtgtcgctgcgtatgtgttctgtatgttacatcgtctgccgctggggtcgcgagctc

SEQ ID NO: 312499 - DNA, 1085 bp, Homo sapiens
gcggccgctgcgactccggagccggcggggggctccggtccttccctgcgccaccgcacaggacatctctctggctggggagcggcggtgagacccgccgagggcgtctgtgtccctcctcccccgcggtcctcggtgcgtccgcacgcccctcctcctcggctccctccttcttctctccgcgcctctccgccccctccccgtctccgcaggccgagtggtgcggcccgcctccagctgaccggcctggaatcccggctccgagccccggactcgcgcccgcccgcgcgcccgctccttccccctccccccgccccgagccccccgacgccgccgccaccgcctcctcagagcggggcccgggcccagccgccgccaccgctgccgccgccgagctccgccgccgccgagcaccatgggagacgctgggagcgagcgcagcaaagcgcccagcctgccgcctcgctgtccctgcggcttctgggggtccagcaagactatgaatctctgttccaaatgctttgctgattttcaaaagaaacagccagacgatgattccgctccaagtacaagtaacagccaatcagatttgttttccgaagagaccaccagtgacaacaacaatacctcgataaccacgccaactcttagtcccagccagcagccgcttccgacagaactgaatgtaacttcaccgagtaaagaggagtgtgggccatgcacagacacagctcatgtctcattaatcacaccaacaaaaagatcctgtggtacagattcacagtctgagaatgaggcttcaccagtaaaacggccacgactacttgagaatacggaacggtccgaggaaaccagtcgatctaaacagaagagtcgacgtcggtgcttccagtgccaaaccaaactggagctggtgcagcaggaattgggatcgtgtcgctgcggtaagcatctcccccagtggcgtgatggagactatatccttaacaccttggcccagctttggaaatttaagtggctgaagtctttcgttcttcttctgagtactgtaagtttgctacagtagtgcatgcgatataggtttg

SEQ ID NO: 312500 - DNA, 2601 bp, Homo sapiens
taaaaatcaaagccgttgaactcatggacataaaaagtagaagattcacagtctgagaatgaggcttcaccagtaaaacggccacgactacttgagaatacggaacggtccgaggaaaccagtcgatctaaacagaagagtcgacgtcggtgcttccagtgccaaaccaaactggagctggtgcagcaggaattgggatcgtgtcgctgcggttatgtgttctgtatgttacatcgcctccccgagcagcacgactgcacattcgaccacatgggccgtggccgggaggaagccatcatgaaaatggtgaagctggaccggaaagtggggcgctcctgccagcgcatcggggaggggtgctcctgaaggccaggcatggccaccacgtgacgctgttcttagttcactaatgttagccttatttaggacaaagtcagccagacaccttgtactgggcacgcgtcagactgcagccagtccgtttcctttctttagccagccatcctggtactgtagtttaggggttgatggtggttgaaattgatttctggctggttactaaggtgcctgctagccattgtataaaattaaaacatgaagaatattttttttttgagcatggctagtggatttaaaacaacacatacctgtcactgctggagtcaaacttataaaaagccttaagtggaaagtgttccagacggagactctgagttaatagaggagtagaagctggtgttaaagttcccacgacgcacatggctttgccagaaactctgtttaatgatcggcctttcacctcttcacttatccttagtcccagtagccaggatacctgatggccacgtgtgccttggccacgggaggctgctgagattggccacgtggctgggctgggtggtggcctcactctcccacagagctggaaatggggggtgggggacagattcttacggaaatttttttacctgacttgctatgaaaaaactcatcacacaagaagagaaacagtaacctcactttgaaaattagctccactcaagactagtccacgaacgagacccgccttttctacacaggatccaaggtcacgagaagcagccagagtgccccgcctccgccggctctggtctgccattcgccagtgcagggatctggcacggaccagatgtggcgaatggcagcacagcgcggtggctgggtctgcacactggcctctgcagccagatttctatattgggagttttttaaaaagacatttcatagccaacaagaatcagtagaagtgctgggagcagcagctggggaagctgccgcccacgggctctgccccttccagctggagccgcccgtgcctccaggggccaagaggatgatgtcgtggcctccattctcgtttctatgcagccccatagtccaaggacacccagtccacatctaccatatagcaagtttagtaagggaaggcagcatacgtcccagggacagtgggtttggatctgtctagaacagcggtttgtggctgtggcccagctccgagagtgatatttgctctggtaggtgagggcctgagggtacatttctccacctgtgccccctcatgttcacagaggatttcagcagctgcaactgcgcacgccaggtggggaagggtgggggtgggcctggttgccccatgttaggaaatcactaccagtcaggtggggctggggctgggtggacaggatcaggattcccttgaaagcccaggcagggtgagcagtcccagtggtcctagtgccgcatcagatccaggtgggtgagggcaggaggcccctgcggaggcagcgtggatctgcccacacataggctactggaatagtttaacccagcaactttcctttttataaaacaacaaatggttcaactctgtctgcaaattaacagctgaacacctgcaactgcaaatgttttttgatccgacgtactgaaataggaagtcatgctcttcccaccctccacccaccagagtggaacccgctgcaaaatccccagccttaattcttgcttcaggacccagaccggtgtcttgctctagggcaacccagggcagaggggccaggtctgcccagcgtttaccactgctgtcaagccacagcccttggccaccatacgggccatcctcagtgaggcagccccccataggcttccgccaagctctggtcccgaagaggctgtgcgagcccttcccggccctccccagggccccccgccccctcctctgcctgctgcgtggaggcagccatgggaaggagcccaggggagctggcctgggggagcgaagcccatgttcgcttcctgacttagagctggggggggtggggggtggggcttgttcccctgcagtatctgttctgtgaagtttgttaaatgtaaggaaagcttaaattcttgtatctttaaaagagaaaatcttatttaacccttttgtgttctagatttacttacacacatagcctagagctcagttttagttttaacattgtgaaaatattaaaagaatcttgtaactttattcttttttctcctgctgaaaaaaaaaattaaaccaatcgtatgaaa

SEQ ID NO: 312501 - DNA, 3145 bp, Homo sapiens
gcggccgctgcgactccggagccggcggggggctccggtccttccctgcgccaccgcacaggacatctctctggctggggagcggcggtgagacccgccgagggcgtctgtgtccctcctcccccgcggtcctcggtgcgtccgcacgcccctcctcctcggctccctccttcttctctccgcgcctctccgccccctccccgtctccgcaggccgagtggtgcggcccgcctccagctgaccggcctggaatcccggctccgagccccggactcgcgcccgcccgcgcgcccgctccttccccctccccccgccccgagccccccgacgccgccgccaccgcctcctcagagcggggcccgggcccagccgccgccaccgctgccgccgccgagctccgccgccgccgagcaccatgggagacgctgggagcgagcgcagcaaagcgcccagcctgccgcctcgctgtccctgcggcttctgggggtccagcaagactatgaatctctgttccaaatgctttgctgattttcaaaagaaacagccagacgatgattccgctccaagtacaagtaacagccaatcagatttgttttccgaagagaccaccagtgacaacaacaatacctcgataaccacgccaactcttagtcccagccagcagccgcttccgacagaactgaatgtaacttcaccgagtaaagaggagtgtgggccatgcacagacacagctcatgtctcattaatcacaccaacaaaaagatcctgtggtacagattcacagtctgagaatgaggcttcaccagtaaaacggccacgactacttgagaatacggaacggtccgaggaaaccagtcgatctaaacagaagagtcgacgtcggtgcttccagtgccaaaccaaactggagctggtgcagcaggaattgggatcgtgtcgctgcggttatgtgttctgtatgttacatcgcctccccgagcagcacgactgcacattcgaccacatgggccgtggccgggaggaagccatcatgaaaatggtgaagctggaccggaaagtggggcgctcctgccagcgcatcggggaggggtgctcctgaaggccaggcatggccaccacgtgacgctgttcttagttcactaatgttagccttatttaggacaaagtcagccagacaccttgtactgggcacgcgtcagactgcagccagtccgtttcctttctttagccagccatcctggtactgtagtttaggggttgatggtggttgaaattgatttctggctggttactaaggtgcctgctagccattgtataaaattaaaacatgaagaatattttttttttgagcatggctagtggatttaaaacaacacatacctgtcactgctggagtcaaacttataaaaagccttaagtggaaagtgttccagacggagactctgagttaatagaggagtagaagctggtgttaaagttcccacgacgcacatggctttgccagaaactctgtttaatgatcggcctttcacctcttcacttatccttagtcccagtagccaggatacctgatggccacgtgtgccttggccacgggaggctgctgagattggccacgtggctgggctgggtggtggcctcactctcccacagagctggaaatggggggtgggggacagattcttacggaaatttttttacctgacttgctatgaaaaaactcatcacacaagaagagaaacagtaacctcactttgaaaattagctccactcaagactagtccacgaacgagacccgccttttctacacaggatccaaggtcacgagaagcagccagagtgccccgcctccgccggctctggtctgccattcgccagtgcagggatctggcacggaccagatgtggcgaatggcagcacagcgcggtggctgggtctgcacactggcctctgcagccagatttctatattgggagttttttaaaaagacatttcatagccaacaagaatcagtagaagtgctgggagcagcagctggggaagctgccgcccacgggctctgccccttccagctggagccgcccgtgcctccaggggccaagaggatgatgtcgtggcctccattctcgtttctatgcagccccatagtccaaggacacccagtccacatctaccatatagcaagtttagtaagggaaggcagcatacgtcccagggacagtgggtttggatctgtctagaacagcggtttgtggctgtggcccagctccgagagtgatatttgctctggtaggtgagggcctgagggtacatttctccacctgtgccccctcatgttcacagaggatttcagcagctgcaactgcgcacgccaggtggggaagggtgggggtgggcctggttgccccatgttaggaaatcactaccagtcaggtggggctggggctgggtggacaggatcaggattcccttgaaagcccaggcagggtgagcagtcccagtggtcctagtgccgcatcagatccaggtgggtgagggcaggaggcccctgcggaggcagcgtggatctgcccacacataggctactggaatagtttaacccagcaactttcctttttataaaacaacaaatggttcaactctgtctgcaaattaacagctgaacacctgcaactgcaaatgttttttgatccgacgtactgaaataggaagtcatgctcttcccaccctccacccaccagagtggaacccgctgcaaaatccccagccttaattcttgcttcaagggccccccgccccctcctctgcctgctgcgtggaggcagccatgggaaggagcccaggggagctggcctgggggagcgaagcccatgttcgcttcctgacttagagctggggggggtggggggtggggcttgttcccctgcagtatctgttctgtgaagtttgttaaatgtaaggaaagcttaaattcttgtatctttaaaagagaaaatcttatttaacccttttgtgttctagatttacttacacacatagcctagagctcagttttagttttaacattgtgaaaatattaaaagaatcttgtaactttattcttttttctcctgctgaaaaaaaaaattaaaccaatcgtatgaaa

SEQ ID NO: 312502 - DNA, 2477 bp, Homo sapiens
gcggccgctgcgactccggagccggcggggggctccggtccttccctgcgccaccgcacaggacatctctctggctggggagcggcggtgagacccgccgagggcgtctgtgtccctcctcccccgcggtcctcggtgcgtccgcacgcccctcctcctcggctccctccttcttctctccgcgcctctccgccccctccccgtctccgcaggccgagtggtgcggcccgcctccagctgaccggcctggaatcccggctccgagccccggactcgcgcccgcccgcgcgcccgctccttccccctccccccgccccgagccccccgacgccgccgccaccgcctcctcagagcggggcccgggcccagccgccgccaccgctgccgccgccgagctccgccgccgccgagcaccatgggagacgctgggagcgagcgcagcaaagcgcccagcctgccgcctcgctgtccctgcggcttctgggggtccagcaagactatgaatctctgttccaaatgctttgctgattttcaaaagaaacagccagacgatgattccgctccaagtacaagtaacagccaatcagatttgttttccgaagagaccaccagtgacaacaacaatacctcgataaccacgccaactcttagtcccagccagcagccgcttccgacagaactgaatgtaacttcaccgagtaaagaggagtgtgggccatgcacagacacagctcatgtctcattaatcacaccaacaaaaagatcctgtggtacagattcacagtctgagaatgaggcttcaccagtaaaacggccacgactacttgagaatacggaacggtccgaggaaaccagtcgatctaaacagaagagtcgacgtcggtgcttccagtgccaaaccaaactggagctggtgcagcaggaattgggatcgtgtcgctgcggttatgtgttctgtatgttacatcgcctccccgagcagcacgactgcacattcgaccacatgggccgtggccgggaggaagccatcatgaaaatggtgaagctggaccggaaagtggggcgctcctgccagcgcatcggggaggggtgctcctgaaggccaggcatggccaccacgtgacgctgttcttagttcactaatgttagccttatttaggacaaagtcagccagacaccttgtactgggcacgcgtcagactgcagccagtccgtttcctttctttagccagccatcctggtactgtagtttaggggttgatggtggttgaaattgatttctggctggttactaaggtgcctgctagccattgtataaaattaaaacatgaagaatattttttttttgagcatggctagtggatttaaaacaacacatacctgtcactgctggagtcaaacttataaaaagccttaagtggaaagtgttccagacggagactctgagttaatagaggagtagaagctggtgttaaagttcccacgacgcacatggctttgccagaaactctgtttaatgatcggcctttcacctcttcacttatccttagtcccagtagccaggatacctgatggccacgtgtgccttggccacgggaggctgctgagattggccacgtggctgggctgggtggtggcctcactctcccacagagctggaaatggggggtgggggacagattcttacggaaatttttttacctgacttgctatgaaaaaactcatcacacaagaagagaaacagtaacctcactttgaaaattagctccactcaagactagtccacgaacgagacccgccttttctacacaggatccaaggtcacgagaagcagccagagtgccccgcctccgccggctctggtctgccattcgccagtgcagggatctggcacggaccagatgtggcgaatggcagcacagcgcggtggctgggtctgcacactggcctctgcagccagatttctatattgggagttttttaaaaagacatttcatagccaacaagaatcagtagaagtgctgggagcagcagctggggaagctgccgcccacgggctctgccccttccagctggagccgcccgtgcctccaggggccaagaggatgatgtcgtggcctccattctcgtttctatgcagccccatagtccaaggacacccagtccacatctaccatatagcaagtttagtaagggaaggcagcatacgtcccagggacagtgggtttggatctgtctagaacagcggtttgtggctgtggcccagctccgagagtgatatttgctctggtaggtgagggcctgagggtacatttctccacctgtgccccctcatgttcacagaggatttcagcagctgcaactgcgcacgccaggtggggaagggtgggggtatttttatttttatttaacttttatattttttttcataaatttttattatgttttttttatattatatactacatgtattattt

SEQ ID NO: 312503 - DNA, 1020 bp, Homo sapiens
gcggccgctgcgactccggagccggcggggggctccggtccttccctgcgccaccgcacaggacatctctctggctggggagcggcggtgagacccgccgagggcgtctgtgtccctcctcccccgcggtcctcggtgcgtccgcacgcccctcctcctcggctccctccttcttctctccgcgcctctccgccccctccccgtctccgcaggccgagtggtgcggcccgcctccagctgaccggcctggaatcccggctccgagccccggactcgcgcccgcccgcgcgcccgctccttccccctccccccgccccgagccccccgacgccgccgccaccgcctcctcagagcggggcccgggcccagccgccgccaccgctgccgccgccgagctccgccgccgccgagcaccatgggagacgctgggagcgagcgcagcaaagcgcccagcctgccgcctcgctgtccctgcggcttctgggggtccagcaagactatgaatctctgttccaaatgctttgctgattttcaaaagaaacagccagacgatgattccgctccaagtacaagtaacagccaatcagatttgttttccgaagagaccaccagtgacaacaacaatacctcgataaccacgccaactcttagtcccagccagcagccgcttccgacagaactgaatgtaacttcaccgagtaaagaggagtgtgggccatgcacagacacagctcatgtctcattaatcacaccaacaaaaagatcctgtggtacagattcacagtctgagaatgaggcttcaccagtaaaacggccacgactacttgagaatacggaacggtccgaggaaaccagtcgatctaaacagaagagtcgacgtcggtgcttccagtgccaaaccaaactggagctggtgcagcaggaattgggatcgtgtcgctgcggtgtttctctggagagagatgtgtggcatttatagtctgatgccccctgaccacgttgccactcggacattctgtg

SEQ ID NO: 312504 - DNA, 2312 bp, Homo sapiens
  misc_feature (95)..(95): n is a, c, g, or t
  misc_feature (97)..(98): n is a, c, g, or t
  misc_feature (102)..(102): n is a, c, g, or t
  misc_feature (136)..(136): n is a, c, g, or t
taaggctggtactggcccggggttatgggatctggggctgggccgaggcccggtggcggatccagtgtctggagtcttggcggggcggggcgggnannggcnggagcggggggcggggctgggactcgatgcgacncaaagaacccgcgccatcccccggagcctccccagagctggccgcgcaggatgggcgccctcaggcccacgctgctgccgccttcgctgccgctgctgctgctgctaatgctaggaatgggatgctgggcccgggaggtgctggtccccgaggggcccttgtaccgcgtggctggcacagctgtctccatctcctgcaatgtgaccggctatgagggccctgcccagcagaacttcgagtggttcctgtataggcccgaggccccagatactgcactgggcattgtcagtaccaaggatacccagttctcctatgctgtcttcaagtcccgagtggtggcgggtgaggtgcaggtgcagcgcctacaaggtgatgccgtggtgctcaagattgcccgcctgcaggcccaggatgccggcatttatgagtgccacaccccctccactgatacccgctacctgggcagctacagcggcaaggtggagctgagagttcttccagatgtcctccaggtgtctgctgcccccccagggccccgaggccgccaggccccaacctcacccccacgcatgacggtgcatgaggggcaggagctggcactgggctgcctggcgaggacaagcacacagaagcacacacacctggcagtgtcctttgggcgatctgtgcccgaggcaccagttgggcggtcaactctgcaggaagtggtgggaatccggtcagacttggccgtggaggctggagctccctatgctgagcgattggctgcaggggagcttcgtctgggcaaggaagggaccgatcggtaccgcatggtagtagggggtgcccaggcaggggacgcaggcacctaccactgcactgccgctgagtggattcaggatcctgatggcagctgggcccagattgcagagaaaagggccgtcctggcccacgtggatgtgcagacgctgtccagccagctggcagtgacagtggggcctggtgaacgtcggatcggcccaggggagcccttggaactgctgtgcaatgtgtcaggggcacttcccccagcaggccgtcatgctgcatactctgtaggttgggagatggcacctgcgggggcacctgggcccggccgcctggtagcccagctggacacagagggtgtgggcagcctgggccctggctatgagggccgacacattgccatggagaaggtggcatccagaacataccggctacggctagaggctgccaggcctggtgatgcgggcacctaccgctgcctcgccaaagcctatgttcgagggtctgggacccggcttcgtgaagcagccagtgcccgttcccggcctctccctgtacatgtgcgggaggaaggtgtggtgctggaggctgtggcatggctagcaggaggcacagtgtaccgcggggagactgcctccctgctgtgcaacatctctgtgcggggtggccccccaggactgcggctggccgccagctggtgggtggagcgaccagaggacggagagctcagctctgtccctgcccagctggtgggtggcgtaggccaggatggtgtggcagagctgggagtccggcctggaggaggccctgtcagcgtagagctggtggggccccgaagccatcggctgagactacacagcttggggcccgaggatgaaggcgtgtaccactgtgcccccagcgcctgggtgcagcatgccgactacagctggtaccaggcgggcagtgcccgctcagggcctgttacagtctacccctacatgcatgccctggacaccctatttgtgcctctgctggtgggtacaggggtggccctagtcactggtgccactgtccttggtaccatcacttgctgcttcatgaagaggcttcgaaaacggtgatcccttactccccaggtcttgcaggtgtcgactgtcttccggcccagctccaagccctcctctggttgcctggacaccctctccctctgtccactcttcctttaatttatttgacctcccactacccagaatgggagacgtgcctccccttccccactccttccctcccaagcccctccctctggccttctgttcttgatctcttagggatcctatagggaggccatttcctgtcctggaattagtttttctaaaatgtgaataaacttgttttataaaaagca

SEQ ID NO: 312505 - DNA, 2235 bp, Homo sapiens
aataactcagtggctgatgtgggactcaaacccagagttcctcacccaggccagtgctcatcttatcatattaagacccctcctgggagaagaaatgtccttaagttgtccagtccactttccattcccaagaacgaagaagactgttgggttgaatagcctctactcctggacagtacaggacccagatctgggaaagagagtagagttagggaaggagttagaccatgtgacattctcactctcttaagtttctttgtcttctgagaagaaagagccgcttttctcagtatttcaaacagaggtcagtctcaaacataagggtgagtaggcgatgggctggttctatgaaattctacaagtatttattgagcgcctgtgctgtgcccagtactgcccttggcaccactgagttacagaagaaataatacaacatgcgatctttgccctctgggagctcacagtttatttagggagataggctatacacaggaaacagtaacaagggctgccagctcccagccctccctcactccagctgttctctccagttcttccagatgtcctccaggtgtctgctgcccccccagggccccgaggccgccaggccccaacctcacccccacgcatgacggtgcatgaggggcaggagctggcactgggctgcctggcgaggacaagcacacagaagcacacacacctggcagtgtcctttgggcgatctgtgcccgaggcaccagttgggcggtcaactctgcaggaagtggtgggaatccggtcagacttggccgtggaggctggagctccctatgctgagcgattggctgcaggggagcttcgtctgggcaaggaagggaccgatcggtaccgcatggtagtagggggtgcccaggcaggggacgcaggcacctaccactgcactgccgctgagtggattcaggatcctgatggcagctgggcccagattgcagagaaaagggccgtcctggcccacgtggatgtgcagacgctgtccagccagctggcagtgacagtggggcctggtgaacgtcggatcggcccaggggagcccttggaactgctgtgcaatgtgtcaggggcacttcccccagcaggccgtcatgctgcatactctgtaggttgggagatggcacctgcgggggcacctgggcccggccgcctggtagcccagctggacacagagggtgtgggcagcctgggccctggctatgagggccgacacattgccatggagaaggtggcatccagaacataccggctacggctagaggctgccaggcctggtgatgcgggcacctaccgctgcctcgccaaagcctatgttcgagggtctgggacccggcttcgtgaagcagccagtgcccgttcccggcctctccctgtacatgtgcgggaggaaggtgtggtgctggaggctgtggcatggctagcaggaggcacagtgtaccgcggggagactgcctccctgctgtgcaacatctctgtgcggggtggccccccaggactgcggctggccgccagctggtgggtggagcgaccagaggacggagagctcagctctgtccctgcccagctggtgggtggcgtaggccaggatggtgtggcagagctgggagtccggcctggaggaggccctgtcagcgtagagctggtggggccccgaagccatcggctgagactacacagcttggggcccgaggatgaaggcgtgtaccactgtgcccccagcgcctgggtgcagcatgccgactacagctggtaccaggcgggcagtgcccgctcagggcctgttacagtctacccctacatgcatgccctggacaccctatttgtgcctctgctggtgggtacaggggtggccctagtcactggtgccactgtccttggtaccatcacttgctgcttcatgaagaggcttcgaaaacggtgatcccttactccccaggtcttgcaggtgtcgactgtcttccggcccagctccaagccctcctctggttgcctggacaccctctccctctgtccactcttcctttaatttatttgacctcccactacccagaatgggagacgtgcctccccttccccactccttccctcccaagcccctccctctggccttctgttcttgatctcttagggatcctatagggaggccatttcctgtcctggaattagtttttctaaaatgtgaataaacttgttttataaaaagca

SEQ ID NO: 312506 - DNA, 2527 bp, Homo sapiens
agcagcgggaggggcggagggaggggattcggcagctccagttcagctcgctcggcgcacccacgcctcgctgccccgcttcctgccctcaacctgggcatgcgccccccacccttccggccccccagaacccgcgccatcccccggagcctccccagagctggccgcgcaggatgggcgccctcaggcccacgctgctgccgccttcgctgccgctgctgctgctgctaatgctaggaatgggatgctgggcccgggaggtgctggtccccgaggggcccttgtaccgcgtggctggcacagctgtctccatctcctgcaatgtgaccggctatgagggccctgcccagcagaacttcgagtggttcctgtataggcccgaggccccagatactgcactgggcattgtcagtaccaaggatacccagttctcctatgctgtcttcaagtcccgagtggtggcgggtgaggtgcaggtgcagcgcctacaaggtgatgccgtggtgctcaagattgcccgcctgcaggcccaggatgccggcatttatgagtgccacaccccctccactgatacccgctacctgggcagctacagcggcaaggtggagctgagagttcttccagatgtcctccaggtgtctgctgcccccccagggccccgaggccgccaggccccaacctcacccccacgcatgacggtgcatgaggggcaggagctggcactgggctgcctggcgaggacaagcacacagaagcacacacacctggcagtgtcctttgggcgatctgtgcccgaggcaccagttgggcggtcaactctgcaggaagtggtgggaatccggtcagacttggccgtggaggctggagctccctatgctgagcgattggctgcaggggagcttcgtctgggcaaggaagggaccgatcggtaccgcatggtagtagggggtgcccaggcaggggacgcaggcacctaccactgcactgccgctgagtggattcaggatcctgatggcagctgggcccagattgcagagaaaagggccgtcctggcccacgtggatgtgcagacgctgtccagccagctggcagtgacagtggggcctggtgaacgtcggatcggcccaggggagcccttggaactgctgtgcaatgtgtcaggggcacttcccccagcaggccgtcatgctgcatactctgtaggttgggagatggcacctgcgggggcacctgggcccggccgcctggtagcccagctggacacagagggtgtgggcagcctgggccctggctatgagggccgacacattgccatggagaaggtggcatccagaacataccggctacggctagaggctgccaggcctggtgatgcgggcacctaccgctgcctcgccaaagcctatgttcgagggtctgggacccggcttcgtgaagcagccagtgcccgttcccggcctctccctgtacatgtgcgggaggaaggtgagagggggctgggccctggacggggttcgaggattgtcaaccccttttccttctgtttccatgacccctccctctccgtcagctgtttgcaggccacagcctcacgctcctcttctaccaagattgtgggaataccctgagtttcctggggcggtgcttggcggcagccctaaccccatgctccctggccctgcaccctctgaccccatgtcctttgttctgcaggtgtggtgctggaggctgtggcatggctagcaggaggcacagtgtaccgcggggagactgcctccctgctgtgcaacatctctgtgcggggtggccccccaggactgcggctggccgccagctggtgggtggagcgaccagaggacggagagctcagctctgtccctgcccagctggtgggtggcgtaggccaggatggtgtggcagagctgggagtccggcctggaggaggccctgtcagcgtagagctggtggggccccgaagccatcggctgagactacacagcttggggcccgaggatgaaggcgtgtaccactgtgcccccagcgcctgggtgcagcatgccgactacagctggtaccaggcgggcagtgcccgctcagggcctgttacagtctacccctacatgcatgccctggacaccctatttgtgcctctgctggtgggtacaggggtggccctagtcactggtgccactgtccttggtaccatcacttgctgcttcatgaagaggcttcgaaaacggtgatcccttactccccaggtcttgcaggtgtcgactgtcttccggcccagctccaagccctcctctggttgcctggacaccctctccctctgtccactcttcctttaatttatttgacctcccactacccagaatgggagacgtgcctccccttccccactccttccctcccaagcccctccctctggccttctgttcttgatctcttagggatcctatagggaggccatttcctgtcctggaattagtttttctaaaatgtgaataaacttgttttataaaaagca

SEQ ID NO: 312507 - DNA, 2573 bp, Homo sapiens
agcagcgggaggggcggagggaggggattcggcagctccagttcagctcgctcggcgcacccacgcctcgctgccccgcttcctgccctcaacctgggcatgcgccccccacccttccggccccccagaacccgcgccatcccccggagcctccccagagctggccgcgcaggatgggcgccctcaggcccacgctgctgccgccttcgctgccgctgctgctgctgctaatgctaggaatgggatgctgggcccgggaggtgctggtccccgaggggcccttgtaccgcgtggctggcacagctgtctccatctcctgcaatgtgaccggctatgagggccctgcccagcagaacttcgagtggttcctgtataggcccgaggccccagatactgcactgggcattgtcagtaccaaggatacccagttctcctatgctgtcttcaagtcccgagtggtggcgggtgaggtgcaggtgcagcgcctacaaggtgatgccgtggtgctcaagattgcccgcctgcaggcccaggatgccggcatttatgagtgccacaccccctccactgatacccgctacctgggcagctacagcggcaaggtggagctgagagttcttccagatgtcctccaggtgtctgctgcccccccagggccccgaggccgccaggccccaacctcacccccacgcatgacggtgcatgaggggcaggagctggcactgggctgcctggcgaggacaagcacacagaagcacacacacctggcagtgtcctttgggcgatctgtgcccgaggcaccagttgggcggtcaactctgcaggaagtggtgggaatccggtcagacttggccgtggaggctggagctccctatgctgagcgattggctgcaggggagcttcgtctgggcaaggaagggaccgatcggtaccgcatggtagtagggggtgcccaggcaggggacgcaggcacctaccactgcactgccgctgagtggattcaggatcctgatggcagctgggcccagattgcagagaaaagggccgtcctggcccacgtggatgtgcagacgctgtccagccagctggcagtgacagtggggcctggtgaacgtcggatcggcccaggggagcccttggaactgctgtgcaatgtgtcaggggcacttcccccagcaggccgtcatgctgcatactctgtaggttgggagatggcacctgcgggggcacctgggcccggccgcctggtagcccagctggacacagagggtgtgggcagcctgggccctggctatgagggccgacacattgccatggagaaggtggcatccagaacataccggctacggctagaggctgccaggcctggtgatgcgggcacctaccgctgcctcgccaaagcctatgttcgagggtctgggacccggcttcgtgaagcagccagtgcccgttcccggcctctccctgtacatgtgcgggaggaaggtgtggtgctggaggctgtggcatggctagcaggaggcacagtgtaccgcggggagactgcctccctgctgtgcaacatctctgtgcggggtggccccccaggactgcggctggccgccagctggtgggtggagcgaccagaggacggagagctcagctctgtccctgcccagctggtgggtggcgtaggccaggatggtgtggcagagctgggagtccggcctggaggaggccctgtcagcgtagagctggtggggccccgaagccatcggctgagactacacagcttggggcccgaggatgaaggcgtgtaccactgtgcccccagcgcctgggtgcagcatgccgactacagctggtaccaggcgggcagtgcccgctcagggcctgttacagtctacccctacatgcatgccctggacaccctatttgtgcctctgctggtgggtacaggggtggccctagtcactggtgccactgtccttggtaccatcacttgctgcttcatgaagaggcttcgaaaacggtgatcccttactccccaggtcttgcaggtgtcgactgtcttccggcccagctccaagccctcctctggttgcctggacaccctctccctctgtccactcttcctttaatttatttgacctcccactacccagaatgggagacgtgcctccccttccccactccttccctcccaagcccctccctctggccttctgttcttgatctcttagggatcctatagggaggccatttcctgtcctggaattagtttttctaaaaaaaaaaaaaaaaaaaaaaaaaaaaaaaaaaaaaaaaggggggcgggcgcgcgccggggccccgggaaagagtttaaaaaacatccgtagtgggggacggggcccaaaagggaacgggaaaggggcaaaacacggggaaccaagagaaaacggggacagaaaaagggaggggattcacaacaaaaaaaaaaacgcccggggggaaacacaaagggtccgaacacaccgaaggggaaacagggggagacaaggggcacacaaaagggagcccaagaagcacagataaaataaccccgccagggg

SEQ ID NO: 312508 - DNA, 2642 bp, Homo sapiens
agcagcgggaggggcggagggaggggattcggcagctccagttcagctcgctcggcgcacccacgcctcgctgccccgcttcctgccctcaacctgggcatgcgccccccacccttccggccccccagaacccgcgccatcccccggagcctccccagagctggccgcgcaggatgggcgccctcaggcccacgctgctgccgccttcgctgccgctgctgctgctgctaatgctaggaatgggatgctgggcccgggaggtgctggtccccgaggggcccttgtaccgcgtggctggcacagctgtctccatctcctgcaatgtgaccggctatgagggccctgcccagcagaacttcgagtggttcctgtataggcccgaggccccagatactgcactgggcattgtcagtaccaaggatacccagttctcctatgctgtcttcaagtcccgagtggtggcgggtgaggtgcaggtgcagcgcctacaaggtgatgccgtggtgctcaagattgcccgcctgcaggcccaggatgccggcatttatgagtgccacaccccctccactgatacccgctacctgggcagctacagcggcaaggtggagctgagagttcttccagatgtcctccaggtgtctgctgcccccccagggccccgaggccgccaggccccaacctcacccccacgcatgacggtgcatgaggggcaggagctggcactgggctgcctggcgaggacaagcacacagaagcacacacacctggcagtgtcctttgggcgatctgtgcccgaggcaccagttgggcggtcaactctgcaggaagtggtgggaatccggtcagacttggccgtggaggctggagctccctatgctgagcgattggctgcaggggagcttcgtctgggcaaggaagggaccgatcggtaccgcatggtagtagggggtgcccaggcaggggacgcaggcacctaccactgcactgccgctgagtggattcaggatcctgatggcagctgggcccagattgcagagaaaagggccgtcctggcccacgtggatgtgcagacgctgtccagccagctggcagtgacagtggggcctggtgaacgtcggatcggcccaggggagcccttggaactgctgtgcaatgtgtcaggggcacttcccccagcaggccgtcatgctgcatactctgtaggttgggagatggcacctgcgggggcacctgggcccggccgcctggtagcccagctggacacagagggtgtgggcagcctgggccctggctatgagggccgacacattgccatggagaaggtggcatccagaacataccggctacggctagaggctgccaggcctggtgatgcgggcacctaccgctgcctcgccaaagcctatgttcgagggtctgggacccggcttcgtgaagcagccagtgcccgttcccggcctctccctgtacatgtgcgggaggaaggtgtggtgctggaggctgtggcatggctagcaggaggcacagtgtaccgcggggagactgcctccctgctgtgcaacatctctgtgcggggtggccccccaggactgcggctggccgccagctggtgggtggagcgaccagaggacggagagctcagctctgtccctgcccagctggtgggtggcgtaggccaggatggtgtggcagagctgggagtccggcctggaggaggccctgtcagcgtagagctggtggggccccgaagccatcggctgagactacacagcttggggcccgaggatgaaggcgtgtaccactgtgcccccagcgcctgggtgcagcatgccgactacagctggtaccaggcgggcagtgcccgctcagggcctgttacagtctacccctacatgcatggtgagtgacaccccctccaccctcctcactctgccttcctcctggcctctgccactggccttcccttcccatcttctgaccctcctgctactatctctctcctccacattatgtcacatgaagtctcaaaaaatccaacttccagccctgcagtgcccacctgcacggggtcctctgtggttgatgctgacttgcatgctgagggggcaggctgtgggcagggatgggggtgtctgtgaatggagaaggtgggttcagagaacttgatggggaaagcgcagaggcaagtgtatgggtggaggatgatggcatcctctctgaacagtcatcctctctcccccagccctggacaccctatttgtgcctctgctggtgggtacaggggtggccctagtcactggtgccactgtccttggtaccatcacttgctgcttcatgaagaggcttcgaaaacggtgatcccttactccccaggtcttgcaggtgtcgactgtcttccggcccagctccaagccctcctctggttgcctggacaccctctccctctgtccactcttcctttaatttatttgacctcccactacccagaatgggagacgtgcctccccttccccactccttccctcccaagcccctccctctggccttctgttcttgatctcttagggatcctatagggaggccatttcctgtcctggaattagtttttctaaaatgtgaataaacttgttttataaaaagca
